United States Patent Application Publication US 2020/0377945 A1 - sequence listing, part 46

SEQ ID NO: 10275 - DNA, 1607 bp, Unknown
  gut microbiota DNA sequence
tatgcacgctctgagacacacctatgcaacgcgtgcaatcgaaagcgggatgcagcccaaagtgctgcaaaaactgctcggtcatgccagcatcaaaacgacgatggatcggtatgttcatgtgactgccgaatcgctggattatgccatcaagcaatttcagcaaaatggtgtagtctgataaaatccaataaagccaaatgcggaaatggtgtaaaaatggtgtaacagccaagacaccaaacgctgaaaccccttgaaaatcaaggaaaatcgaaggagaatgagtacaaatgaaattaggtatcgtcggactgccgaatgtcggcaagtccactctcttcaacgcgatcaccaacgcgggcgcggaaagcgccaactaccccttctgcaccatcgagccgaacgtcggcatggtggccgttcccgacgagcgcctcgataagctcgccgagatgtaccaccccaagaagaagacccccgccgtcatcgaatttgtcgacatcgcgggtcttgtcaagggcgcaagtcagggtgcgggtctcggcaacaagttccttgagaacatccgccgcacggacgccatcgtgcacgttgtgcgctgcttcgacgatgaaaacatcatgcacgtcgtggccgacgcgagcacgaacgtccccgtcgaccccctgggcgacattgagaccatcgacctggagctcatcatggcagaccttgagatggtcaaccgccgcgtcgaaaaggcgacgaagatggccaagggcgacaagaagttcctgcacgaggtcgagctcttctctgctcttgccaagcacctcgacgcgggcaagagcgcgcgcacgttcgaggtttcgtccgacgacgctgagctcatcgcgaccgccgatcttttgagcctcaagcccatcatctacgccgcgaacatggacgaggacggctttgcgaatcaggacggcaaccagtatctccagcaggtcaaggagctcgccgaccgcgagggcgctcaggtgctgccgatctgcgccaagctcgagcaggacatcgccgagctcgacggcgaggaccgcgcgatgttcctcgaggagctcggcattcaggagtccggcctcgaccgcctgatcaagtgctcctacgcgctgctcggcctcatctcgttcctgacctacggcgaggacgagtgccgcgcctggaccatcaaaaacggcaccaaggcgccgcaggccgcgggcaaaattcactccgacatcgagcgcggcttcatccgcgccgaaacgatcaatttcgacgacatgatccgctgcggcagcgtcgcggcggcaaaggaaaagggattgctgcgcagcgagggcaaggagtacgtcgtcaaggacggcgacatgatctacttccgctttaacgtgtaaaattccgaaaattccatcataaatttccaaagacggtgcagctcagctgcaccgtcttttttaagtgaaacgggtgcgctaccatggtagcgattctgcaaaccgttggtatcacaggaaaaaccgcactttaaatttttggaccgctaccaaaccgctaccacgactggcccgcaaagcgctggaatacatagtatatcatac

SEQ ID NO: 10276 - DNA, 229 bp, Unknown
  gut microbiota DNA sequence
cgtcgacaccagcatcgttaaaacatacgcctggatcagcgcgtgcagcagcgtgaacatcacgcccacgatgaccggcagcacataggaaagcgccgcgtagtaatacacaagttccgtcacgagcgcgccggaaagcagcgcgccgaagagtcgaaagctcatcgagatcggcagcgagaaatccttgagcgcgtgcagaaatccgcccacgcccgcggcgatcagt

SEQ ID NO: 10277 - DNA, 498 bp, Unknown
  gut microbiota DNA sequence
gccgctgaaacgctctatgaaatattcgtagcgattggtgtaggcttcatcttactgaaccttgtgtggcagctattcagaaactttgggcttggactgggccttagtgcggaggatccagtcaagctcgccatcaaatccattctctttatctttttagcactttttgcggatcagattatggtgctcgttttgggaatcgtaggaacgccatacgactgggtggtagacacagcacttcccccaatcgagtttgcaagttttgccagcgtagtaacagttttggtgggcagccttgtgtccggctcggtaagtttgattgtactcattttggtgctcatcgtagcatggaactatatcaagcttctattcgaggcagcggagagatacattctcgtcggcgttctgatctacacagctccagtcgcattcgctacaggggcatcagaaaacacatcaaatgtctttagtgcatggtgcagaatgcttggaggccag

SEQ ID NO: 10278 - DNA, 705 bp, Unknown
  gut microbiota DNA sequence
aatgagcttttgcttgcaccataaacttgggtatgttattataaaagtgcaatcgcaagcatggtgttaggagctgattattttgccaagaggaaaactgttaaacggtctggtgacgcagcagaaggtattgcgggcagcggtggcgctgttcctggaaaagggctacaccagaaccaccaccggcgagatcgcaaaggcggcgggcatcggacagagctcgttcttccatgtttttcccagtaaggaggcgctgctgctggagctggtaaagcggatgttcagcgggcaattcgctctggcgggacagcacagcggggaacaagaccctgtactcctgtacgccgtggaaacggccctccagctccacatcgctgaactgaccgagccgctgcgggagctgtatgtgatggcatactccctgccctccatcgcggcatatctttacaaaagcacaacgaaacggctgcaagttattttcggaccctatctgccggaggcgcagcccaaggacttctacgaaatggagatcgcgtccgccagtatcatgcggggcttcatgtcggttccctgtgacgtgtatttcacgatggacgccaaggtttcccgctttttggactgttcattgaaactctatgacgtaccgaaggagaagcgcgcggcgatcacagcagccgttttgcagttggatttgcacgcgatggc

SEQ ID NO: 10279 - DNA, 1551 bp, Unknown
  gut microbiota DNA sequence
atccccttggttcctccaaaggaggaaccaaatgactttcatcatggagggatcacgatgaataaaagattctttagcttacttgccgcatttgctctgtgcttgaccctgatccccacaacagcattcgcagatgacgagaaaagaagagaagatgtttccccatgcagctgtgaaacggcctgcacggtggacaacatgaacaaggaatgccctgtctgtggagcggagaatgccataccgcagaactgcggtcaatccatccctgttgaggacagaaccggcgaaaacggcagcaccgagagagccgatgatccgaatggtcccatagagctgagtgccacagatcaggtacaggccatgatcgacggtttaccgaacgcagaagaaatcactgaagataacgccgaagaagtcaaggcgcagcttgaggccatcgacgaggcgaaggagaagctctccgacgaggaaatcgatgagctggatatgacccggtatgcggaagctgccgctgcattgggggcgctggctgcgccaatgctattggctaatgattcgcctgacgagcagttttccctcaaacccggcgacacctattactttgacctatccggcgaggacattcccggcacagcaaacagcggaaactcagatggtgcggtttctttgccggatacgtcgctgcactatgttccctttacctatgtgggaacgatagaagcctacaaactcacgtctgcgacggtaaccaccgaggagtatgcacagcagaacaaatatccccacagcctgtttgtggcggactatgccgtaacgcatacggtaagctgggatgacttaaatacgaaaagtctgattttcggcaaaaattatgccagcggcggcgtggactataccctgcgcgcaccgtctgtgggaagtaactctacaggctcgggtgagtcccaacacgacacgccgtcaaataatgaatgggacaggatactggacaagaacagcggatatatccaaaactggaataaaatgtattcgtggggacaggatacttcttctgccgccgagtcgttccgggcgtaccgtgggtacaactcggcccgctcctggtattacacctcgtcctcgtttcggaacgtctacctcggtttccgccccgtccttgaagtcctgaaccctgacacactgggctctgacgggatgaaggccgttacccttgacctgaacggcggcaagctgggcggcagctccgaggctattcagatcatcgtgaaaaacggcagcacatttaccgctcccatgtccggcggtttgacccgcccggacggagatacaggcagctacttcatgtggctcggaagcaacggcaagctctacgcgcccggtgccattgttccggcggacgttaccaagctcacggcgcagtttgctttatcagagcagttttccctcaaaccaggcggcagatattattttgacctctccggcgagaacgtacccggaacggaaaacggcgatctgccggacagcacgctgcattatgttccctttacctac

SEQ ID NO: 10280 - DNA, 435 bp, Unknown
  gut microbiota DNA sequence
caacctgaccgacaccgtcaccaagatgggtgctcagggccgtctggttgaggtctatgacgataccatcgtcatgatcgacaccttcctcgccaaggtcacctatgttgctcctgccgcttatgacgctcagggccacctgcgcaccgaggctaccatcaagctcgatgtctatgccaccaagggctccactgctgctaccacgctcaccctcaccaacggcgaggatgcgtatccgtatgctgtcggcgattacgttctcctgaacgcctacaccaacgcttttaacagcgctaccgagagcggcctcatcaagaccgccgctgacaagtacggcgagatcgtttccaaggccacttccattgacggcgctcagagcgtgatctactacaacgccaagcagcacaacgtcgagggcactgtctatgacgatgc

SEQ ID NO: 10281 - DNA, 760 bp, Unknown
  gut microbiota DNA sequence
attattacctcgcgtcaagactgcttttaccgcagtaccccaagttctctgtatagttgaagcgggagactgtatgccagtctcccgctatatccttatgcaccttctccggccacgcggaagaactcatctggcgacagaatcttgattccaagctcctgtgcctttgccagcttgcttccggcgttctcaccgcagatcagataatctgtcttgctgctcaccgaactgccggcatgagcccccaacgattcaatttttgcgttgatcccctcacgggtatatggctccaccttgccggtcaccacaagggtcttgccgacaaagggattgctcatatcggtgctggccgcaggcggctgataggtcttaatgcacaccagtcgccgcagctccgtccagatcgtccagttttcctcgctgcggaaccattgatggatattcctgtgcagcgtttctccgaagtccgggagctgtgtgaaatcaaagctctggcacacggccgtttcaaattccgcaaggtttccgcggaatctttggcagatggccttgctggcggtgctgcccaccatagggatatccatagcagtcagatactgctcaaaggtggtaatgcggctgtgctggatggcatcccaaagattttgccaggatttctctccaaacccctccatctgaacgatctccgccctgtgcttgtccagagcgaagatgtccatataggagtgaagccaaccctttccaatgaacttttccagga

SEQ ID NO: 10282 - DNA, 1486 bp, Unknown
  gut microbiota DNA sequence
cttcgtccgcttggtggaatagggattcagctcccattccttcggctcgatcagttccatcagatccggcagcttttcaataaagctgggaacatactctgtctccattccaagcacagtggaataccgctctgccagcacgcgggctttattttcacccaagtctgcggggacaaagttctgccgatccaggttctttggctcgacaatatccccatcgcagacgacaaatcgggcaggacgatccagcatatgaagcaggcgaaacacatacggggcaacatatcctcctgtgccgccggctcccagcatgaccaccttgaccgggcgatccgttggaaacttcataggaacgcctcctccagaaggtcccggaagctgcgcttatccggctttttgaatcgttcgggctttctgctgcggatgcttacctgcgccagccattccttgggaaacggctgctccaatccttccatcacaatatttggatcgatggatacaaaggagtcgccgcagaaaatacgcgccttgacgtccggatagaatttatcaagttttcccaaaacgaggtagagtcctgtggagcgctcatcctgatcatctttaccggagaaaaaggcatccatgctgttatgagagtggatatccgcgtagcaaagataccgctcttcatcgtcataggggcagtcatggagatcggcctctacttcctccttgcacacgctctgcttggggacgtaggcaaaaaagcgtttttccgccttgtcccagtaaatctgggcaaatgcttcattctccccatgatccgtcataaaggcacggaaaaaggcgatgatctgtcccatcagctcggcgggaatcttcggcagagccggggaaaacccggctctgacctcagagaaatccaccacattctttttgggggcgataaactcgccctgctccatcttgcgaagctcatagatcctgccgtcgttggaggggatcaggcagatgaccttatccgaggtgcgggcctcttccaaggtgccgaatttccctttataagcggcattccccttggttttcatttccaccttgggctttacatagcagcaggggtctttgtccttcgttttcttgagggcgtcgagaaattcgcgagagcgttcgatcatctccttcatggaaatgatcgtggtccccttggggtctttgacctccttgcggatgccgcagtattccacgctccaggatacccttttgccttcctccagatcggtaaaatcatcggacttgcggatgcgcagttcctcaaaggtcatggaaggatcgtcaatctcctctttcacgcccttgtggtaaaataccggaggcttttccaacaggccctttttggtattctccgctgttttctgctcaaaggccgcggcaatgggattctccgcaggagcttcggctggcgccttggcaggcacattgacgatgggtgcggttgctggctggg

SEQ ID NO: 10283 - DNA, 462 bp, Unknown
  gut microbiota DNA sequence
gtccgtcgcgcccacggccatcgagggaatgaacacggcttcgggatagtagcgctggaagctctcgaccactgtgcggtagccgtagccgtcgcggcgcgcgatggcggaggggtcgttcgcttgcaaaaagcgcatctcgacgcccttgtcctgtacggcctcgcggcagtgggccatgacgctctcgaccgtgtcaccgtcggcaatgcggaagttgatgaccgcggtcatgtcctgcggcatcacgttgcacgcggcgctgccgccgcggatcatcgtgggcgcgatagtggtggtgacaaacgggaagaggtcgggcgagcccatgcagcaggccgcgatggcgtccgcgttgcccgcaacatcctgcacgagcgttttgagcggctcctgcgtgatatagggcgcgagcgtttcaaacgcgccggtcatggcgctgttgaggcgcacggcaaacgg

SEQ ID NO: 10284 - DNA, 239 bp, Unknown
  gut microbiota DNA sequence
ggcgcgctcgccatcgccgagcatttgaaggcgcagggcgtgacgctcgaattcgttcttgacgagggcggctgcaaaattgagcccggcacggccttcggcgcgccggagacggccattgtcagcgtgcagctgatggaaaagggctatgccgatttggagctctccgtccacagcatcggcgggcattcgagccgcccctacggcggcacgtcacttgggcgtctctccggtgcgat

SEQ ID NO: 10285 - DNA, 810 bp, Unknown
  gut microbiota DNA sequence
agacattcatgcgctgctgcagcagtttaccggcacaacatcgtctcccccgagaagtgccatgtcaagagggaacatatgtctcaacctgagcagcgtcagcacggcactgctgaaacaggtggatcttgcggtatacagcggagaatgtctcgcgatccatacggaagaccggcggctgctggatggactgcggcaactggctacgggacagagcgcactgctcggcggaaaagttctgatcgatggacagccgatccaccggccgatggcgcgggatcagcgggtcgcctatattgcagaaaatccttcacaaatgatgctgtttcaggatatgagctatttgcggaatctcacgttttgcctgcctcggcagatcgacagttggcttcgccggcggagcatttaccgcagcctgcggcgcgagctgacgccggagcttggcgcggtttttgataaagacatccgtgatctgaacgcacaggagaagtatgcgctgatctttcggcgggtgctgctccagcagcctcgtgtggtattttttgagcagccattttgggggaatgacgtgctgctgcagcagcatatcgagcggcaggtacagctccttcttgacaaaaagatcgcggtggtcgttctgatcgtcggtatctatgacgcgttcccgttggccgaaagaacgctgatttataaaaatggacacctgttgactcagtaagggaacggctgacaggccggatgtcttctggtacgatgtgatttgtatcgtgtaaagcaacgacctgaacaatatgttttccatttttcaag

SEQ ID NO: 10286 - DNA, 422 bp, Unknown
  gut microbiota DNA sequence
aatgattgttcttacagagcagatagagattccggcttcctatgaaaaattaaaggcatggactgctaactttgaggaagagtttgtgaaatggagtccctaccacatcgaatgtaatctctataacgggaactatcatgcgggaagcaaggtccgcttccgcgagattgttatggggctggactacgatgtgacaggcacgattacggaatgcgaacaggatgagaaccacttccgcattgtattccggagcgacaagaaaacagcgttcatcacctttgaaggaaaaagaactgaaacaggatgccatttctctcacaccgaggctttcggcatgaccacgccggtaattggggcgatcatgaactttctgatcttcaaggtgtttttcaggaaaaaggcaaactggcagcttatccggg

SEQ ID NO: 10287 - DNA, 2181 bp, Unknown
  gut microbiota DNA sequence
ttccgccacgacagcgccgtgatcctggaggagacgatccccggctttgaggtgggctgcgcggtcatgggcaacgaggaactgaccgtgggtctggtggacgagattgcgctgtcggagggctttttcaactatgaggagaagtacaccttaaagacctccgccatccactgtcccgcccgcatcccgccggagaaggcggcagagatccaggcagcggcaaaaaccatttaccgtgccctggactgccgggtattcgcccgggtggatctgttcctcaccccggatggggagatcgtcttcaatgaggtcaacaccatccccggcttcaccgcccacagccgctaccccagcatgatgcagggcatcggcatttcctttggggagctggtgacccgcctgatcgagttgggggtggcgggatgagaaccgtgtcgattccccgggagcagatttttcaggggccgctggtcctggtcaaccgggcgcatcccctgcatgaaaaagagcgatctgcgctgacctcggtggacccgcaccaccccgacattcttcttgaaagccgggcacggcagctactgtctgcctgtatccaaaaggcggggggacagcgggagatcgtgccggtgtccggctggcggagccagcaggaacagcagcggatctgggacgactccatggcggagcatggggagacatttacccgccagtatgtggcccttccaggatgcagtgagcatcagaccggcctcgccatcgacctgggaaaggctgccggatacatcgacttcatccggcctgcctttccctatgacggcgtctgcggaagatttaggcgtctggcggcccggtacggctttatcgaacgctaccagcggggcaaggaggaagtcaccgggatctcggctgagccgtggcacttccgctatgtgggggcgccccacgcccagctgatggaaaccaacgggctgtgtctggaggagtaccgggactttttgcggcagggtccccggagcgtcgctctggaaaacggccgcatggcccaggtgttctatgtgcccgccgccggagccgtcacagaggtggaagtgccggagggctgctgccagatatccggcgacaatgtggagggatttatcctgacatggtggggggatacccatgagaacggctaagaaaaccgtcccgactttggacctctttcgtctggcggcagtcctgctggtggtgatgaaccacacctcgcccctggcggatgtgtctgccatggctgatttctggcttacccgggtactggcccgggtggcagtcccattctttctgatgaccactgggtactttctgagccggaatcactgggctggtgtggggcggcagctgaaaaagctctgcctgctctacggcgtctgcatccttttgtatctgccagtgaatctctatgccggcagcttcaccggtccggcggatgttttgcggaaactgctggtggacggcaccttctaccacctgtggtatttcccggcgaccattctgggcatcgtcatcgcccggtggctcagccggctgggcctgcgggtggctctgcctgtggcggcgctactctatctcatcggtctgggcggggacagttactatggactggtttcccagatcccgctgcttcggaccctttacgacggcatttttacactgtgcggctatacccgcaatggcctgttcttcgcgccactgttccttctgcttggggccgccggaaggcggtggaaccaaaagctgtctctggcgggcttcttcctctctctggcagccatgagcgccgaggggctgtggctccatcgcatggatgtccagcgccacgacagcatgtacctcgccctccccctgtgcatagtatgccttttttctctgctgctgggcggaaacaagggcgagtccaggaaagtccgggaattttccacagccatgtatgtgctccatcccctctgcatcgtactggtccggggagcggcaaagctactgggactgggagaaatgctcattgaaaacagtgttctccattttattgtggtgctggcgctcagtgcgctgctctccgccccttgcctgctgaggcttcaaaagaagcccagccccaccgctcgggcctggcgggaggtggatctggcggcccttgggcacaac

SEQ ID NO: 10288 - DNA, 437 bp, Unknown
  gut microbiota DNA sequence
acgatggcatctgacccagacggtggcggatattgaccacgggcgggccttggcagccagagggcggcgtgtccatgtccatctggccctggacacggggatgcaccggctgggcatcctggcggaaaaccggaaggagatcctggaggcattccggcttccaaacctggtagtggacggtgtcttttctcatctatacgtctcggacagcctggaagccgaagatgttgcctacacccaggagcagctgaccttgttctatgatacggtggcctggctccgaactgccggatatgatcccggcaaagttcatatccagtccagctatggactttggaacctcccagctcagccctgtgactatgtccgggctggaatcgcactctatggagttcgaagcgatgatgcgcctgttcagcgaagccttgacctgcggc

SEQ ID NO: 10289 - DNA, 493 bp, Unknown
  gut microbiota DNA sequence
cagtatccgcactgtgcaagccggagagagcgccgggtacgggcgggtctttcaggcagagcaagaaaccaaactggcggtggtcaccatcggctacgcggacggtctgccccgggatctgcctcagcggggcggccaggtgctgattcagggccggcgttgtcctatggtggggcggatgtgcatggaccagttgctggtggacgtcagcgatctttcggaggtcgctcctggcgatacagtgactattatcggccgggatggcggtcaggtgattcgggcagaggaactggctgcatgctgtgggacgattaccaacgaactgctctcccggttaggcatgcggttacccattgtttctggttaaagagcggtaggaaattttacaaagattccggttcggatttcaacatgaatatacctttaaacaggaatagccaccaaccacgatgaaatggttgatggctattcccgtttggtcgacaccaagaga

SEQ ID NO: 10290 - DNA, 777 bp, Unknown
  gut microbiota DNA sequence
tgacctcagcgccgcggcgctgcacattttagcgatggccttcatgctgctcgaccacctgtgggcgacgctttttctttcgcaggagtggatgacctgcgtgggacgtctcgcattccccatttttgccttcatggcggtggagggctacttccacacgcacagtttcaaaaaatacgcgcagcggatgctgatttttgcgttgctgtcggaaattccctttgacctgatgtacggcggcacgtggttctaccctgtgcaccagaatgtcatctggacgctgctcatcggccttctcggcattcgggcgatggaggccgtgcgggaaaaggggaagacatggctctatcttctgacttgcgttgcggtcacggtgctgggctttgcgctcggcacgctcggcatggtagattattacggcatgggcgttttgacggtgtttgtgttctatttcctccgcggcagagagtggtggaagctgctcgggcagatcgcggcgctctattggatcaatgtgtcgctcatcggaggacagattttcccgatcgagcttttcggactggagtttgaggtctgcgagcaggggcttgcactgctctcgctcgtgcccatctggctctaccgcgggcggcagggacaccacagcaaggtgtttcagtatgcctgctacgcgttttatccggtacatatgctcatcctcggccttatccagctgtctctgtaacagaatacgaaaaaagcgctgccgaaggccgactccgcataagaaaacatgcg

SEQ ID NO: 10291 - DNA, 604 bp, Unknown
  gut microbiota DNA sequence
cgtcacgaacagggacatataggccagacgtgttgcaaagcagaatagttccgcgaagccgacgacggcgatgggcagccagcgccggatctgcccgctgcgcagtgccggacacagcgcgagcggcacgagcatcgacaaaatcgcgctctggctgttggcaaagtaaaaccacccgcacaggccgatgcgcttgtccggatacgtatagggattggtgccggtcagcgcgctgagcagcgcgacggcggcgatgatccagaaagcgatggtgatcccgcgttccaagctggcaaagccctgccggcagcagcgcagaaacgtgataaacgcgatcgtaaacagcggcagctgcgcgaagcggatgaagttggtcgcgtcggagatcaggttcgcggtcgtgaatggagcattggcgcgcaggcatgccagcacgtgccccgcatagagcgtggcgcacacggcagcggcgatccagtaaaagcgccggcgatccgagagcacgaagcccgtgagcatgacgccgagaaagatcagcaggcgcagcgacagcgtcagcttgctgccccaggccaggtcctgcgtccagaacgacagcacgtcc

SEQ ID NO: 10292 - DNA, 2103 bp, Unknown
  gut microbiota DNA sequence
agcacagcagcaaattcatggccacgcaggtgatgccgatgagcaggacggacatcagtgtgatgcgccactgcagggaaagacgcttcatacttcctcgcctcccatcagatagccctcgccgatgcggttgcggatggggtcatagcccagcacggcgcggagctttttgcgcagggcggagatgtggacgcgaatggaattgctgaagctgtccacactgttgtcccagacatgatccatcagctcctcctggctcactggccgcccctgatgcaccatcaggtattcgagtatccccgtttctttgcgggtgagcgtcagcgtctgcccgttgacggcggcggtacgggagcgggtgtcgaagctcaggcctccgcagcttagcagcacatcctgctgggtgaactgccgcaaggtcaggctgcggatacgggcctccagctcggccaggtggaagggctttgccagatagtcgttggcgcccgcatccagcccctcaaccttgtcctccacctcgctgcgggcggagaggatcagcacctttgtctcccggtcagtctgccgcagggtgcgcagcaccgtcatgccgtcctttttcggcagattcagatccagcagtaccagatcgtagcgctccacgcccagcaactccagagccttctccccgtcgtagcagtagtccacgctgtaggccagccgccgcaggctgcggacgatcgtttcgcacagggcgcgttcatcttcaattactaaaaggtgcatgagagccctcctttttatttctccgtttttgtgttgttttcattatagcaaaaatagataaggtttgcgttaaattttcgttcttaacagagactttaactctcccgcgctatgatggggacacaaaatcggaaagggtgatgaaaaatgagctgcgggaaaaagaccgcggcgcagatcgcgctgctgatggccggaatcgccatgctgtgcttcggtgtctggcggggcgaggcggcgacggtgctgagcaaagcaatcaaattatgtctggagtgtgtgggcattgggtaaaaagttttcaggcgtttcacagaccatgtcccgcttccgggactggatccaggcggtggcaacgctgctgactaacctgcacctgccgaacttcctcaagggaggactgtatcagggcgctgggaaaaccgtctgcgtgccggggctgaactgctactcctgtccggcggcctccggagcctgccccatcggggcgtttcaggcagtggtgggctcgtccaagttcagcttctcctattatatcacaggctttctcattctgctgggcgtgctgctggggcgctttatctgcggcttcctctgtcccttcggctggtttcaggagctgctgcataagatcccgacaaagaagctctccacaaagaagctcaagcccctgacatacctcaagtacgccgtcctgctggtgatggttttcctgctgccggcgttccttgtgaacgacgtgggcatgggagacccgttcttctgcaaatacctctgcccccaaggcgtgctggagggagccatcccgctgtcccttgccaatgccggcatccgggcggcgctgggcaagctgtttacctggaagctcggcattttgctgacggtgatcgcactgagcgtggtgttctaccggccgttttgcaaatggctgtgcccgttgggggcgttctacgctctgttcaaccgggtgtccctcttccagatgaaggtggataagaataagtgcatctcctgcggaaaatgcgccagagcctgcaagatggatgtggatgtgacgaaaacgcccaaccacaccgagtgcatccgctgcggaatgtgcgtccgcgcctgtccgacaaacgctgtgtgcttccgttacggcttcggcagcgggaaagagaaagaaaacgcagcaacgctgcgagaaaacaacaacaaagcttaaggagaaacaaatatgaacgcaaagaagattctggctctgctgctgggcgcgatgatgctgctctcccttgcagcctgcggcgcaaaggacgacaaggcggcggatatgaacggaaataacactgtgatgaccgg

SEQ ID NO: 10293 - DNA, 3193 bp, Unknown
  gut microbiota DNA sequence
ttatggcggccgataagggcatgaccatgcaggaggacggcaaaaactacggcgacttcctgctcaagaccatcgaggacgccgaggaagagttcagcgacgaggagtatgagtggctgaaggagtcggccacggagatcagcaatattgaaaacaagctgaccgagttggaagagaagtatcccgagatcatgcagaaatccatggacggcgatatgagtatgcccgcgggcagcgacacgagcacccctcccgacgacggcagtatgcagaagttccccgcctttgagggcaaagacttggatggcaacacggtgaagagcgacgagctgttctccgccaacgccgtcaccgtggtgaatttctggttcaccacctgcaatccctgcgtgggagagctttccgagctggatgcgctgaacaaggaactggcggagaagggcggctccctcatcggcgtcaacaccttcacgctggacggcgacgaaacggcaatttccgaggcgaaggatgtgctggccaagaagggcgccacctatcagaatgtgtattttgactcagatggtgaggcgggaaagtttactaccaacatctttgcttatcccaccacctatgtggttgaccgcaatggcaatatcgtgggtgaacccatcgtaggagccatcacggaaaagaagcaggcggagacgctgcaaaagctcatcgagcaggcgctcgccgccgatgtgggctgacccgagatttaaaaagtgcctatgatgaagaaaaagcgttgtaagccgacagatattctgcgcgccatttcgctacctctggtaggcactgccggagcatggctgtaccgccgctatgcaggctgcgccgccgatacctgcgccatcacctcgggtccgtggctctttgcaggcattggatgcatccttggatcgctgctgtatactgtcctgcggcccgaccgcagcgaagaacaggacaaggaagggtcggagtgagtcctgattcccctgaaggaggaaacgcgatgtatcgaagtgtattggccctgcttttcggcacagtctgctgctgggcggcgcagccgcccagcagcagactgtgccgaaggaaaagagcggacgggaaacaaacatggacagagcggcttttgaccggtccgacgaggagatcacctatatggataccacagacaatgtcatctatctggcgggcggctgcttctggggcatggaacagctgatgcagtccatccccggcgtcatcgacgccgagagcggctacgccaacggcacctgcgaggcggatgccgattacaagaccgtctgcaagggagagaccggttttcgggagaccgtgcgggtggaatacgaccccgagcaggtgagcctcgacgcgctgctgctggcctacttctatgtcatcgaccccacggtacaaaaccggcagggcaacgaccggggcagccagtaccagaccggcgtctactacaccaacgaaagcgcgagagaaacggtaaagcgcatcgcggagatagagcgcggccgcagcgagaaattcttcgtggagatcggcccgctcaaaaacttctatcccgccgaggaatatcaccagaactacctcgaaaagaatccgaacggctactgccacatcccgcgcgcggagatggagctcttttcccggctgcgcatcgacccgggcgactatcagaagcccgcggcggagtccatccgggacaagctgacggcggagcagtaccgcgtcacgcaggagagcggcacggagcgcgccttcacgggtgagttctgggacaagtttgaaaagggcatctatgtggatgtcgtcaccggtgagccgctcttttcctccacggataagtacgagagcggctgcggctggccggctttcacaaagcccatcgagggccctgccgtagtggagaaagaggatttgagccacggaatgcgccgcacggaggtcagaagccgcgccggagactcccatctcggtcatgtgttcaccggcgatccggagtcgcccaacggcgtgcgctactgcatcaacagcgcagccctgcgcttcatcccctatgaaaaaatggaggccgagggctacggatacctgctgtatctgtttgaaaaataggacgcaagcggtcggcaattctcatacaaggaactatcagagcataacagcatatcggactgccaccgggcagtccgatatgctgtgaatggaattttccggcactctcaatgagacgatttcgaaatggagaagcgcatgtatctttttcaaataagcaactacgatgatcctgctgtggacagagaaaccgcagagctgctgcaccagcgtttggaagctgagagtcggcggcgctgccccgctatgtggaatgcgatagaccgcatcagaactcacgccgcgaaaggcccggggcgcgaaaagcggacggtacgctgccgtatttatggcgtgttcctgctggctctgggcctgttgacgctgattcttggcttgatgccgccaaaaaccaccgctgtgatcattgtgggcggagccgtgatcattgcaggcctgctggagtttgcccttgctcgcggaagaacgccgccgcgcataccggcatcctgcaaaaaggaggcgcggaaagcgctggagctgcggcgggccgttgattgggaaaagctcaaaaccaccatccgcttcgaggatgccggcataacgatctgcgtggaggagaacgaagaacatctcccgtacacacggataaagagcgcctttgaatcattgcatttgtggcttgtggtctgcgacgatgaatgcgcgctgctgctccagaaaaaggacctgagggccgggaacgcagacagcttcctctctgacatcatttcaaaaatgaacacaggaacagatgcatccggctgaacacggcagctatgtgacgttaccagtccgtttgtcccagtgggacttcaactatggtccagctatcgacggaagcacacaaatgagcgatttccagaaggatgatcggaggcagatgaataagcgagggatagcttttatagcggtagatatcagggctgttgtcagcaaaatgtaggaacaagagaccaatcggcaggcaacgaacatgggagttgaagcagcattttatatccgcctattctgttatcatgcccatcgcgctggg

SEQ ID NO: 10294 - DNA, 15091 bp, Unknown
  gut microbiota DNA sequence
gttacgccatgtccacctacgattatgaggacggcgacatcgacggcccctttgccaccggtgtgtccatacagaccagcggcggcggagaaatggtgtggttcacctcgtcctatttccttgaggacgcctataacgcctcgtcctccggcgccaacggcgaccttgttatgaatgcgctggcggatatgatcggcgagagcgaggccatggcgatccgcagcaagtcgctgaactatgactacctgtccatcagcggctcgacagcctcgctgctgaaggtactgatgatcggcgcgttcccgctggcttacctcggcatcggcgtgggcgttgtgctgacaagaaggaggaagcaaaatgaagcggtctaaaaagctttgtatcctcttgggtattctcattgcagtctgcctcgcagcgctggctgcaatgctctcggaggagaagaaggaggagatcaaaaccagcggtgaaacggttttatccgttgaatcggcaaaagtgaccgcgctgtgctgggagcaggacggaacaacatggagcttccgccgcggcgatgacggctggcagtatgatgacgacgcagaatttcccgtcagcgacagtgccatggacgcacttttggagccgtttcgctcgttgagcgcagcgttcaccattgaaaatgccgaagatctcggccggtatggcttggatgagccgacctgcaccatcaccctgactacggatgatgagacctacacggtgaagctgggagatcacagcacaatggattcccagcgctatatggacatcggtgacggcaatgtgtatctggccgccagcgatccgctggacgcatacgatgtggagctggaagacctgatcgccaacgacgatgtgccgtatttcgacgaggtcagccagatccgctttgcgggaagcgaggactacagcgtgatttatgacgaagacggcgagagtatctgcgccgatgacatctactttaccgtggacggaaagccactggataccagccgggtcaactcctatatcagcgtcctgcgctatctggatctcaccgactatgtgacctacaaggtcacggacgaagaactgtccgcctacgggctggacgatcccgagctgagcgtcagcgtggactacacggacgacggaacctccgatacctttgtgctgcacatcagcagagatcccgcggagaagaaagctgccgcagatgcggaggacgaggaagcttcggacattaccgcctatgcgcgtgtgggcaattccaagatcatttatcagatctccggcagcagctatcgctcgctcatggcagccggctacaatgacctgcggcatcaggagatcttctccggcgattttgatgatgtgaccggcattgatgtcacgctggacggtgagacctatacgctcaccgctcagaaggacggcaaggagcggacatggctctgcgaggaagcggaaatcgagatcggtgatttgcaggacgcgctggagacactgaccccagaggagtttacctctgaaaaggccaccggccaacaggagatcagcctgacgctgtacttggatcatgaggacgaactgaaactcacgatcgcgctgtaccgctgcgacggcagcaaatgtctggccgtcgttgacggaaagagcgtcgcctatgttccgcgcggcgagatggtgacgctggcggaagccgttcgtgccattgccctgaactgaagcacaaaacaaagcagcacaagcccgcctgagtagatcgggcgggcttgtgctgcctctgcaagacgcccaacgaggtccgatgcgctcccggaacgccgaaggcactgagggcagatggggggctgatcgttcatcgtcttcaaaatagtgtaggaaatattgcggatctctcagtatgtaattcaccgcaggaggtttatgttgttctaaaggctgggttctttgcaaaaaatagtaattcgtgtgggaaagcgtaaaatcccttttactcttggacatttcatgctatactgtgaacaatagaagaggtattgagtagaggtattttaatatggatttgtttattccaaaagaaacgctggacttactgtcttatcgttcaacgcttgggcaaagcctgaaacaaatttctctgagcgcaacaccaatcaacttgattctcgatgatatcgcgaaatacagagcaggatacattgatacgctcgttcaggaaaatttgataggttctcgcttcaaaagcgatgactccatcatgcgaaaatatgaaaagacgctcgccaaccacggcggctttaagcagtgctttaatgatgtgcttggttttcggcttcgctttgatgagtatccagttagcttcccagactatttcagagttgttgatttgcggaatgggaaacaggtggatgatggttaccgtgcgatccatctttattaccagcgggataatttggcatacccgatagaagtgcagctatggtgtggcaaagattattacttcaacctctggagccaccagtatgtctacaagtacaaaagcccggaaatcggaaaaaagctttatcaggagtatattgccggtttgatcaaaactgagcaggacttccaaaagagattggaggcgtttgacaatgggcgataaaaagatatacatcgttgcaaaaatctttgatcagcagggctgccttgcctacctctgcaagacgcccaacgaggcccgctgccttcccggaacgctggaagcgctgagggcggatggggtgcagatcgttattctggattctcccgaaatctattctgagtacgcgccatacacctacatcgaggatatgaaagagttcatcgataaggtcgcgcaaatgaaccgagtcgcatgacctgcggggcacacagactactatttgactactatcgcgaaaaacctcagaagtcttgccctgcaaggcttctgaggttttccttcaaaatgccgaaaatttgtgcgataccaatcaaaccgttgcactgcaaggctttgcggcttgacggcctgataactccgactctgtaggccgctggttcgaatccagtcgggcataccaaaatgtgttgatgaaagatgcagcacagaaaacaccgcgcttttgcgcggtgttttcacatatttatcatctttttcgccgcaaaaagttttaaaaacagttttttcaaaaagcagtttttccccgcgacaggcgacattttcgagatgcagccggttgattttatgaacggatgcgactcgaacgccgaagcatgggtgcttcactcttgctgctacctggcgcatctcacttctctctcacatttgggcaaagaaaagccagaggaagcgaatgcacgcctctggcgtgcgtccgcttcctctggcaccgcggccccgctgggctacgtggtcttattattcgtctgccaatattgcgctcccttggcattgttcgtcgctttggcagggtatcagtccctttcaccaacgaacaatgccgtgttcaggaaaggaaggtgaagaatcgcaagagttcctatcttgaagtgatcagcagcttacaatgacactttataaattcagggaatattttaaaaatcaattcagcgctggatgcggccggaaccatcgccgtcggccaacttttccacctcggccgctgtaaccatgttataatcgccctcgacggtatgcttgagcgcggaggccgccacggcaaattccacagcccgctgattgcccttaccggcgagcagggcgtaaatcagaccgccgccgaagctgtcgccgccacccacgcggtcaacgatatgcaagtcatattttttggagaaatggtattcatcgccgacagcgtcaaacagcatggcgctccaaccgttgtcggacgccgagcgggactcgcgcagcgtgacagcgaccttttcaaagccaaaccgatcagcaagctgccttgcaacggacttgtagccctcgcggttgatctcgccggcatagatatcggtcgcctccgcctcaatgccgaacacatccttggcatcctcctcgttggaaatgcatacgtccacgtactgacacagatcagtcatggcctcccgtgcctgctgacggctccacagcttgccgcggtagttgagatcacagctaatcctgaccccgtgtgccttcgccgccttgcaggcgtcacggcaggcattcaccatgttggggccgagcgcaggcgtgatgccggtaaagtggaaccggtccgcgcctttaaaaatcacatcccagtcgaagtcggagggagtggactcctgaatggcagaatgcgcccggtcataaatgcaaacggaaccgcgctgagacgcgcctttctcattatagtagataccgatacggtcgcctccacgcacgctcatagaggtatccacgccgtagcggcgcagagagttgaccgcagcctgtccgatggcatgcgcgggcagtttggtgacgtagacggcgtcaaggccgtagttagccagcgaaacagctacgttagcttccccgccaccgaaagaaaactccaagtggtccgcctgaacaaagcgctcgtaattgtacggctggagacgaaccattcaaccgcgcaatatccgaccgccatacagctttccaccttgataaaaagggggggcctgaggagattttcctcaggccccaaaacaggcgcttacagcttatcctcacgcataaaatgagcattggtcccatcaatggagaagaactcatctgctgcacgccgaccgatgtcatctgggtacttagatatctcattcaagtactctttttcatctacattggtaaacgcgccgtctcgcattatgaccttgccgtccactgcaaccagcgaaacctcggatcccctggcactgtaaaccagattaggtaccatgttgcgcattgggtaggtgtacaccggcaacatggagggacaactgagatctatagcaatatagtccgcgcgttttccaggctcaagagagcctacggtatcgcccaagccaatcgctttggcaccctcaatggtggccatacgcagggctttccaggcgggcataacttccggattctgatacttgatcttgttgaagaggcaaacatttttcatctcattgatgatgttatggcagttgttgcccggagcctgatcggaacccaaggccaccacaccgcccgcctgctggaaaacaacacttgggcagacaatgccatcaatgatgccgatcgaacccggattaacgatcattgaggcacctcgtttggcaataagggcagcttcctcatctgtacagtcagtaagatggactgcaataagagattcatccagatagcccaactcatccagaaaagctgtaggacgcttgccatagcgctggacgatctgataggtctctcgatctccttgctgcacatgcatatggattttggtaccccgctccttgaccgccttttggatacgcaacagcatctccgggctgacaaagtcagcgccttgcgggccaaacaggatcttaatccgtccccctgccttgttgttccatttattatacagatcaatgtttcgattcaggctctcctctcccatggcatcatcaaactcatagagttcgcccggttgataaacccgtcgtttagccgctcgaatcgtctgtgcaatattccctcgggcgcccaccttatcgatgaaagcacacacattttccattttggattcatagtcgcccagtgtggtagtgcctgcccggacggcctccagaatggccactcggctgcccacatcccgttcctcgtcattaaccgcgttgtcaaagggctggaggccgaacatcatccaactgttggtgtcttgggctaatccgcgcataatattgcatgcagtatgcatatggccgtcgataaaaccaggcagcaccatatgatgatccaaggtgatcatttcctcagctgtatattccgctaaaatctcaggccggttgcccaccttcaagattttgcctccgtctacagccatagcggcatcactatgatagcccacgccggctccctccatcgtatagaaatgcggggccaccacaatggtatcaatctttttcataaatgtctcctattccaacggcaaagcagttagtggaccttctcagggtaacgccgtttggtaagctgagtcagagtaatcaggctcactgtcagaatagcagcagtaaccgcaatactcaagacatattgtccggtcagtccgccaaaaaggaatcccacgaaagccgaaataccaaccgtgattccgtaggggatctgcgtcataacatggacgatatggttgcaggaagcaccggtagaagagagcacagtcgtatcggagataggggagcactggtcgccgaacaggccaccgccaatcacggcgccaacaacaaacggaatggaaatatcaaaggcgacggccatcgggaaagcaatgggcatcataatagaccacacgccccaagaggaaccggtcgaaaacgaaatgagtgcgccaaacaggaataccaaagccggaaccatgccgggagtcaggtactgctccacaatatggatcaggaactcgctggtccccatacctttgacgatagagcccaaggaccatgcgcacaccagaataaagggaaccgagatcagttcggccataccgttgacaaaggtatcgaacgccttggtcacgctgaagagcttggtgcttacacccatgatgcccgcacccatcgcgccacccataaaggcgatgcaaatagcaagtgtaatgttggcattgcggaagcatcccaccaacccgttgttaaccagatcgccggaccagaaaatggtggcaaagagagaaccaaacaggcaaacaatagggataataaagttccacatagtgagcttataatctgcgggcagttcatttttcacctctggaaccaagggctgaaccccgtcgtccagcagctttccggtctctctggcccgcttttcttccttgtacatagggccaaagttcaagccgaaagcagcaacgatcaaaacagaaatcatggcaaatacgccatacagattgaacggaagcatattcaaccagatgccccattcgttgccctcaacgccgcttgccaacagctctgcggcaatcagtcccgtgataaagggaccatagctgctaatgggagaaagcgcagctaaattgcatcccatggaatccaagatataagccaattttgcacgagagatgcgcaccatgtcagtaacgggccgcatgatagtaccaagcatgaggcagggctccgtatagctgaaaatgaaagcacttaggcaagtaacgatctgccccttcttggcagtattgataacctttgtcaccctggtagcaaaggcctctgcagcaccagtggtacggagcatggcgatcataccgccggagagtgtaaccaaaatgatcaaagatgcatttccgctgagagaggggatcatatagtccgagataattttgacaaaaccaaccaaagggttaaagccgttcatcattgtggaccccaaccaaaccgcgatgaataaagagaaaatcgtctgtttggtccacagggccaatccgattgccacgatggggggaatgagacacaacactccatatgtagtatccatataacaagcctcctgttataaattatctgtggttttttttcatggaatctctgcttccgcaactacaggccctatccgaatctgcaaatcacacctcctcactttctcggtccagggatgcgcaaaacgtaagtcttgcaaaatcaagacacggcatatcagctttgaacgagactgatcatacgatataccgtatattttcatgaacagaccaaacgttttgcgcactccggtttccagcctcccaccgctcccaacatcttcggttttggcagcgcgagtaactacggatcacacttggttaatttcggttttcgtaaccggatgcgtacatatttgcagggatgaattttccctggccgtagcggcccacaaacttggcgttctccaccacaacctggcctcgcagcagaaccgtctccacccgaccagactgacgacggccctcatagaggttgtagtccacgccgttagggttatctgccagatgaactgtcccctcataattgggatcgaaaatgacaacatctgcgtcagaacctaccgccagcgttccctttctcggatagataccgttgatttttgccggctgagtggcaataacatctacaaatttctggcgggtcagctttcccgtgcatacaccttcggtccacaccatatgcagtcgatcgccggcgccgggggaaccgtttggaatctgagtaaaatcattcctgccggcctgcttgagctctgccacatctataccgcagtggtcggatgagaccgccgtcagcagtccgtcggataatgcctgccaaagagcctcgcagtcctcacgatcccgcaaagcgggggagcaaacgaacttagccgcttcattgaaatccggattatccagaacttccttagtggtggtcagatagtgagtgcaagtctcgccggaaacccgctggccagttcccttggccttttgtaattcggcaatggcttcccgacaggtcatatgagcaatataaagaggcgtatcggtctgaccagccagataaatagcccggcgcaccgcctccgcctcagtaaaaggcggacgggaaacataatggtaatgcggcgtcagttggcccttctttacacactcgctgcggaggaaattcaggatctctccattctctgcgtgcacaaataccgtagcgccaacctgtcggctcttctccagaatacggaagaaagtaccgtcatctacatgaagcggagagccgttgtaggccataaaaatcttgatgctggaaatgcctctccgaggaaattcttcgatctcatcaaagatactgtccataatatatgtcaccatggaatgcagtgcaaaatccacacaagacttatccttcgcccgcacattgattcgataatcaatggaatccagcagtccgcgatccggatcctgcggagcaaagtccacaatggtggtcgtgccgcctacaatagcagagtcggtcgtctcatatccggcggtgtcacggttgccgacattgcacagggcggaaaagtgggtgtgctggtctacgcctcccggaaacacatatttacctttggcgtctatcacaagatctgcagcttcgtccaaatgtgtccccattgcgcggatcacatcgccctccaccaggatatcccccacatactcttgttctgcggttacgattgtgcctcctttaatcaaggtacgcatactgtcatctcctaaaatatcaattcttgtttggtaaacatgggaaagcctacgatattcttctgctctgggaagccccaagtagacaccttgctggtacgcagccccatatctaccatggcttccgcaaatttaactgctggcattaccccatccaacacgggaacgcccagctgggcggacaggtcttcaacaaagtccacgaaaccagcgcatcccagcaaaatacattcggcgccgtcctgctgcacggctaactttccctgataggctaacgcttccaatcccttcttggggtccctgccaaattccagcacgctcaaacctgtggatcggatagaacggcaaaacttttccgctccatagttggacaccacatcctctgtgaccttgcgggaccgatccaacaccgatacgatagaaaagtacggcgctataaatttggcagcagcaatggccgactcacagatacccagcacaggcttggaggtgacctctctggctgcctgaagcccagggtcaccaaagcaggcgatgataaatgcatcggcgccttcctctcggtctccccggatcacttctttcaggacccccggaacagccaaatactcatccacataacattcgatgctgtccggcccggatgccggagtaaccgcccaaacctgagtgtcgctgcgtgccactcgacgtgctaaattttctatactttcagtcatggattgcgtcgtattgggattgatgattttgatcttcacaattttccctcctcttggtccaaagcctgaaccatctccatcagcagctcagctccctggtacaagtcctcaggagcgctgtattctcggatagagtggctaatcccgtctttgctgggaatgaacagaagcatggaggggaccgcttttccccaattcatcagatcgtgtcctgcaccgctgaacattctgcgaaaacggataccgcggttgcggcacagtgtctcgctcagctttatcagcttagaactgcactgggtaggcgactggcgaatatattcttcgcctaccagctccgggtgctctttcagcacggagtcaatgacctgatccatgggctccatcgttgggttgcgcagttccacaataaactccaccttgcccggaatcacattgaccgctcctgggaacacctgaagggttcctacagtgcagaccatatccggcgaagcggcctcagtccgttccataagctgggtaatgatccggcaggctttcaccagcgcgtcatcccgcagatgcatgggtgtgctgcctgcatgattggcacagccggaaaccgtcatgcgatagcgcacgatgcccacaataccatcaaccacgcctatttgcattctttcagcttctaataccccgccctgctcaatatgtaactccaagtaacactgatattgggtcagatctcttcggcaggcgccgacctgctccattgtaagtccgtggagggccagatttggccgcatagcttcatcaatctctccgccggtaaatgccttacttccaaaagttccgccaatgacattgccttcctcctcggtaaatgcaatcacctggatgggatgccgattttgatatcccaactccttaaggcgctgcacacactcgattccggacaacacaccataggttccgtcgtaaatcccgccccccggcaccgtatcgatgtgggatccaatgcaaatgatctctccctgaccgggaagcgtaccgatcagattccctacaggatcgacggatgtctgaagtcctgcctgttccatgcactgttgaacatagattcgtccttcgtcataggcaggggtatacggcaatcgtgtggttccttctttcggcacaaaaccgattcgcccaagttgggtcaaatgatcatataagcgggtgccgttgatcatactcatgcggggtccccctcagtctcatgggatctgacaaactcctccagctcctgcagcccctgctccaggcactgcatggatgtcgcataggacagacggatatatccctcgccaaattcgccaaaggccgtaccgggtaccactaccacctgtcgttcttccagcagcttcatggcaaattcttcacaaggcatacccagttgactgatgtcaataaatgcgtagaaagtcccagccggagcatggcaggacaaaccagggatctcagatatccgcttcatcacatagtcacggcgcaggcggtactgctccaccatatacttcaagtggtcttgtggaccttccaaagcttcaatagccgcgacctggcagggagtggccgcacaagcactgacattttcctgcagcttgaccatattccggatcacattttccggtccggcagcataaccgatacgccaaccggtcatcgcataggttttggaaaggctgtcaataaccagggtccgttctttcattccgggcagagcagcaaagcttgtataagtccttccatcaaagaggatgtgcttatacacctcatcagccaagatcaccaagtcctgcttctgggccaattcggccagttggagcagcgtttcagtgctggctacagctcctgtggggttgcatgggctgtttagaataatggcctttgtcttatcggtaacagcttcggcaatagcggatacatccaaatcaaatccccgttgtgcgttggttttcaccgacaccggcacgccgccgcacatccggatctgttggacataattagtccagcagggttcgttgacgataacctcatccccaggattcagcagcactttcagcgccaaaaacaaggctcccatggctccaggcgtcaccacaatttggcttgcgggatcgtaagagagtccctctgtgcgatggagatactctgcaatcgcctggcgcagagccagcagccctgcattttctgaatacttggtctttccttcccgaatggccctgcacccagcctccactacgttcggcgaggcagtaaaatccggctctcccagtgtaaaactaattacatgatcgtactccagcgccttattgaacatttttcgaatcttggagggttggatctgctgagtgttgtctgaaatttgaatcatataggtaactcctttctactccgattcttccgttcccttaatttgagaacagtcatcaatattccaaatgccaaggaaagcaccgctgcaaatacgatacgatattcttgcggaagaagaaatcccacggtattgactgggatccaaaagagaggaatcgttttaaacagagtaaaatcgatcaattctccccaatctacagagtccaccgcttggcgtggagtgatatgctgtcccgccaaaaagcggatttcagcataatttccacatactcgcatcagagcggaatgaataggagcaaaaaacagattattggtcaagctggtaaaaaaggcctgtgccagagcatttccatatcccggaagaagacctgctgccatggcttgccgggtaccttggctgaacacggtaaaggccagcgtgacaaggacgcctcctattccccaactcaggcttttgaaccaagtcgcccggttgatctgccaagttccctccaacagacgcccggagagcaactcacccgccgtagcatagacagcgaattgcgcaaaacctgccagataaggatacgctgtattgaccttggcaaagcctcctgtgacgcaaaagagtaccgtaaacacagccaacaacccataagcaactgcccaccaaatatcgcttcgtttcatatgcatcccctaacttttgtaccccaaatatagcaaaatggaaccggcgttaaaattcagcgccagttccattttatgtagtctgtatattatttggacaagccttctgtttcccgatgtaagaccaacgaatctttatatactaccaaaggataatgcagtttagccaatacaggcggtacatttttcccgagttttatttatagcgcatcaaaatcgatcttgttggttgatacaggaagactctggatcatctgtatccggttacgcacattcattttggtatatatgctgtggaaatgtttttttaccgtatggatactgatattcattttttgagcgatatcttcattggacagcccgtgtacggccaaatctaacatttccccttctcgactggtcaagccgtactggctgcacaacttttcatgatatccttttgcgtaaaaatagcgggtgtctcccttttttgcttcatatactaaacggtatgcaaagtgcttgtgcaactgttccaatacaaacatatcccgttcgctaaacggaggcttatcagcttgccggtacaatttcaataagccgaccggttcttctcgaaaggagatggaaaggccgacggaatatgccaagtgattgggcagatagaagttctggtagattccgctgctattcacctgttcatccgaagatgccatagattcccgaaaagcaccgcctttacaggtatacagcgcccagcgaaaagcatctgaattcaggctttcctgcatccagacatcgacagcctgctgaggcagatgaaaagccgctggggcctgaaactgataggatccattctccgcagtagagattcgggcaaaaattgcgctatcatacgaaatcaaaaaaggaagccatcggttgagaatttcatgctgcatttcctctactgtatagataaatgaaatattgtatgcgatctcattgaggcgtatccattcgttttcatttaaaaatgccatatcaatatctcccttaacatttgtatccagccataagcaaagctcaaaaagataacagtatcaatgaattccgaccacaatcgcaatgaaagcgttcccatcgtagaaagcattctactcggtcacgggtgtagatgctcgaaatgcagatgtgccgcattatctctgacataacattctccccaccctttctttgttcgatcaggtcttggcgttcacataaatacacccgatcctatcgataagcttctcgcgttatgctgccattattatatcaggcagaaggctgaaaagcaattccaaacagaaaactgaaaagcaaagtaatagggctgcatctccacgatcacgatgtcgggacattaaaaatctcaattttgaaaccattcttgacagcaggcattttcttcaccttttcagaggcgaacgaagcataaacttccgtacgtgatctacctctgcgcgggcggtatcatcgcgttttcgccgctgctcatccgcctgcttgcagcggagaactatcgtgtgattgtatccataccgccgataagatttcaaatttcatattgctgaatgctccttgtatctcttttactatgtcctttgcagttgtgaaatagatgttttttacaagtgtagggtcatcatacaactgccttcttactagtgtagctgcgattccagaagtggcgaagccatatatctgattgtctattatgtgttgccttctcttctgttcttctggaaatgcctgttatggcttggaacctgtcaaataaatcttccataggaacaccatcctcaaaatcttattttcttctgaatatcagtaagcttggttttaagacagcaggcaaaggaatggaaatgtcaagaaatgtgcagtcgggaaataccc

SEQ ID NO: 10295 - DNA, 1221 bp, Unknown
  gut microbiota DNA sequence
cgccgatattacggcggtgatgagcgcgcgctggaggagttgtaccgcaggaatctcgggctgatccggcgcatcgcccgggagactgccagagagttcaactgtctgcatatggacagggaaagaccgggagagttgtccggctatacgaaaacgattctggaggatctttgcggcgagggtgcgttggaatttctgacacgggtccagagcagagaatacgatgagagccgtgctgtgcttgccacctacctgtacccacatctgaaaggccggatgacccgttggctggagcaacatatcggaaatctttctctgagcaagcacgagatggatgctgtccggcaggcacaaaggctatatcattcaggtcagttcagcatcgaagagatcgcggagaaaatggatgtccttctggaacaggctgtcaagcacatccgttacaacacccattttgttggtgtcaatgatcttatccctgggagctatgacggtgatccctttgagcggctgatgcctgggaatctctctgtttctgcggagcaggtcgtgtatcgaaaagtctgcattgagctgctgcaggaactatttgatgctctcccgaagaaggacagggacatcctcggaaaattctacggcgtattcggatttgaaaaaacttcgctgaaggaaatcggcatgtaccacatgatgaaggagtccgccgttgaaaaggcaaaggagcgtgctgtcacaaagctgaaaaaagcctatccgggtagcaggctgcagatctggaggaatgttcatcgtatgatacgcagaccgatcctgccagcgaaggatgacagagcactgcggcgcagcttcacgacttcgaccctacgaaatcaggagtctggaagatcgtagtttcgatacagtctggtgagaattttgcgcagacaggagaccgcaacagtcccctttaggacatgtttaggaaaaatcaagagtcatactcgcttttttatacgttccgtgctataatgcagaaaaacacgaaaggccggcaactatggctacacatattttagtcgtcgatgacgagactgcgatcgcagatctggtggaggtctatctgaaaaacgaaggcttcaccatccacaaattctataacgcctccgacgccttggcttgtgtgcggacgacacgcttggatctggcggtgctggacgtgatgctgccggacatggacggctt

SEQ ID NO: 10296 - DNA, 944 bp, Unknown
  gut microbiota DNA sequence
aataataggtggcgataccgtgcgccgccagctcctgcgcgacggcattctcatagacggagccgaaattgatgtccttgtccccgttgataatgcgcaactggatacctccggcatattggctggccaacagccctacgtcgctctggaaaagcttgaacaggttgcgcgaacggtccagcaaaagcgggaccttcggttcctccacgttatagaccggcagcgccacgcctgcattggtcagccacaggaaactgctctcgacccgatcgaacttcgcatgttcgttcaaacgcttcaaaatgaaacgtttgtttttggcattcagctcgggcggaatcaggttgaaaatctcctcgatatagagtttgttatccgggtcgtaccgggcaatgtcccgtttgtacaggcgaataatgtcctgctgtacggtcataacctcctgaagattattgctctcaatgtatttgctcacggcggccggcataccgcctacgacgagatagagccggaacaactccatgatcttgccgtgaacgaactcatcgacggcctcgcggcgcttccacgcttcgcgcagcgccccgatcacggtatcgctgatgcctacgcacgaaatgaactcctcgaaatcgagcgggtacatatccttgactcccatatatccgaccggctccgaacgcaggtccttcaactccacccccaacagcgagccactgaggatataacggtacgacccttcgtccacgaggaacttgatcgcagtaacgatctcggggcactcctgcacctcgtcgaaaaagacgagcgtctcccccttgataagcggcacggaggtcagggcggacaagcgcagcagcatgtcgccactgttcctcgccccctcgaacagcccgaccgcttcgggcgtttcgaggaaattgatctcgacgaaactcctgaat

SEQ ID NO: 10297 - DNA, 2322 bp, Unknown
  gut microbiota DNA sequence
accacaacactacgattcatactggatatctataaagctgcgttccctgcgaatgaagtcctcttggctgcacctactggccgtgccagtcggcgcatggcagaacagacaggaatgcacgcatctacacttcactcggcgcttggccttgtgacggatgaagacagcccgctgaacgacaaagagttactatcagcagacttggtagtcgttgatgagttttcaatggtggacatgcgccttgcgtatatcctccttgatcgtatcaagtcgggcgctcagctgattattgtcggtgatgctgaccagctcccatctgttggcgcgggtaatgtgctgcgagagatgattcgaagtgaaaaggttcctacggcagtcttagagactgttttccgccaggcatctaatagccgtatcatcacaaacgcctatgccatcaaccacaacgacacacatcttcagttcggggatgactttcagtttttggaagttcagaactcggaagaggctgcgcagttggtcatcaagaactatctgcaggaagtctctttgcatggtattgaggacgtgcagattctctcacctctccgtaagcgaggtgcggttgcggcaaatgcgttgaatgagaccattcgagaccttgtcaacccgccaaacaacctgaagaaagaggttaagtgcggcagtcgagtatttcgagttggtgaccgcattatgcaaacggcaaatcgaatcaatgtgtcaaatggcgatgtcggcgtcataaccgacatgaagaaagaggatgatgagacgatcacatgcgtgagacttttggatggaaggacactacagtacacgcaggaaatgctggaggatttggagttctcctactgtacgaccattcataagagccaaggacaggagtatcctgtcatcattgttcctcttttgaaagagcactatatcatgctgcggcggaatttgctctatactgctgtgaccagagccaaggcgaaggtcatcctgattgggcaaaagcaggcagtctttgttgcgatccataaatgcgatgtgggtcaaagaaatacggtgctcgcggatcgaatcgtggcttattataaccgcgagctgagtcggcgagtagcgtgattatttgagaaacggggtggtcaaaagctgcctcgtttctacatttattgtgaaaggacaattaccatgagtgaatcgaactctaatgtgatccctgccatcaacgctgtcgatgggtttaaccccgctgatttcgtgcgtactaccgtgggtgaggaaggcgaaaacgatctctatcttgatgtcaaatatcgccttctttggttccgcctgcaccatccgaatgggaagatcgacccggagcttatccgtgttgatgagaagaatgcgatcgtatgctgcaggatctatgccgataaggctgacccagctgaccagttcattgggaaggcgtattctcagcgattctcaacggaagatcgctttggcgatcgcttcttggagatcgccgaaacagttgcaaagggccgtgcgttggcggatgcggggtatggtacgcagttctgtatgaatggtgagactttggccagtatcatcgcggatgccccaatcaagatgcctcccgatgaagatgcgggacaccctggtagtgtcgtggcgagttttactgctcaaccgacagcggatgctccagtcttctctcaggcggcgacggcacctaaatctactcagcctgctcagcagcaggttcagcctcctgtgcagcagtctcatgcttctgctccggagcccccaaaaacgctggatgagtacttgcgtgtcatgaccattgaacaggccaaagccgttaaggttgattttggccgttttagtggatggtctctcggtgaaatcgctatgaagagtccgggcgacctcgcgtggtatgtgaagaactattccggccataatctcgcactaaaagcaggggctacaaagctactggaaacggtaggccagatggccagctgattcttcccctagctaagggaggtggtttagatgggcagaatacctgatctgccatgtgatattgagcaagtggttgatcttcttggcatcgaagtcatacgagataccgggactcaactgcattgcaggtgtccattctgtgcagatcggaaggctcatatgaatgtcaagatccgcgataatgtatttcggtgtaaccgctgtggtaaaggtggaggaatcctccacctttacgcggagtactgtgatgtcaatctccatacggcttacgaagaactctgcaaaatattcgggccagat

SEQ ID NO: 10298 - DNA, 2404 bp, Unknown
  gut microbiota DNA sequence
tggagcggctatgctatcgaacgacgcccacaacacgtttaaaacggattgttacagagctgttggagcgtggctgcattcttgatggggttcccggattttattgccagaaggactctggccaatgggtgttggatatccgaggttcgggaatcatgctacccgaccgaaacctgctcggccaaattgaagccattcaggttcggcttgataaggtctacaaccagaaattctataacctaacgagtgttgaccagtactacggaacacagtcgaagtgctgcccgcattatgtcggcgttcatgaaggcgatgaagtggtttgccttacggagggagttatgaagtccgaccttgcctacagctttgcgcagggttcaccttatgagtgtggtttcgtgggccttacaggcataccgagctattctcagtacgaacgagtccttgaagaactagactccattggcgtgaagaggatcaacgtaatggttgattctgattatcaggtcaaagaggaagttcggaaagcgcgtgatcgttatattgagatgggtgcggccgctggttttgaaatggtaccgattacctggacacaaaagcggaaaggcgtagatgatctctataagcaccttttccggaacaaatgattatgacttgggctgcagcattttagctgcagccctctgcgtatgaggagaatctatatggttcctattgaaaaccaagagcgaccgaacatcaagtcagtctatacctgctcgaactgtgagaaggctctgtttgatggcgatgatgaccatccgagatggaacttctgccctatgtgcggccaggagattgagtgggataaatctgcaaaggtcgtttgggaagaaaaaaactgtaatgtctgtggcggttggcttgttaagcgccaccctgcaggtttttggtatgcctcaagcgactatattgggatggatacctgctacacatgttggctcgaggagtgccttacgaccaactgccttggctgtaagcgagggaactatccggactgcaagtggattgatttgaaaaagtcttatcaggaggaagacaaatgagcgttgagatctatattgatgacttgaagcctgacattcaaagacaggtattggaagagctggggctcgaaactgcagaagatgggaattatgatattatccctcttttcagcgtagagagaccggaatgatttttgggcagatcacaaatttttagtagaggggggtggtcaaacacaccctcatttctacattcattatggggagtgaactgctggaataatccaaataatactagggataatatcccaaggaggtgctatcggtattatggaagaacctaagattacttctggtacagtgccatataacgcatctgaaatccctgatgatccaagagatatcacacccgagcagtgggaagcgatgaaggcggttgatattcggacagtagacaagtctcagcttgtagacttgagcaccgttcacattgatgaatccttgcctgtgcgtgaaagagtgctcagttatctgaagcaagtgaagaatccatactgtgtccgagtgggcaactttgctgtcaaggtgaaatacaaagaggacgggccatcctttgaggaagtgttcaagcatctgctgcagcagcagagtatgatgtaattcttgccaggtccgtttttcatctggataaagggccatagatgtggtataatagcctcggactaaatcaagcatactcactccttaggcagacagaccacgccaaaggagtgagattatgcagaataatgcgaatgagatggctgtgtttaataccgccatctatgtgcgtctttccaaggaagacatcgttgcggcgcaatctggccgtgagagcaacagcattaccaaccagaagcagcttatcctggactttctgaaggataagcctgaatttaatattgtctccattcgtatagacgatggatatacagggacgaattttgaccgtccagcctttcagcgcatgctgaacgatattaaggctggacggatcaattgcgtggtcgtaaaagacctgtcccgtttcggaagagagtatatcaattccggaaagtatatccaccgtctatttcctgttttaggggtgcgcttgatcgctatcaatgacaacatcgacacgattacccgtgacgagagtagcgagtttagcatcacgctcaagaacttgatgaatgacaactacagccgtgacatctcagtgaaggtcagaagccagctgcaggtgaagcggaaacatggtgactttatttgtccgtttgcaccgtatgggtaccagaagtgcgagggaaaccacaatcgaattgagcccgatccctatgctgccacagttgtccagg

SEQ ID NO: 10299 - DNA, 1785 bp, Unknown
  gut microbiota DNA sequence
cgatgcggaacagctgagactgctggtggagcttctgcgcctatgctgaatgacttcaccggtgcagatcaagtctatatcgcctgcggctacacggatctgcgcaagggcatagatggtctggcgcggctcgtccagcagcagtttgaactggatccatttaccaacacactgttcctgttttgcggacggcggcgagaccgtatcaagggcttgtactgggaaaaagatggcttcatcctgctgtacaagcgactggagcagggcgcataccaatggccgcgctcagaatctgaggtgaagactttaacgccgcagcagtaccgctggctcatggaggggttgcagatcgaacagccgaaagctcaccgtccggtgacaggattgagcgcagtctaagtaaggaagaatgtccaaaaaccattgaaaatactggcttttctctctgccttgtggtataatttcctcatggaaaacagagaaatgcggacaagtaacacggaagaaatggtgaccatttcccgtgcggaatatgagcgtttgcagcaggaaaaagcacggaatgcaaagctggaagcaaagcttgccgcccgtgaacaggaacaggcgcaggtcattaccagcctgacactgcaaaatgagtggctgctggagcagctgaagctgtccaaaaagaagctgtttggccgttcttcagagcaggcagagcagctggtcatggatcagctgagcctgaccatgaacgaggtggaggcttacatcttcggcatgaattccgctgggaaagctcccgtcgccgtgaaggcgcacgagcgcaagcggcagttcggcaatgtgctggatgtcgttccggagggtactcccaccgagttggtggagcaccgcctgccggagaacgaactgacttgttctgcctgtggcagccagatggttgagatcggcaaagaggttcgccggacgctgcagatgaagccggcagatttctgggttcgcgaggatgtataaactgcgagcaggagaccggtgaagccaacattgtaaaggcagtgaaagaaccctcactgctgcctggcagctttgcctctgcggaggcggtggcttatctggcagcacagaaattcgtcatgtactcgccgctgtaccgtctggagcaggagtttaaccgccagggcttgaggctatcccggcagacgatgtccaactggctgctgaacacttcggagaaatggctgcggcccatctacgatgtgctgcgagagcagctttgcagggagtcagtgctgcacgcggacgagacgaccttgcaggtgctgaaagaaccgggacgttcctccaccagcaagtcctacatgtggctgtaccgcaccagcggctgtgcgaaacaggcggttgtgctgtatgagtaccagtctacgagaaaagcggagcatgctgaacatttcctgcaaggcttctcaggatggctgcacgcaggcggataccagggataccacaagctgccgggcaacatccgtgtggtgggctgctgggcacatgcgaggcgaaaatttgatgaggctctgcaaacgctgcccaaggagatgcaaaaggactcgccggcagcgattggcgaatgctattgctcccggcttttcaagctggagcaggcgtttgcagagctgacgccggaggaacgatatgaaaagcggctagagcaggagaaacctgttttagacgcgttgttgtcatgggcaaatgagacgcaggcgaaaaccgcgccgaaatccgcgttgggcagggccattc

SEQ ID NO: 10300 - DNA, 544 bp, Unknown
  gut microbiota DNA sequence
ccgtccagtacaaggtagcgctgtatgccagaatctcggttgagaacgaacaaaagcgagaagccgacaccataggtaatcagattgcgttgctgaaggactttgtttcccagcatcaggatttagttgtctttgacctctattgtgatgacgatatctcgggagttagctttgtgcgcccggaattcgctcgaatgatgaatgacatccgagctggcaaggtgacctgtgtgattgtcaaagacttgtctcgcctggggcgaaatatgattgagaacggtgagtatattgagcagatctttccgagaatgggtgtgcgctttatctccgttaccgatcgctttgactcattgcgggatgatgccgacatttcaatccaactgaaaaattttgcaaacgaggcatatgcgagagacatttcaaagaagattcgggcggtgaaacggacgcagcagcttgctggtaagtggaccactggcactccgccatatggatatatgttagatccggatgacaagtaccacctatttgctgatccgcaaac

SEQ ID NO: 10301 - DNA, 1421 bp, Unknown
  gut microbiota DNA sequence
ttaccgccagagcagtctcctgacgatttacagtgcccgttgcgacttcctgtttcccatcggcctgtgcatctaccgccgcagaggggttgatctcacaaagctggatgccgaagcctgcattatccagcgctgttttcagcgcctcgtcctgcgcggcctgcacatagcgtccggcaggagcctgagccttttctaccgccgcggtaaaattggtaatgggctggttgtcctctctggacaaaaatacctgcgcctcataaacggcgatttggtctgtgatctgcagccggttcagcagcatttttccatcggggcaggccaatcggaaccagagccgctgatagcgcggctccagctcgattccgccgttggcgtttcttttcagaaagcgcagcggatcaaagccctgcaccctacgaagctgctgtacggcagggatcgcctgggtcagcatgattctttctctggacatggtttgatactcccttcataaaataaataagagatgactgtgcgtttttttgcacattcatctcacattaactggcacgctgccatccctcgccctcttcgttacggagggccttgcgcgtgactgccttatagtagagggcgatgcgttcgcccagcatggtattgcgttttccttttcggctccgatggatcgccatatacagcgcccttttttcacccaccagcagcacacggcgcttggcgcgggtgattgccgtgtagagaagattccgtgtcaggagcacattatgggctgccagcagtggaataatgaccgtatcatactctgagcccatggatttgtggatcgtaatggcataggacagctccaaatcatccagaagtacctgcgggcaatccatatagcggccgtcaaactcgatcacgacattggtaccgctgatcttgcggatcgtgccgatgtcaccgttgaaaacaccctcgccgacctgcttgccggagcggttatacagcttgatctcatagttgttccgcatctgcatcacgcggtcattgaggcggaatatttttccggcgtacacgatctccggtgtctccggcgctgcggggttgatctcctcgcggatagcttcattcaggctgttgaccgatgcctcgccctcagagcggaacggcgataaaatctccacctgctcgattccttttgcggcgatctgctcccggtaaagctcacggatgatgccggcagtctcctcctggctctctgccttgtgaaaggcaaagtcctcaccatagtagagcgtcgttttgccctcgttgataaaacgggcattgtgggcaatcaggctgtcctgcgcctgacggaagatctcgtccagcaccgtgactggcacgacgccggagccgatcagctcgtgaaatacatcaccggcgcccacactctc

SEQ ID NO: 10302 - DNA, 1315 bp, Unknown
  gut microbiota DNA sequence
aaaaagaaccgccataaggccccctgctggtaagacagtaaaactcaaatttcttggaacaggcatgatctcggtcatgcctgttccgcttttagcagctcatccacaggaatatagcccacaaggtcgtactcaatatgtaccttctgtctgcgtttgccgctggacttgtcgggcgcttctacatagactgccttgacaagttctctgagggcataaggggtcagctccgtaagggtactgttcctctttacccgctgaacaaattgctctatattctctgcctgttgttcctgttcatgaatttgctgttgcagactcttgacctcggctttgaggtctttttgttcctcggtatagttcttgctcatcatcgcaaagcgttcatcatccagccgaccggcaacattgtcctcgtaaatgcggatgaaaaggcggtcaagctcgccgattcgcttctcagcctgtgccagccgcttctgagacagccgcagcgattcctcgctctgtatacggagcttttgctccatttcagaacggaaatacgcctcatagcgagtgactaccgatacgacctcctgaatgtgcttccagacgatttgttccagcacaacagcacggatataatgtccgctgcacttgtccttattgacacgatgggtggagcagatgaagaagtcctgccgcttttcaaaatagctggtggtagagtagtagagcttttgcttgcagtcgttgcagaacaccaagccggagaacatattgctcttgccggtcgctgtcctgcgatgccgctgctgccgtatctcctgcaccttatcaaagacctccaatgagatgattgccgggtgagtgttatagaaaatcctgcgattctctattggattctcccgctgcttcttgtcataaatggagttagtgtaggtcttgaaattgaccgtgcagcctgtgtactccatgtattcgaggatgtaagcaacggtgctttcgtgccagcgatactcgttctccggcgtctgatgcggtgttttcctgccctcccgctgtttataggcggtgggattcagcaccttctccttttccagcagagcggcaatctggcttggacctttgccctccatgcagagtgcaaaaatccgcttcacgatctgtgcagcttcctcgtcaatcacccatttcttggggtcgccagagtcatgcttgtagccgtatggaatgttggtggtcaagcgctctccacgctccccctttgccttgttgacggcacggattttgcggctggtatccttggaataccactcgttagtcaacctcg

SEQ ID NO: 10303 - DNA, 544 bp, Unknown
  gut microbiota DNA sequence
cccggaacggcgatcctgcccggaacgatcctacgcggcaatacctccatcggcaaaaactgcaccatcggcccgaacgcctatcttgaaaacgcgaagatcggagataatactgttgtcaacgcttcgcagatctataattccaccgtcggcttcgacacccacgtcggcccgttcgcctacatccgtcccggaagcagcgtcggaaaccacgtcaaggtcggcgacttcgtagagatcaagaactccgtcgtggacgacggcaccaagatctcgcatctgacctacgtcggcgacagcgacgtaggcaaaaacgtcaacttcggctgcggcaccgtcacggtcaactatgaccgcgcgaaaaaataccgcacgaccatcggcgacaacgccttcatcggctgcaacaccaatctggtcgcgccggtcacggtgggcgagggcgcttacaccgccgcaggctccaccatcaccgatgatatcccggccatggccctcgccatcgcgcgtgcgcgccagaccaacaagaaggactgggccgcaa

SEQ ID NO: 10304 - DNA, 540 bp, Unknown
  gut microbiota DNA sequence
cagcacaagaatgtccttgccgtcctcccgctccggtgcgaggacaaaactcggatagggcgtaatccgctctttgatcagacggctgatcgtctccgcatcggtctgcgcatctgacaagcctatcacgtttctgtcatcatcaatcccgaaaaacagcgtgccgccaattccgtttgcaaaggcactgacgcttttgagccagcttttcggcttctttacctccagcgcgaccttgaaatcacattcggtcgcttctgcgatccagcggtcaatcatcattctcaccgtcctgtcctttattctttcccctgctcttatagacattatactgattcttgcaccgggcgctgcaaaatgcggaattggcccggctgccgaggaacaccttctggcagtgcttgcacagccgcaggggtttcgcatcgtccaccagcataaagctgaacatcatctggatgcccagcagcagcgaatggaagtcccaatagatggtgggcttatccagcagctcaatatgatagctgggcgcaatgccgc

SEQ ID NO: 10305 - DNA, 871 bp, Unknown
  gut microbiota DNA sequence
aaggcaaccttgaaatcgcactctgttgcctctgcgatccagcggtcaatcattttcctcaccctcctgtcccttattcttcccccggctcttatagacattatactgattcttgcaccggggactgcaaaatgcggaattggagcggctgctcaggaacaccttctggcagtgcttgcacagccgcaggggtttctctccgtccaccagtaggaagctgaacatcatctggacgcccagcagcagggaatgaaaatcccaatagatggtcggcttgtccagcagctcaatatgatagctgggtgcaatgccgccgaaggccgccatgcccttgcggtatagattccgggtgtcctcatcgatcaggtcataatcgttataatacagaatggaagtggtcagagtgaaagcccagtccttgaactgctgcgccacccagtcataggcttcagcatactcccgctggaagctcatggttttcgccataggctcatccgcaaaggtcatggtcagcgccaccattgttcggtcgccggacacactccaactggactcaacgcctcgtttcaccacatccagctggtcaaagggatagaacaacgccagatagtcctcggtttccatggattctgccttgatgaaatggtttttcggcagatacaccttctcatagtccataaaggacggcgtggtgggcagcgccgtcatcagacccagcaaaccgtaatgggtcacaaactccagaatggccttctgtacctcgtcctccggactgcggttcatcatcagcattcccacattcagcgcatccagcacgattcccggcgcttccttcaagggattatagatgtcgggtttggcattcttcccc

SEQ ID NO: 10306 - DNA, 1108 bp, Unknown
  gut microbiota DNA sequence
agccttctgcacctcgtcctccggactgcggttcatcatcagcattcccacattcagcgcatccagcacgattcccggcgcttccttcaagggattatagatgtcgggtttggcattcttccccggcgtgatataccgctttccgtctgcggcagttttcagttcatagcggtcataccgcacccaatgggaacgggactgctcaaagagattcttcatggcactgttcctctcgactcgtaatccaactatatattaactatattactattgtatcaaccgtccttgccatcgtcaagggcggctttctttttttctcggcttcgttttgttctctcggcggatcacggcatccttgcccatggcttgcagcagtgcctcatattcctctacgaactcgcgctcccgcagggtaacgctgtagtccttttccagcttttcgctcagatgctcatacatccgcctttgcagctttttctgaatggtcatacgcaactttcggatgttccggtcagactgcccgcggatggcagcaagccttgtggtgctgtattgcttgacgaacaggtagtacagcacctccttctgctcatcactgagggtgaaaaagagcttggagagaaaacggtttgctgtcagctcgtgcagctcgtagggacaggagaagatgatgtcgagaaaatttccctgacagagctggcggaaccttggcagattcatccagaggggagcaatcttcggatcaggcacagcctgaaactccaacggaacatccccgcgcaggttttcatggtcacgctccctgcgctcccggttcctgtccagcttgttccactcgtctaccacagtcagaaaatcggattctgtccgggctgcttcctccagccgccgcagagcctcggcgcgaatttcccgcttgagccgtttctcgttggtgggtgcggcttcttcctcctcgtcctccagctcggcatgatagtctctgggatgctcgtcctgctccagctcgctttccagctcaagagtacgttcctcggtaagcgcttcctccagcgtctcgtcctccggcgcaccgtcagacgaatcctcccaatcggcaaagccgtcc

SEQ ID NO: 10307 - DNA, 1365 bp, Unknown
  gut microbiota DNA sequence
gaggccgtccgcgccgccgcagtggacatgttcccgggcacggcgaacgtggagacggtatgcttattgtccaaacttaatgcgaagcaacatatcgagattaacttggatatggacgagctggatttgaccgatgcggaaaagaaagccacctaccaagaaatcaaaaattatgtgttggagcacagcggcttgaaagttagcagcttgtatatcgcacaggtaaaacagaagtgcggtatcattgagcgtgagaactacaataagccgaagtctgaggacgctaaacagccgcaatgcccgccagataaagaaaaagcaatcaaggaggcattgacgcacttcggcatgatttaaggagggcggatatgacgtatttgatttcttgtgagttcaacatggataccgcttgtgtggaactgaaattcaacgacggcagtatgattgccattgacaccattgccgtggagaacgaggttgccgacaatatgtatcagcggtcagagttggactggctgatctacaatgcgccgttggagtacgccgatctgatactgaacggcgatccggagaagtatctgaaagcggtcacgcagtataagccgttggatagctgacatggaaacagcccgtaggacgtcaaaatcctacgggctgtgttttcagccatattttaactgtattatcttctgtaattcacaacctcacctgttttctcctggctaatcagcattccagaagtatcaaaagtgtatctgaatacatagcttgtgccgccaattgtgaaggaacttgttgcgggagagaagaatgtggaggtaatgctttctacatcccaaagtagatttcccgtatcactcacagaaagctttccaccaagagacccgttgacagagtagtattcttggggtttccctgcattaggctcacataccaacaacattgcggtgtagttgtcccgtaccataggcgtcagttcatcactggaaatttcccagatgttattatcaaacagataattcaatactccggcaatttcatatctaccgcctgcactctgatcttcattagcaagtctcggaacagcgtacgcagacaaatagatatttccgttatattcaatcatatcggtaatgtaatagtaagaatcttcatcgccataggagaaggactctgtaatattaccttcgcggtcaaccttaacgatttttgcgtgctcattcgtcatatagctaccgagctgaaccatgtaaccatcttcaaaccgagctgcattccaaatcccgtagttacctacttcggctttatggaagtaggtttcttttccatccaccgtatactggctaagacagaaatatttcagat

SEQ ID NO: 10308 - DNA, 1254 bp, Unknown
  gut microbiota DNA sequence
atcaatgcagacctcttcggaaccacgcttttcataatgagaattatcccgtctgaaaatgacggattcgtgcttgtcctttttgattttgccctccttgatgagccgttgtttctccgcctgaatacgctccagcagagcctctgcaggctcgtcagacgggtcttgcggtacaagcttgccctggactgcctcctgcagtatcgacttcttgagggcttctgggaaactgctgttgagcttttggagtgctatgtccacaacagcgtaatccgctaccttggggagcactcgtttcagcattgcagtaatccgttccatttcctcacgtggcggaatcgggactggcaggttcatcatctgctcacgagagaggttataaaacgcttgaccggatttatgtgtaatgtttcggcagttatcacgatggtgtttagcagcaaaagcgtagagcagatattgtgatacgacatcgtcgttaaaatgtggtatgagcataagcacaaaaccaccaacaaccgtgtcggaataatctttgtctatgagtgcgattttgccgatgtggtccaggctactaactgcgggtgtgatcatatagttttttctcaaatacaactctggctttacgagctcgcttgagatgaaaacatcgtcgttcttaaaacagaactgctcttcaccgatattcccgccacgcagtaccctcaccattttgtctgtctttatagcgagagcgtcctttttgtatgcaagcccagacatatttgagaagaggtctcctacacgacaccattcccaagatgaaggtatctcaaaaggcgctaaatccaccagcgaccgcacttcatcgccgattttctcataaggagtattataagaaactggccattgcttgaagaaaagcatattatttgatattataaagaaaacaggagtcttgtaatagaaaggagcacagcatggcaaagcaggaactctctctgaaacaacaataccagcggctcacgcaggccaaggcgcaggcaacccggaatggacaacctacccctaagctcgataagaaaattgaaaagatgaaggcaatgatgggcagcaccgtacagaaagtgccggctgcaaaaccatctgccaacaagttcgtggactacaagggtgtcaacaagctgcccatgcagggtggtgccttcactccaaaataagatttgccataaattgttcatcgcacggaaagaacaggataatctttacaaaagt

SEQ ID NO: 10309 - DNA, 983 bp, Unknown
  gut microbiota DNA sequence
cccctcgtcgagcacacacgccaccccagcccctaaccgcgcacacagcggctcacacgccgaaacacggcgggttctcagggtcgatggtgacgatgtttccggtagcgggatcatcgacaccatcgacccttttcaggcagatcagacggtcgccgttgctcttgcggaaggacactgtaatgccgtttctccttagagcgtcaacgcttttgcggattcggtgggagaagctgttgggggtcagtccctccgtaccggcagggtcgatcttttccaacagcgccttggcaggggcgctgatttccggctgccggcgcagcaattcagagagaagaaaaagaattctctcgttgggctgctctttctgttcgcagtcatctgacagcagcttccagacatgatcctcaccgtcgaactccagtgccagctcccgataggggatgtcccgcccggtgcagtagagcgtggctgtgttctctctgcgctgactcttgcggaggacgaagttgctgtcggtggcgccgctgagtccggtggtgccggagatcatgttcatgggatcatcgtcattcatcttccgcagatgatgcaccagcagaatggcgatgcggtgcttgtccgccagcgctttcagaacgccgatgtcccggtagtcgctggcgtatggattcgcgtcattgcccacggtgcggatgcgctggagcgtgtcgatgacgatgagcctggtctgcggatgctccttcaagaattgctcgatctgttccaccagcccgttgtggagctgctgggacatgacggcgaagtgcagcgtgggcggcgcgtcccccgtgagatcgaagaggcggctttggatacgctggaagctgtcctccagacagaggtacagcacctcgcatggccgtgtggcgaacgtccagagcggcttgccctgcgcggcgcagagacacagccacagcgccagccacgatttaccgatcttc

SEQ ID NO: 10310 - DNA, 379 bp, Unknown
  gut microbiota DNA sequence
aaccgcaggtcattgccggattcagggaggatgtggtcgaggttctggaaccgtctgaaatctaccgtgtttttgctgaatcaggtaaggtgtttgccgagacaaatcacggcgagtatgcgctccgcctgaggctatacgaggcggaacaacggcttgacagcaagacttttgtccgaatatcaaactcggatattatcaatctgagaaaggtcaagagctttgatttgagctttgtcgggacaatttgcatcacgctttcaaacggtacggttacttatgtttcacggcgatccgtcgccaaaatcaaacaactgttaggaatgtgaggtggcagaaatgaagaaaaaactgattggacgaggtgtaattggtttcc

SEQ ID NO: 10311 - DNA, 1164 bp, Unknown
  gut microbiota DNA sequence
cagaattccagcggtcgaatggggcatccagttggcaaaataagagatagggaacataatcacgcaagcaattgcgaagtaaatcccgctttgctttgcaagactccacgaatcaatctcccaaataaccgaagccattgcaaagcctgtgcccattattccgctcagaccggtttgaatgagaatcgcatttaattcgctccccattttattcacaagctccggattgaccggatggaagaagccatccccaatgcagattgagataatcaccgtaatgacatatccgattgcaatgccaacagggaaaccaattattcctcgtccaatcagttttttcttcatttctgccacctcacattcctaacagttgtttgattttggcgacggatcgccgtgaaacataagtaaccgtaccgtttgaaagcgtgatgcaaattgtcccgacaaagctcaaatcaaagctcttgacctttctcagattgataatatccgagtttgatattcggacaaaagtcttgctgtcaagccgttgttccgcctcgtatagcctcaggcggagcgcatacccgccgtgatttgtctcggcaaacaccttacctgattcagcaaaaacacggtagatttcagacggttccagaacctcgaccacatcctccctgaatccggcaatgacctgcggttgctcgtctgacagtctttttatgattgcattgacttcatcggtcattttgtccgtcatcacgatgatttttggctctttgcatttttcgtctatcttgatttcaatttgcatcggttcacctcctcgctacggttacagtataggaaaatcaagaaccgatttctaccgattctcgataggtggttgttttaagaacataggtggtattttttacgggaatctcatactggtctgtatgggcggccgataagtatctgcggtatggggatgctcccataccgcagacggatcatctttccggctcgtttttgcgctttgcgcttctctgaaccggaatggagagcagctctcttgtgcgctcgaccagctgcttttcaatggctgtcagccgctgctccggcaaattgagggacggatgacgggtgaacttgaagtccaccattcgccgcagctgcgctttctgctttgcacccattacc

SEQ ID NO: 10312 - DNA, 247 bp, Unknown
  gut microbiota DNA sequence
gtccgcgttgcccgcaacatcctgcacgagcgttttgagcggctcctgcgtgatatagggcgcgagcgtttcaaacgcgccggtcatggcgctgttgaggcgcacggcaaacggcgcgcgcgtgatgtcggcgatcgcaccggagagacgcccaagtgacgtgccgccgtaggggcggctcgaatgcccgccgatgctgtggacggagagctccaaatcggcatagcccttttccatcagctgcacg

SEQ ID NO: 10313 - DNA, 335 bp, Unknown
  gut microbiota DNA sequence
ctccgcactaaggcccagtccaagcccaaagtttctgaatagctgccacacaaggttcagtaagatgaagcctacaccaatcgctacgaatatttcatagagcgtttcagcggctgggaaatagcgtagaaacgtgctcatatcacagcctagcgcaccgagtacggaccctgtgatcagatccagcagattcatgacctgtgtggcaatccactcaacaatactgtctaagattcccatgcggctcctcctgcatctgcttagaagtggcctaactcatcatcgaagctactttcaggcaggtagtatgctgcggtgaggcacatggcaatgcc

SEQ ID NO: 10314 - DNA, 1147 bp, Unknown
  gut microbiota DNA sequence
agcagacccagctcctcgagcgtcgtcatctggaactggcacacgagcgcgccgtcgttgctggccagcggcacgtaggcgtacaccggctgctccgtgatgaccacgcccgccgcgtgcgtggacgcgtggcgcggcatgccctcgatggcgcgggccgtgtcgatgagctggtgcagccggtcgtccccgtcgtacatggcgcgcagcgtctgcgactgctgcagcgcctcgtcgagcgtggtgttgatgccgccggggatggccttggccacggcgtcggtctcggcgtaggtcaggttcatgacccggccgacgtcgcgcacggccgcgcgcgcggccatggtgccgaaggtgacgatctgcgccacgtggtcggcgccgtatttgcggatgacgtagtcgatcacttccccgcgccgctgcacgcagaagtccacgtcgatatccggcatactcacgcgctccgggttgagaaagcgctcaaagtagaggttatactgcacggggtccacgtccgtgatgccgaggcagtaggacacgacgctgccggccgcgctgccgcgccccggcccgacggggatgtgctgagccttggcgtagccgatgaaatcgctcacgatgaggaagtagtccacaaagcccatgcgccggatcatgtccagctcatagtccagccgcttgtgcacctccggccggtcgccgtagcgccgggcgaaaccgcgctcgcacagcttcgtgagataggcgtccgcgtccgtctccccctccggcagcagaaaacgcggcaggtggtagtggccgaacgtgaagtcaaattgacagcggtcagcgatgcgctgcgtgttttccaccgcgtcgggatattcgtcaaagagcgcgcgcatctcggcctcgctcttgaggtaaaattcgtcgttcggaaagcgcagccggtccggactgtcaagcgtctggccggtctggatgcacagcagcacgtcctgattgtaggcgtcctgctttttaatgtagtgcacgtcgttcgtcgccgcgagggggatgcccgtctcgcggtggatgcgcagcagcgccgcgcgcacgcgcgcctcgtcggtcatgtggtggttttgcagctcgaggtagaagttcccctcgccgaacagct

SEQ ID NO: 10315 - DNA, 992 bp, Unknown
  gut microbiota DNA sequence
cccccagagcacagaactcagcgctgttacagcctctttccgtagacggtaatacgtgctggaactaatatctcggatatggggacggagcacttcgatgatctcatcgacattttttagcttctgcggagataaaaatgagtaatacaagatccagtagtagacttctccgcttttgtgacgggtacgaagaagattgacggcgttttcaagcagcgtcagcattttgtagctacgctcaatacacttggcgtgatcttcgatgatggttccacccagatctgccccagccatataaatagagtctaaaaaatcttcaatgctgcaatcgtagtcgatgcggaactgattttttacttgccgaacagaaacttccagactccatgttacatcccggtacttcttgagtagcttccaggtgtcgtgataacgattatcctcctccggacgcttttcatgcatctttcttgccattgtcgcacgctccttccgcttcagcatttgggatgatcgtcatttcaaaccgatacaacggactgccggcgccgcagcagatcgcaagtcccgctgagatagtgcctttctctatttctaccgtgcagtcgtcggataatggatataacatatatttggattttgggcatgaaaggcaggaaatgccttgcgcttcaagggtttgcagcactttccgaacgaaatacagcatgtgagattttgaaacgctgggaagctctgttgaaacgcaaatctgctcatcagaaattgggctggactctggcggaatggtatccggcacagatacgtgaaggttcagacacatagcaacctcctccttgtctatcataacgtctgaaatttggaacatggttgagagataattctttaggtaaattaccgttccgctgcggcctggaaaagtcagcagcgaaagataatcaagatcagccagctttttaagtagccgacccacgctcgagcgggagataccccag

SEQ ID NO: 10316 - DNA, 435 bp, Unknown
  gut microbiota DNA sequence
caacctgaccgacaccgtcaccaagatgggtgctcagggccgtctggttgaggtctatgacgataccatcgtcatgatcgacaccttcctcgccaaggtcacctatgttgctcccgcggcttatgacgctcagggccacctgcgcaccgaggctaccatcaagctcgatgtctatgccaccaagggctataccactgctaccccgctcaccctcaccaacggcgaggatgcgtatccgtatgctgtcggcgattacgttctcctgaacgcctacaccaacgctgctaacaacgctaccgagagcggcgtcatcaagaccggcgctgacaagtacggcgagatcgtttccaaggccacttccattgacggcgctcagagcgtgatctactacaacgccaagcagcacaacgtcgagggcactgtctatgacgatgc

SEQ ID NO: 10317 - DNA, 1093 bp, Unknown
  gut microbiota DNA sequence
cacaccgtaggcctcggccacggcgcagcagtgccggccgagcggcacgcggcacagctcgtttttcacatcggatgcaaaggacatggcgcgcctccgtcaggtcgtcttgggaaagtcccggttgcgcaggcggacgttggcgtcgcgcgcggcgaggtaatccgtcagcgccttggccacggccacgctgcggtgctgcccgccggtgcagccgatgccgatggtcagcgcgtagcgcccctcggcggcgtactgcggcaggagaaagtcgaccatgtcggtgagcttcgtgagaaaatttttcgccacgtcgctgcgcaggacgtattcctgcacctcggcgtccatgccgctcagggggcggagcttttcgacataaaacgggttcggcagaaagcgcacgtcgaacacgagatcggcgtcgatcgggatgccgtacttgaagccgaaggccacgacgttgatgagaatgtcgcgccgggtgcccccgtcggcaaaatactcgcagatgcgcttttgcagcatggcgagcgtgaggcccgtggtgttgatgacataatccgcgcgctcgcgcacgggggcgagcagctcgctctcgcggcgcacggcctcgggcagggagcagccgctctcggcctgcagcgggtgcggccggcgcgactccttgtagcggcgcacgatggcgctctccgacgcctcgacgaacaaaatgcggtagtccacgcccatgttcgcgagctccccgagcgcggcaaaaagctcggaaaagctctcctggctgcggatgtccgtcacgagcgcgaccttttcatacctgccgcgcgtggcaaggcacagctcggcaaacttcgtcagcagcgccgtgggcaggttgtccacgcagtaaaagtccagatcctccagcacgtcggccgcgcggctcttgccgccgccggacaggcccgatacgatcagaaattccatcccgtcacccccggatgatcttcacttccggctcaagctccacgccggacgtgcgcagcacctcgctgcggatgtggtccatgagccgcagcacatcgtcaaacgtggccccgccgcggttgacgac

SEQ ID NO: 10318 - DNA, 1063 bp, Unknown
  gut microbiota DNA sequence
gtcagcatggacagcagcatggagagagtctgatgcacttcctgaacagaagccgcgtcagactgctcggcctccgtaggcgccgttttctccggaaccgtatagtccggtgaaaaaccatttaccgccaaagcgtcgcagatctcccgataagcgtctgaattgctgacgccatatacctttgcgtaaagggacagcattccgccgccttcaccgcagtagttacagcgccacaggtctttttccgtgttcaaattcattttcccccggcggtcaccgcagataggacaatccacatacacctgaccgggagccctccgcctgatattcaggcggaggagcccggccacatccataatgccaaaggggagatcatgctttttcccgtaattcaaaccagcatccctcccaagacgcgaaatttacgaatggaaagcggtcagcttgcctttaactgctgcgaaccgcccatcagaagcatggcggcagccttcataatattgctgcaatcctcacagagataggcgtaatatttcaggctggagggacgctgctcagaaacctgtgccatcgtccagcccttattgacgccggtggttacgaccagctccgcggcttccccttctgtcatcagcgaaaggatctcgtccaccgtcatatcgtccgaatatttcggcgcagccgctgtcgatgccgctgccggcatatcgaccacaataggtttcaccgtctgcgctgtttcagcccgctccgtgacagcaggctccgctgtttccgaaggaacctcctgcgccttttggggcataaccggatcaggctcagaagccgcagttccgccgcttaacgcctgcagcagactcatggcgtctgaaacgctttccgcctgctgggtggggactgccacctgctgatttgcgctgggcgtctttgccgcctcctgcggttgagcctcttgcggtgtaggtactgcctgcaccggatgattttcactaacagacgtttctcgctgcggcgctgtggttctatttaccgccagagcagtctcctgacgatttacagtgcc

SEQ ID NO: 10319 - DNA, 423 bp, Unknown
  gut microbiota DNA sequence
atgaagccggcagagttctgggtgcgcgaggacgtgtactacacctacgcctgcaaaaactgcgagcaggagaccggtgaagccaacattgtaaaggcagtgaaagaaccctcactgctgcctggcagctttgcctctgcggaggcggtggcttatctggcaacgcaaaaattcgtcatgtactcgccgctgtaccgtctggagcaggagtttaaccgccagggcttgaggctatcccggcagacgatggccaactggctgctgaacatctcagagaaatggctgcggccggtctacgatgtgctgcgcgagcagctttgcagggagtcagtgctgcacgcggacgagacgaccttgcaggtgctgaaagaaccgggacgttcctccaccagcaagtcctacatgtggctgtaccgcaccagc

SEQ ID NO: 10320 - DNA, 839 bp, Unknown
  gut microbiota DNA sequence
cgtgcagattctctcacctctccgtaagcgaggtgcggttgcggcaaatgcgttgaatgagaccattcgagaccttgtcaacccgccaaacaacctgaagaaagaggttaagtgtggcagtcgagtatttcgtgttggtgaccgcattatgcagacggcaaatcgaatcaatgtgtcaaatggcgatgtcggcgtcataaccgacatgaagaaagaggatgatgagacgatcacatgcgtgaggcttttggatggaaggacactacagtacacgcaggaaatgctggaggatttggagttctcctactgtacgaccattcataagagccaagggcaagagtatcctgtcatcattgttcctcttttgaaagagcactatatcatgctgcggcggaatttgctctatactgctgtgaccagagccaaggcgaaggtcatcctgattgggcaaaagcaggcagtctttgttgcgatccataaatgtgatgtgggtcaaagaaatacggtgctcgcggatcgaatcgtggcttattataaccgcgagctgagtcggcgagtagcgtgattatttgggaaacggggtggtcaaaagctgcctcgtttctacatttattgtgaaaggacaattaccatgagtgaatcgaactctaatgtgatccctgccatcaacgctgtcgatggttttaaccccgctgatttcgtgcgtactaccgtgggtgaggaaggcgaaaacgatctctaccttgatgtcaaatatcgccttctttggttccgcctgcaccatccgaatggaaagatcgccccggagcttatccgagttgatgagaagaatgcaatcg

SEQ ID NO: 10321 - DNA, 247 bp, Unknown
  gut microbiota DNA sequence
cgtgcagctgatggaaaagggctatgccgatttggagctctccgtccacagcatcggcgggcattcgagccgcccctacggcggcacgtcacttgggcgtctctccggtgcgattgccgacatcacgcgcgcaccgtttgccgtgcgcctcaacagcgccatgaccggcgcgtttgaaacgctcgcgccctatatcacgcaggagccgctcaaaacgctcgtgcaggatgttgcgggcaacgcggac

SEQ ID NO: 10322 - DNA, 712 bp, Unknown
  gut microbiota DNA sequence
ctccggcgcacggtctgaaacatggctcgcctcgcctgtgaccatattgacggaaatggctccgtcgcgggtcatcttctgcgcctccttctcggaggctttccattccttcattcttcaccacctgcctttccgtaggggcaaatgctcccacactcgcccgtctcgatcatggagatatacttgaaaatgggatatgcctgaggcgggcagaccgcgttgcccagggttttcagtcggagggcgcggtccgcggtgttttcggtgatgcgggggacgccctccggctcggcggcccagaggatacgtccgtccatttccgggggaagcccatgagccattccacccaatccgggttcagcgccgccgtctcggataccggccgctcctgccggatcacctgggatgacaggttggcagacggggcactgttccgaaacgccgttggtttcagcgtggagcggtagccctccgacgctgccggggtcagataaaacaccgccgccgacaggctcaggctccaaatcgccccgttccggttcaccttgcggaagatcccgttgtcggagaggtacacatccaggttggccgcgtcccggcaggtgttcttgtcggaggcaaggggtgtgggaaacatcagccgcgacgataaaagttcgctggcgctcatgccatgcgccgacgccgcaagccggaaatacgaatgggagaa

SEQ ID NO: 10323 - DNA, 366 bp, Unknown
  gut microbiota DNA sequence
tactgtctaagattcccatgcggctcctcctgcatctgcttagaagtggcctaactcatcatcgaagctactttcaggcaggtagtatgctgcggtgaggcacatggcaatgccagcgacaataccggataagaaacagataatattcttcatgtcttgattctccttcgtaattagggagtccaagtgccaccggaaaagaatggtgtcacataggccatgataaagccaaggctattgagaatggcccaagtaataatgatccgctttaaccatgcacgggactcatcaaccgttcgtccagatctggagaagttcatcagaagaagcgcaatagccgcagtaacaacagctgcgatggtgctg

SEQ ID NO: 10324 - DNA, 1103 bp, Unknown
  gut microbiota DNA sequence
aagatcagccagtcctccctgggattcttcacggcgtttttatctttgtaggactgcttgtgagaacggaaattcaccgtatgccccatatactccggcttggacaaaatctgcccgacgatgtagccgctccagttatacggattggggaactcctccttgcttttccagacgcctttgttctgcttgccgaagtagaccgcaggcgtatcgatcttatcgtcaaacaggatacgggcaatatcataagggcctttgccctcgatggtcagttgaaagatgcggcgcaccacggcagccgcttcctcgtcaatcagccagtggtatttattctctgggtctttcttatagccatagatggcgcagttggtggtgggcttgccggattcccctttgacgcgaatggccgttttctgcttgcggctcaggtcgcgcagataccactcgttcatgatattgaggaagggcgcaaattcgttgctgttctggtcgtcgctgtccacgccgttggcgatagccacaaagtggacactgtgctgccggaagaacacctccgtgtaaaaaccggtttgcagatagtcacgaccggccctgctcatgtccttgacaatgacatgggccaccttcccagcctcaatgtccgccaccagctgcttccatgcaggccgttcaaaattgccgccgctccagccgtcatcggtatagtggcggcagttggtgtagcctctctgctgggcatagctttcgaggtattttttctgattcacgatggagttgctgtcgccaacattgtcatcgtcacggctcagccgctcatacagagcggtgattttttcctcagtctgtttcatgcgcattcggcgctcctttcagactgacggctcatttgtggtgcttccattatatcataagtgccatcatttgtaaccccttcattgcggatcatccgcagaatcttttcctccatggtctccgctgctgtctcgctgaatgcgacccttaccttgtaggtggtgccgccgatgcgccggatgataaactgctctcgtttgttctgctccataggcatcctccttgcgtgattggttggtttttgatataat

SEQ ID NO: 10325 - DNA, 898 bp, Unknown
  gut microbiota DNA sequence
cttttgtgtccaggtaatcggtgccatttcaaaaccagcagccgcccccatctcaatatatcggtcgcgtgctttccgaacttcctctttgacctgataatccgaatcaaccatgacgttgatcctcttcacgccaatggagtctagttcttcaagggctcgttcgtactgagaatagctcggtatgcctgtaaggcccacaaaaccacactcataaggtgaaccctgcgcaaagctgtaggcaaggtcggatttcataactccctctgtaaggcaaaccacttcatcgccttcatgaacaccgacataatgcgggcagcacttcgactgtgttccgtagtactggtcaacactcgtcaggttatagaatttctggttgtagaccttatcaagccgaacctgaatggcttcaatttggccgagcaggtttcggtcgggtagcatgattcctgagcctcggatatccaatacccattggccagagtccttctgacagtaaaatccgggaaccccatcaagaatgcagccacgctccaacagctctgtaacaatccgtttcaaacgtgttgtgggtgtcgttcgatagcatagccgctccatctcctctgattttagcccgcgctctttcaaagcggattgatgtgttgggcatagagtcaataatgagagaagattggaataagtattatcccgcacctcagctgaggcaattgggagttctaccgtttctatggggcgagacttccgattatatttgtgtactggttcactcccatctggcccgaatatcttgcagagttcttcgtaagccgtatggagattgacatcacagtactctgcataaagatggaggatgcctccacctttaccacagcgattacaccgaaacacattatcg

SEQ ID NO: 10326 - DNA, 8016 bp, Unknown
  gut microbiota DNA sequence
ctccgcactaaggcccagtccaagcccaaagtttctgaatagctgccacacaaggttcagtaagatgaagcctacaccaatcgctacgaatatttcatagagcgtttcagcggccgggaaatagcgtagaaacgtgctcatatcgcagcctagcgcaccgagtacggaccctgtgatcagatccagcagattcatgacctgtgtggcaatccactcaacaatactgtctaagattcccatgcggctcctcctgcatctgcttagaagtggcctaactcatcatcgaagctactttcaggcaggtagtatgctgcggtgaggcacatggcaatgccagcgacaataccggataagaaacagataatattcttcatgtcttgattctccttcgtaattagggagtccaagtgccaccggaaaagaatggtgtcacataggccatgataaagccaaggctattgagaatggcccaggtaataatgatccgctttaaccatgcacgggactcatcaaccgttcgtccagatctggagaagttcatcagaagaagcgcaatagccgcagtaacaacagctgcgatggtgctgatgccgaggatttgagtgtacacatcctgcatgattgcactcgccttcgtccaaatggtgtcagcagcaaaggcgtgtgtggaaaacatggtcagcatcgtaggcacgagaaaggcagtatataggcctcggcctgcatttacatttctgaatcgctcctgcagcttcttgatgacggcaggtttgtttagattcatattgggaagtcctcctttcaaatagagccgaaaagaaaagctgggaactcgggcagtacgacctgagttcctggcttcacatgaaaaaatgcctcccgatgaaaggaggcagtccatcaatgaatcttttcgacgctatcatcttaccatttaggggatacagatgcaattaagcagaacttcaagtttcgttcggaaatagttcaatagtgcttcaaggtaaaaactgcttgataatctccatgcaatcacgcgccgtgtaaccccacagaatgcggtcaatcgctcgaattgccatgttgagatagctatgataggttaccatcgacatggggaatccttgccgatcaagttccgctaggatcacctcacgattcgcgggcttcttttttgagaagtatgtgaggtagaggacttgatacatcagctcaccgtggtctggatccattcgcaccgtattaagcgcgttatcaatgatctggagcatgttcttgctccgaataactgttctggcgtacccctccagtttagaaccggacaaatccacgccagccaattcggcattgacttcaagtgtggaaaggcgggtgccatgctccatttccattcgaacattcatatctgcttccgagattttgatcgcatatgctactttccggtactgcttgagcagatgccttgtgttatgatacttatccgcatccttgcgttttgcggtcttcgcctctaaatgatcaacaccggcttggatgccggtttcgatctctgttttcaaagcttctttttctatctcaaacgcgggagtgctatctgatgtcatcgtttcatctcctttccggattgggactcagtcggtggatcgcggctattcttctcctgattcgttacctcccagtctaaagcactgtagaagactaatggaatttggcgagcaaaaaaagaactacggatcaccagaaacacttgaattctcaaggcttttcgtggcttccctatagtgtgagcgggcgggacgcgagactcgacgctgatatcgagtttggtgtcgtctgcttccaccacatcaatcgccttagcaataccaatgatctcgccaatcctgcttagctcgagttcctcacagccttcaccgtagatcatctctcgatagcggcacattgaaatgacagagccgcgtgagctggaaaaactcacacggctgataattccatattcgccggccttcaacatgaagcgtccgactcgggacttggaccagccccaacgacgagcaaggtaagtatatgagagcagcggcatacctcgcatattggagtaatagacaactggcatatactcagatcctcgcacttgggggtcattcaggattgtgtggagccacatatccatgatggcgtccaattcactgaatacaattccgacttcctttcgtgctgtcttcaaaagcagtctgccgacaggcagcgggaagaaaaagaatcccgatcctttatagctgtaatagttatactgtaggtgtgtgcagtgctctttccaatcggcaatcgtgaagcggagtatttccttttcctcatccaagatctcaaaggtaaggaatccatgattccggaagtactccatcagctcaagcgcctgagccttggagtggactcgaaggattctgggcaatgccccgagcttgcagatccactgacccggtgcctccatatatcggtcgccatagatcacgcgttcattggatcgaaaattagcgtagctgaagagcgccatgagactgaatagatggacagttccttcgttccggaaatccttgtgatcattgaagtgtcggaaccacggcttataaactcttaccttcggaaagcacaccaactgttgtttttgtgtgcagttcatctcatacacctccttcctgacagagctataaatagagtcgattccaagtcccctggtcagggggacacaggcatttcagcctcggcccatgcttgtgggtgcgtcgtccctcggtttgagacctagccggacgagtgtaccattattttcccgtgctgtcgtcgcaatggagcttgaccaggcccctttcacttgctcatagtggctcgaacacggtgatgtcttggaatcgtattcggttttcaaggtacagtgctgtggtaacaggttgagagtctgcggtcggcaagtcataaaacacctcgaatgcacctctcgtaatgaatgtagaaatggcacccattttgaccacccttcaaaaaagaaaaatttccccatcgactaaaataagctgatgaggtattatgaaaatgcattgaaaacaaaaaagcacgcacccaccatttaaggtgaatgcgtgcaaatgataagtcgggaggaagctttgattttggactaaatcagcatactcactctatagaaccgactgtatgtctattataggtcaatcctcgctcttaaagtcgatggcgggggagacaacggagttggcaaagcccgtgatcggcacgagcgtgccggccccggcaaagcgcgcgatggaattgtaaaggtttaagcctgttaaaagtgcggagaggaagatgaggcagatcgaggtcgccgtgcctgcgtccgcctttgcaaggccgagcgagagaaagccgttctggatgagctggccgagcgcgcagatcgcgccgccgatgaaaaaggcaaaggcggtatccttgaaaatgggcgatttgggcgcaaggcgcttgacatactcctgatattcctgaggtgtcatatccatgaagaatcactccttttgtcgtagtgtttgcgggaaatggacgaaatatccgcgcgataccgtcttgcgcgcggcgaggtttgtgttacaatgggcgaggacatttttgcaaaggagttgacgcgatgcgaccgctgggactgtatctccacattccgttctgcaaggcgaagtgcatttactgcgacttctactcgcttcctcattcggaggagaagatggacgcctacaccgcggctttgcagcgcgatctgatccgctgggcggatcaggcgaaaggccataccgttgacacgatctactttggcggcggcacgccgagctatctcggcgcagaccggctctgccgcattttagagacggtctttgcccattaccgcgtggacaaaaacgctgagatcacgaccgaggcgaatcccgatagcgcacgggaggtatcagcactgcggcagctcagagaagcgggcttcaaccgcatttcactcgggatgcagtcggcgagcgacgacgagctgcgcctgatcgggcgcgtccacacgcataaagagacggtcgaggccgtacatgccgcccgcgcggcgggcttcgacaatgtgagcctcgatctcatctacggcctacccgagcagacaatggcgcactggcgggaaaacctgcaagcggcgatcgctttacggcctgagcacctttcctgctatgggctcaagatcgaggagggcacgccgctcgaccgcaaaaaaaacgccctgcgcatccccgacgacgatgaacaggcggaggagtaccttgcaacggtcgagctgctcgaaaaggagggctacgcgcagtatgaaatttcgaacttcgcgcgtcccgggcgcgagtcgcgccacaacctcaaatactggacgatgcaggagtatctgggcttcggtcctggcgcgcattcggacttcggcgggcggcgcttcgcctacgcgcgcgacttgaatgcttacatcaagggtgaggagcacctttccgaaagcgcatgccccgcggaacgcgagcgcgaagaagaacgcgtcatgcttgccctgcgcaccgcgcgggggctcgacctgtcggcgctcaaggaggacacgcgggacgccgaggcagtgctcgaagagtgcgcgcaccacggcctttcccaaaagggaaacggccgctggcggctgacgccgcagggctttctagtgtcaaacgccgtcatcgtgcgggtgctcgaggcgctttccctctaaattttgcgaaaaaagtggaaactttttccgcgttttcgcgtctttacttatggcagggtatctgctatactgtgttatgtttaccaattcaaggcattttcagcaaggaggcaaatcgtgaaatccattatccgtaagtttttgtcgctgtcgctggcagtcgtgctggcggcggctccgctcaacgccttcgcgtctgacgcgctcggcgacgatctgacgagctcaaatgttgaggtcaatgagcgcaccgagctcaacgccggtacgttctggagcaatacctactccgaccttcgtcaggagaattatgtggtctactcgcccaacgcacgcgtgaagcccattgtgagtagcggcagctacagcacgcagctctcgaccgtctcggcagcagcgcgcacgctggaggccgacggctaccgcgtggtcgcgggcatcaacggcgattattacgacaccgccaacggcatcgcgctcggcagcgtgatgagcgagggcgttttccgcaacatctccggcagctattatgccctcggcttctacgacgacggcacggcggtgatgggcaagcccaacctgcgcatcaacgccgagaccgaccgcggcagcacgttcgggatcacggccatgaactatgtccgccagacgtcgttcggtatcttcctgtatgacgacagcttcaatgcccgcggcacgatcggcacgagcgagccgggccttgatgttatctgttcggtggatcgcggtgagctgggcatcggcgaggagctgacacttcgggtcgaaaacattgtcgaaggcggcgtggacaccgccgtcggcaaggggcagtatgtgctgtcggtcaacctcaagtccagcgagagctatttggcctccatgcgtgcgcttcaggtcggcgaccgcatcacggtctccgtcagcgcgagcggcagcgagtggaacggcgtaacgaacatgatcggcgcgctctatcagctggtcgaaaacggtcaggtctgcgcgggccttgtcaacggcagcgcgccgcgcacggctgtgggcctcaagcgcgacggctctcttgtgatgtacaccatcgacggccgccagagcggctattccatcggcgcgacgctgacgcaggtcgccgagcgcatggtcgagctcggctgcgtgacggcgctgagcctggacggcggcggctcgaccgcgctcgtcgcgacgcagcccgacagcacgacggcttcgcttgtgaacaagccctccggcggcagcgagcgcgcggtgacgaaccacctcttcttagtggcggacagccgcccgacgaactccgtgggccatgtgtatcttgaaagcgagagcacgcgcgtgctcccgaacgcgcaggtgaagctcaccgcgacggcgctcgacacgaactatatccccatggcaaattccaatgtctccctgcgcgcggataagggcaccattgacggcaatgtcctgaccgcgcccgcctccggcaccgtgacggtgacggcgaacgcgggcggcgcgagcgcgcagacgaagatcgatgtcatcacgcagcccgacagcatcagcgtccggcagaacggcaaggccgtgagtgctatcacgctcagcgcgggcgagacggcgacgctgaccgcctcggcgatgtaccgccatttgccggtgctcggcgacaacaagggctttacctggaccgtgcagggcaatgtcggcacgatcgaaaacggcgtgttcacggcgtccggcagcatcggcagcggcagcgtgacggcgagcctcggccgcatttccgtgacggtccctgtgacggtgacggcgcgcgccctgcgcacgctcgacggctttgagacctcgtttgcgaccgcgaccggcacgcgtgcgatgctctcctacaacagtgagatgacccgcgtgcacaacggctacgcctccgcacggcttgactatgcgaccggcagcgagggcaacgcctacatcggcctcaactatgccattccttcaaattacgaccagctcaacttctgggtctacggcgacaatagcggagcgcagctcgcgctggtgacggatactggcagcgtgaacctgggagttctcaacttctccggctggaagctcctgacggcgaacctcggcgcggcgaccgcgatcacgggcatgatcgtctcttcggacacggagcttatcagcgccgtgtaccttgaccagctcgtactctcctacggcggcctgaccgatacgaccgcgccgaagctctcgctccagtacaatgcggcgagcaacactgtgaccggcacggtgaaagatgacatcgacggcgcggccatcccgaccattcgcgtgacctacgacggcaagagctatacgtcctacacctatgaccagtccagcggcgcgctgagcattacgcttcccgcggcggacggcgcacagcaccgcgtgaatgtggtcgcgggcgacgcgagcggcaacctgagccgcgcgggcgtgaacgccggtacgtcgagcgcgacgccggcctttgccgatatgcaggaccactgggcgaacgatgcggtggcgtacctcaagcgcagcggcatttcgaacggctcgaacggtaacttcctgccggatacgaacatcagccgtcaggaatttgccgtgctgctcgcgcgttacttaggttcttcgcaggattattcctccgtgcagctcccgtttgccgatacgaatgagatcgcatcctgggcgctgaacggcgcgaaggtgatgtactcgctcggcatcatcaagggcagttccgacggctcgggcaagctctacttcaaccccacggccaacgtgagccgccaggaggcggtgacgatgctcggtcgcctgaccgaaaagggctacgcccagggcgcgctcaagttcaccgacagcagcgcgatccagtcgtgggcggcggagtatgtgagcacgctcagcgagatgggcatcctcacgggctttgacgacggctgcttccgcccgggcggcgcgatgacgagggcacaggtggcgacagtcttatataaattctaaaatgaaagggaacggcaaagccgttccctttcattttagagggggattgcaggccgctgtgcgcataattcgcccgccgtcggcgggcgaattccacacttgcagcctgagaagagtcatttccaacgcgcatgtcgttggaaatgacgatcaaaattatttcg

SEQ ID NO: 10327 - DNA, 2833 bp, Unknown
  gut microbiota DNA sequence
ttctcggacttctccgaaatcactgaaacagcggacaagctccgctggcttcgataccagaaaggcttgcggcagagagacgtagctgactacgccggtatataccgaagtacttatattcattatgaagaatatggaaaggacttttactctccgaagcacatggagaaaatcgcgcagcttttcgaggttccagtcgaaagacttctggatgactacaatctctttctgagaaacggccagggtaagcagatcaaggcaattcgaatgaaacttggcctaacgcaaagagagtatgctgataggctaggcatcagcctttgcaacctcaaacaatgggagcagaacagaaaacaacttttcaaatccacttgggagaagtacttcaaatagagggtaaatgctcttaactgcgatgagaatgtactgcgtgactgtcgtatacagaataaccgagcagactggtcttgataatcagtctgctcggttttctatcaggtcagcgttcatgagaaccctgtggatttattatgcttgttctttcaaatgcttcactactgcatctaccagctctaacttttgctccgtggaacagggcaacttcaagatgttcttcagtgcctgctctgcatgaaattttgcaagttcatgggcaagttccttttgtgcttgctctgacttgggatagattagaaatacttccattgttgccctcctttccagagcgtttgatgcttaactctatgtgcgttttccattgcatatgccgtgtctgaatattcccagacttcgaattcagcatgtagacctccttctacataaactaaagagctcttcagaataaatgtagaaaaagagggccttttgaccaccctaacgggataaaaatcttccaacgattgactatgcaggaagataggaagaaaaagaaacagccctgctgcagtttactctgcaacagggctgctctcttttaataatctctgcgtctttgcaatgactgaccaaatatccttttcaaattggatactcccatgaaataacggagccaaaaagaaaagggcctcctttatgttcctcaaatccacataatcggttcggttgtcttggaggtgttgatgcgtttcataatatcgaacccgcacactttcagatacggaatctgcaacaaagtaggtggcgataaggccgtcaataagtgctacctcatccatcgtaaagaacatataatttctcccatcgtgaacaataccagcatatagtaccacacagcgctctcaagtacaagataattcctgttctgcaaagcagccatggagcgtttcatattctgccagcagctccgatccagcggcacgatgaatgcagccgtccacaccgccgccacccagcagcgactcgttggcagcgttgacgatagcatccaccttcatttttgtgatgtcatttctgacgatttgaagcggcataatcaagccatcccattcggttacttcgcgccggtcagcagcttgtccagcgggattcgttccgggtattttccttcggtcagaatgtcgtataaatacctgttatccagaatcatatcgtcccggataagctgccagtttgcctttttcctgaaaaacaccttgaagatcagaaagttcatgatcgccccaattaccggcgtggtcatgccgaaagcctcggtgtgagagaaattgcatcctgtttccgttctttttccttcaaaggtgatgaacgccgtcttcttgtcgctccggaatacaatgcagaagtggttctcatcctgttcgcattccgtaatcgtgcctgtcacatcgtagtccagccccataacaatctcgcggaagcggaccttacttccagcatgatagttcccgttatagagattgcattcgatgtggtagggactccatttcacaaactcttcctcaaagttagcagtccatgcctttaatttttcataggaagccggaatctctatctgctcggtaagtacaaccatttttctatttctcctgtcaaagctgtcaccccaaaatgatttttctaagtctttctaaatcgtcctcatccggatgggaaagcgcacggtcaaagttatcgatcaacgcatcaatatttgccggattctccggctgtgccttcattttcatatagcgatcccgtacagactgcggcattttcccctgacacatatattctccgaccacagtattgcttgggtcaacagactgcttgatgtgatcaagaatcttctggaaatatgccgcactgccgccgaagcccgccgtcccgaacagaaaaatctttttgcctctcagctttgacagcagttgcaagacagcactgtccgcattgcccttatccgtccaaaagccgacatagagcatttcggagtgcaattccgccgtttccggcgcaccgaaataatcacagtcttctgacggaagcactgcgcggattgtgtcggcgagttttttcgtgttgccggtcaagctgctgaatataatcgaatatcttcccttatccatagcaaaagcctcctgccttatcaaagcggcatcggtgtccgggcaatcagtatgaccgcaagaattgcgcccacaaatgccgcagcccctataaccgccaacacctttttgccgagtttcttcttcactgccttgcagatcagcgcggcgcaagccatgcagacagccgcagcaacaagtgcaatgcccaacatttcccataaccaagatagttcatataggattttcatgcgatcaacatctcctgttcgttaaattggaagttagcgatttctttttccggtattctctgt

SEQ ID NO: 10328 - DNA, 115 bp, Unknown
  gut microbiota DNA sequence
agagtgcaattccgccgtttccggcgcaccgaaataatcacagtcttctgacggaagcactgcgcggattgtgtcggcgagttttttcgtgttgccggtcaagctgctgaatata

SEQ ID NO: 10329 - DNA, 363 bp, Unknown
  gut microbiota DNA sequence
cgggctacctcgaaaaccttccggcatcgggtgaatatccgatagcatgagtaggtcacattggtagttcaaaagaacaggcctgtcgagcgaggtctcgattgcgtcatattcacgggtagggattcgtggtgggtggaaaggtgataatgccgcgcgattgatttccattgccagttcatcgtggaggatgagcttcaggagggtgtcaccttccttattattggtaaggaacagacattgagcaaagaacgttgaaacgacgaagtacttgttcccaaatggctttgctccatgacagaggcgctgtgccacactcatggtggatccgatgacgatctggtggattgacgtgataccgaa

SEQ ID NO: 10330 - DNA, 658 bp, Unknown
  gut microbiota DNA sequence
aggtcggctttaacaagtatcatttggcataagagaaactgctaaactgaaatcaatctccactcacttctctttgttagtctctgataccacgctggtatcagagacatttttgttttttcaaatccgtgggtggtcaaaagggtgctattttctacatttattacgagaagtgcaagcgaggtgttttatctcttggcaactgtatcttctcactcaattttcccagtgctgtaccttgaaaattgcatacgattccaagacatcaccgtgtccgagccactatgagcaagtgaaagaggcgtggtcaagcctcgttgcgacgactgcacgggaaaacaatggtacactcgtccggctaggcctcaaaccgagggacgacgcacccacaagcatgggccgaggctgaaatgcctgtgtccccctgaccaggggacttggaatcgatatcttaaacctattactttgctggaaagggggtgtatgagatgaactgcatacaaaagcaacaattagtgagctttccgaaagtcaggatatggaaaccgtggttccgtcactttaataaccacaaggaattccataatgaaggaaccgtccatcttttcagtctcatggcactctttagctatgcgaacttccgctcaaatgagcgtat

SEQ ID NO: 10331 - DNA, 344 bp, Unknown
  gut microbiota DNA sequence
ccccggtccatcaaggcagcggagatcagcgtagaaaacaaaagcatttacgaccatgaccgcagcggcaaggcggcgctggcgtatgaaaatctgacgagggaggtgttgagccttggcaagcaaattaagcggcatcgagctgacccggtacgatgacctgttcaaaacggatgcggagcgtgaggccgaccggcaggagcggattcagatcgttcctgcctcagaagttttcccgtattcccgtcagccgtacaccattgaccgccccacgcctgatctggtgcggcttatggacagtattgaacacatcggcattgcggagcctctgatcgtccgccccc

SEQ ID NO: 10332 - DNA, 972 bp, Unknown
  gut microbiota DNA sequence
cgctgttcacttccggcctgattgtatccgaggggctccagggcttcaaaacggactacatctgctggaacaacaagtactatacgctgacagagcagcgcatcgcctatctccgcgataagacggaggatgagcgtttctatgtcctcaccctctttgccatcgccaaggagctggagcgccgcaaggtgtccgagacactcgatcccattgacattaccctgcttgtgggtctgcctcccgcacactatgagcagctgcacagccgtttcgagcagtacttcctgcgtcggcgcgagatcgtggattttgagtataacggcaagtactactcgattcgggtcagcaaggtactcagctatccccaggcgtttgcggctgccgttacccagttcggcacgctgaaagctcattccgtcgcctatatcattgacattggcggctttaccatcgatgtcctgaagctgcgcagcggccatccggatctggcagtggtagagagcttcgagaagggtgtcattaccctctacaacggtatcgcaagcaagtgtaatgcgctctatgcccggatcctggaagactgcgatatcgacgaggtcattcgaaaccaacccactgtccttcccggcgaggtacagcagttgatccgtaccatgaccagcgacttcctcacggagttctacaacttcctgcgtgagcgaggcgttgatgtctccaccagtaaatgcgtctttgctggtggcggttccttgctcctgcgtggaatgatcgaacgcggtaacaaagtagctttccccattttcatcgaggatattcatgccaatgctcgtggctatgagctcctctaccagagtgaggtggcggcaaatgggcagcaataaaaaggcccgtgtggtccttcagttcaatgagatggactttcggcaccggcgtgctctggagatccttcgccagcgaccacgcagtatgtct

SEQ ID NO: 10333 - DNA, 575 bp, Unknown
  gut microbiota DNA sequence
attttttctaccgccactaacattaaatcttgctgatatggtgtcattttcaggatggtttcttttagcttcttgcgtataaggtcactttcattttttctcatgttttctttcctcccaaaaatctaatatacgggatttgaaaggaaacacaaaacagccaagaatgaagaatagtaaggctgccgctccgctttcaagtgttccgcagattagatatacaacgaaaagaatgatcgcatttgttgcggtaacacaaaagacggttgcagcaaattctaagacgtctttcaggtatgctttcatgcaatcacctctaagtcgttcataagctctttgatgtacgcaccggacagatcagcgacaaaggaaaagcgcgtgccgcgctgacggtacgtagccccgcagcacgggcagacaagcaccatggccgcgctcatcagcggcgtcgtgcagcgggcgaagtataggatcttcatactgatgcctccttgcttgcggttacgtcgtccagaagtttaatggccgcgattgcgtctgcgtcctccatatccgagattttgtccatagcatct

SEQ ID NO: 10334 - DNA, 978 bp, Unknown
  gut microbiota DNA sequence
tggctggaatgcggatcatacgcatatggtaattagtgaggtgggtgcagaaacggaagaatgtgttcgacgaacgacagaggaattgagctttccaattatgattgatataaaatcattcaagctgtaaccccaattatgtgcgacaaacatgaaaaggaggagacgcatctgatgcgtctcctccttcttgtagtggcatggcactaccaactcgtctatttacttgccgaacgctctccacaggaacgtgacgatctgcgcgcgggtgcagtcattgcccggtgcaaaggctgtctcgttcacgcccgtggtcacaccgttcatgtagcaccacgccaccgattcatacgcccattcgggcacatcggtgaacggcaggtggaacatccacgcgcccgtgaagcccttgccctgcgcctgagcgcagcggtagatcatggccgcagcctgcgcgcgggtgcagacgctgtctgtgccgaaggtcgtctccgtcaggccagtgacgatgccggtactcgccgcccaacggaccgcctcggcataatatgcgccctcgtccacatccgtgaacggcatcaggtaattcaccacgggggagccagccgcgcgccagaggaaggtcacgatctgggcgcgggtgcagggctggtttggtgcaaagaggctgttaccaacgccgccagtgatgccgttctccgccgcccacttgacggcctcgtagtagtaggcgtcgttgggtacgtcatagaagaagttgagaacgctgttgtcctccatgaaggtcaccttgatctccaccttgctcgcaggcatggtgaatgtgtatttcccattgcccttgtcggtgagcttcagttccttaccgtttttgtcggtgacagaaatggtttccagcacatagccgctgtcaggctttaccgtaatcgttacggtgctgcccgcagaggcgttcttcgggctgacagtcacagagcc

SEQ ID NO: 10335 - DNA, 486 bp, Unknown
  gut microbiota DNA sequence
gatctcaacagcccagtcggccacgatatccaggcactccttgtacagggtcttacgataggtctgatcggtggactgacgggcctgcatgatcaggtcatccagctcggcatccttgatccagtaggacttctcgttggagccgcccttactgtgatagatctggaacatatcggggtcgggagtggcctgccacgccatggcgaacatgtccgcgttaccagcgttgatggcgttggtcatctcggagaagttggacatatcggagacgatcaggttgaagcccagctccttcagagcgtcggaggccagggtcagagccatgaaggtggggtggtcgcccgtgccgctgccgccgaccatgacctcagcgtccatgcgggcatccgcgggagccgcggtgatcttgccgtcggtgatggtgtagccggcagcctcgaagtaacccagagcggcctgcttggcagcggtgtacttatcctcggt

SEQ ID NO: 10336 - DNA, 828 bp, Unknown
  gut microbiota DNA sequence
gatgttggggtagcttgccttgatgtgcgcgtgcagcttgtcgaactccgtgtagtccgtccggctgtggtcaaagtagttgatggtcttgcaccggatggcggcggacaggcgcgcggccgcgccctcgccgtccaagtcgggataattgccctccagggcaaaaaaatcggtcacttttttctgtatcatgccattttatcctccagatagcggctgagaaactcacgcgtgcgcggctccctggggttaccgaagacctccttgggcgagccctgctctaagataaccccctgatccatgaagacgacgcggtcgctcacttccttggcaaacgccatctcgtgcgtgacgacgaccatcgtcatgccctgctgggcgagatttttcatgacgtccagcacctcgccgacgatctcggggtcgagcgcggaggtcggttcatcgaagagcatgatctccggttccatgcacagcgcccgcgcgatggcgacgcgctgcttctgcccgccggagaggcggcgggagtcggcgtggatgaagtcggcgaggccaacggtcgttaagtgcttgatggccgtggcctcggcctgcgtcttggggatgtgcttgacgtccatgggagcgagggtgcagttgtcgagcacagacttgttgttgaagaggttaaagccctggaacaccatgccgatcttctggcgaagggcgttcagattgacctttaagtccattaaatcctgcccgtcgaaccagatgtggcccgagtcggcctcttccagtaagttgatgcagcgcagcagtgtcgatttgccagagccggatgcgccg

SEQ ID NO: 10337 - DNA, 1025 bp, Unknown
  gut microbiota DNA sequence
tttggcctccatctgaaagcccttcaagtcctcctgcttgacggaaaagatcgtcagctcctcgccgtcgtggatcaggcgcttgaggttggttttaccggcgagcttctgattgtcgttggcaagggcaatcagaagggcggcaagatttttcgcccccagccctgccagcttgagggcactttcggtgatctggatgccctcacgcaccatcaggtcagcggtttcaccgttggtactcatgctcgtgttcctccttcttctttagattttcctgccgttcagtctgcgcctgctggcactgctgggatacccgcggaatgtctgcctgtatcctgcggcacagacgcagctccccgcgcttttcacgcagggcggcagtctgctgttggatctccgtgctgtacttggcttgtgcttcttcaccgctggtgttcctcctttcttgatatagtggttttctctgttcctccaacaagcgaatgtcccactccagcacacggatgcgatgctccagctctgtggctgtggtgattttgcttgataaaaggtatttgaattgctgctcataccgctccaaatgaatgacctcccgcttgacggaaaagggcagcttgggcgacggctttttccgccttcccccacgcagcagatagaggtagcggagatagagtgcgtgaaagccggtgatcttcttttttcggacggtcgccagcctgcccttcatgcggtaacgcttgacggtattggtgacggtcgacggggccatgccgccgtgccgctggcgggagagccgcaacagaatatccgcttcagtgtagccctcgcccaagctgtctaggcgaatcgcccgctttgcgccggggggcttgaccgtggtgtatttccggttggggctgcgccgcacctcgtagccgtttcgtcgcaggagcatgagaaaggaatcgtaggtgtaggcttgcccaatgatagtgtcaatgtcggtgcggatcacgccgcgcacggtgggcttgccgccctgctcc

SEQ ID NO: 10338 - DNA, 374 bp, Unknown
  gut microbiota DNA sequence
ctcggcatcagcaccatcgcagctgttgttactgcggctattgcgcttcttctgatgaacttctccagatctggacgaacggttgatgagtcccgtgcatggttaaagcggatcgttattacttgggccattctcaatagccttggctttatcatggcctatgtgacaccattcttttctggtggcacttggactccctaattacgaaggagaatcaagacatgaagaatattatctgttttttatccggtattgtcgccggcattgccatgtgcctcaccgcagcatactacctgcctgaaagtagcttcgatgatgagttaggccacttctaagcagatgcaggaggagccgcatgggaatcttagacagta

SEQ ID NO: 10339 - DNA, 778 bp, Unknown
  gut microbiota DNA sequence
atacccatttccgctgcacgacattaagcgggagctctgtgccgttgtggtgccatatcgcatcccaattctgatccgcgagtccgaaatgtgggaactgggagaggaacgacccgacttcgtgcttcgaaatatggtgggggccagcatcgatgtgatcgtcaccaaggtggagcgtaccgctaaccgtgcacaggcgtcccgccgtcaggccagtcgcagccagcgccgcttttttgctgcccgtgaggatcttcatgctgtcggttcccgtattacctgcaggatgctggcggtcggcccccgccgctgccttgtggactgctatggctacgaccttgatatgacgcagagagagatccgctacgcggccatcccggatcttcgcacggagttccacccgggctcggagatcgactgcattgtaaaggagtatcacccccgtaccggcgaactgatcgtctctgccaaggaaacggaggtcaatcccttctttggtgcggaggagcgtcaccctgtaggctcccgccgctttgcgatgatctccggtaaatatggcggcggcgtgttctgcaacctccctgatggcgtgacctgtatgtgcaactactcctatcagcacgaggatgcggacttcatggtgggcgagcacgtcatgctgatggtgcagcgctacgatcaggaaaagctccagatgtacggcaagattatgagcaagtggtgatctttcgtaaacgtcttggatcttgaaagcgacataaatttccttatagtttgc

SEQ ID NO: 10340 - DNA, 1023 bp, Unknown
  gut microbiota DNA sequence
ggaatatgtgctggacgaaagacctatcacgactggggcgtaattcctcgctgacagggctgtatatcaacttcacattcccaaagtacaatgtgcgctatattgccatcaacgaccattttgacaccatcgaccccaacagtaccgacagcgatattgcgggcatcaagaactggttcaacgagtttttcgccaaagacaccagccgcaagatccgtgctgtcaataaggcaaagggcgaacgcggcgttcctctgaccgtcaatgttccattcggctaccgtaaagacccggaggacaagacaaagtgggtcgtggatgaagcggcggcattggtagtcaagcgcattttcaagctgtgcatggaagggcgaggcccgatgcagattgcaaagctcttgcaggaggaaaaggtacttaaccccaccgcctacaagaagcgtgagggcatcaagacacccagcccggaaaccgctgatccgtaccattggaacaccaacacggtcgttcacattctggaacggcgggaatacacgggatgcaccgtcaatttcaagacctacaccaactccatctggaacaagaagcagcgggaaacgcctattgaaaaacaggcggttttctacaacacccacccgtcgatcattgagcaggaggtctttgacaaggtgcaggagattcgccaacagcgtcaccgcaggacaaagacgggcaagagcagcctgttttccggcatggcctattgctctgattgtggcgcaaaaatgcgctactgcaccaccaactactttgaaaagcggcaggatcattttgtatgcgccaactaccgcagcaatacgggaagctgttcggcacactttatccgcgcggttgttctggaggaattggtctggatgcacatgagaactgtaatttcctatgtcagccggtatgaggatcatttccgtgccgtcatggagcagaagctccggctgtccagcgaagccgcgatccgcggacacaagaagcgattagcacaggctg

SEQ ID NO: 10341 - DNA, 2602 bp, Unknown
  gut microbiota DNA sequence
aaacgtattgaagaactacagtcaagtcaaaagtaaaaaaccgcccccggtgttgcagcaccgaggacggttatagggggcagcaaactgacaaagcctactgccctccaatcataacaaatgcaggaggaaaaagcaatgccaagaaaagcaaatacgcgcgccgcgtcgggcgcaggcagcatccggcagcgtcctgacggtcgatgggaagcgcgcgtgaccgtcggcaatgacccgggcacaggaaagccgatccgccgcagcatttacggagacacgcaagccgccgtgcgtaagcagatgacggccattctccgtgaaattgaccgcggtacatatctgacaccacaaaagacgacagtcgcacagtggcttgatgaatggctcgacacctttgccgccaataagatcaagccgacgacataccttcactatcaggcctgtatcaagaattacatcaagccgcagatcggcgctatcgagctgcaagctctgcgcggtgcgcacgtccagaaggtttataacgccatgaccaagaaggggctgagcggaaagaccgtcaagaactgcgctgccgtactgcataaggcgctctcagttgcattgaaacagggaatcattgtaagtaacccctgtgacgccgcagagcaaccgaaggtggtacagcgcgaaatagcgccgctgcgtgatgaggacattccgaagtttcttgaagcgatcgaggacagtccttatcgaaacgcgcttgccgtctgtctacttgccggtcttcgtgagggagaattgctcggtctcccgtggtcacaggtcgactttgaaaaagggcgtatcaccgtcagtcagcagctacagcgtgagaagaaaaagaacggcgcttactacattgccgacaccaccaagagcggcaagccgcgcacgatcgagccgcccccgctctgctttgaatatctccgggatgaaaagcgtcggcaggcgcaaaacaagctcaaaggcggtaagctatggagcaacgacgacaatctcgtttttacggatgaactcggaacgcatctcgccattcatacattttacaagtactttaagaagatcgctgccagtatcggacgcccggacgcgcgtgtgcatgatctgcgccacaccgcagccacggtgatgatcgccagcggcgcggacattaaaagcgtgcaggacttcatgggacacgctaccgcaagtttcacattgaacgtctacgcccacacatcagaacagatgatgaaggacaccgcagcaagaacgcagtcatattatgaaaagctgaaaaaggcataaaagaaagctccaccagtcagccagccggtggagcttctttccgcagtttttaggggtaaaaaatccaattggggtaaacttaggggtaaaggcattttctgaaatgcaagaattgaacttttcttagcaaaacaagacgatataaaagaaaaagcaagggaaaacgcaatgttttctcttgcttttcttggcgcggaagagaggatttgaacctccgcggcgctttttacacgccctactcccttagcaggggagccccttcggcctcttgggtacttccgcaggtcgatggaaaaattcagttggcggagagagtgggattcgaacccacggatgctttcacatcgccggttttcaagaccggtgccttcaaccgctcggccatctctccggataatgagttcacgtctaactctcaaacgcaagaataatgttaccatattgaagtactgtttgtcaacataaaatacgagaattttcatagaatatcctgttgaataaactcagaaattcttgattcggatatccgatctgtttgtagtgtacttccaactatcctgctgaattcaattcaccggatcgtaatgagatatgtgaaccactttaccttatccaatcaaaaagaatagcctgcactatacgatagccgttcttccatcaaagcaaaaagagaagccactctcttgagtggcttctcttcatgttggcgctacctatctttccgggccgtctccagccaagtattgtcggcagaagcgagcttaacttccgtgttcgggatgggaacgggtggaccctcgccctaatcagcaccaactgctgtattgcaactgtcttatacagtaacaaacctttatccaattgtcaagtcgtgccgagtggcacgttcaactgttttgcacagcaaaaccttgccgcagggcgaattcatttcgcccgaggattttttgtcctcaagggttcccgaaaaagcattgcttttttgggatggtgacccgtaccggattcgaaccgatgttaacggcgtgagaggccgctgtcttaaccacttgaccaacgggccatgccttgcgtcgtggggtccccactggatggtgctcccatccagcgggatggtacaccttcagggactcgaaccctggacaccctgattaagagtcaggtgctctaccagctgagctaaaggtgcatgtcttcaaatcgaaccttcaaaaccgaacaatgtaacttcaaagctcctctcaaggccttgcctgcttcattcgtaggtcaagccctcggactatta

SEQ ID NO: 10342 - DNA, 113 bp, Unknown
  gut microbiota DNA sequence
tgagctaaaggtgcatgtcttcaaatcgaaccttcaaaaccgaacaatgtaacttcaaagctcctctcaaggccttgcctgcttcattcgtaggtcaagccctcggactatta

SEQ ID NO: 10343 - DNA, 197 bp, Unknown
  gut microbiota DNA sequence
tctgctcgcactacgtgctcaatcgcaggctaagtgccgctccgcggttgcccgcgatacaacgcctgcgggcgttagtacctcccgagctaaaggtgcatgtcttcaaatcgaaccttcaaaaccgaacaatgtaacttcaaagctcctctcaaggccttgcctgcttcattcgtaggtcaagccctcggactatt

SEQ ID NO: 10344 - DNA, 707 bp, Unknown
  gut microbiota DNA sequence
cgagctaaaggtgcatgtcttcaaatcgaaccttcaaaaccgaacaatgtaacttcaaagctcctctcaaggccttgcctgcttcattcgtaggtcaagccctcggactattagtaccgatcagctgcacacattactgcgcttccaccttcggcctatcaaccagatcgtctttctgggtccttactccttgaaggatgagagatctcatcttagggggagtttcacgcttagatgctttcagcgtttatctcgtccgtacatagctacccagctatgcccttggcaggacaactggtgcaccagaggtacgtccatcccggtcctctcgtactaaggacagctcccttcaaatctcttacgcccgcaacagatagggaccgaactgtctcacgacgttctgaacccagctcgcgtgccgctttaattggcgaacagccaaacccttgggaccgaattcagccccaggatgcgacgagccgacatcgaggtgccaaacctccccgtcgctgtggacgcttgggggagatcagcctgttatccccagggtagcttttatccgttgagcgatggcatttccactcacataccaccggatcactaactccaactttcgttactgctccacccgtcggtgtcgcagttaggctcgtttatgcgtttacactcattgcacgatttccgtccgtgctgaacgaacctttgag

SEQ ID NO: 10345 - DNA, 506 bp, Unknown
  gut microbiota DNA sequence
ctgcccaacgatgtagccgctccagttatacgggttggggaactcctccttgcttttccagacacccttgttctgtttgccaaagtagaccgcaggcgtgtcgatcttgtcatcgaacaggatgcgggcgatgtcgtaggggcctttaccctcaatggtcagctggaagatacgccgcaccgcggcagccgcttcctcgtcgatcagccagtggtatttgttctccgggtctttcttatagccgtagatggcacagttggtggttggcttgccggattcccccttgacccgaatggcggttttctgcttgcggctcaggtcacgaagataccattcgttcatgatgttgaggaagggcgcaaactcgttgctgttctggtcatcactgtccacgccgttggcaatggcaacaaagtggacgccatgctgccggaagaatacctctgtgtaaaagccggtttgcagatagtcacgccccgcccggctcatatccttgacaatgacat

SEQ ID NO: 10346 - DNA, 229 bp, Unknown
  gut microbiota DNA sequence
ctccttcgttgcgccgtcttgccatgcgtcagcatgcccgcaccgtcgcgcctcagctccgcacaaaatttgctctttttcggtgcaaagcagttttgccaatgaatttttgagatgaaatcagctgaaaaaatctccccatactggcgtatggggagattttttcggttgtatttcagccaaaaaggcgcaggcaaaaccgcatgttttcttatgcggagtcggcctt

SEQ ID NO: 10347 - DNA, 981 bp, Unknown
  gut microbiota DNA sequence
tgtgcggtaaacagctctcggcgtgtacaccaccaccccgtccccaaaccgcgcacacagcggctcacacgccgaaacacggcgggttctcagggtcaatggtgacgatgttttcggcagcggaatcatcgacaccatcgacccttttcaggcagatcagacggtcgccgttgctcttgcggaaggacaccgtaatgccgtttctccttagagcgtcaacgcttttacggattcggtgggagaagctgttgggggtcagtccctccgtaccggcagggtcgatcttttccaacagcaccttggcaggggcgctgatctccggctgctggcgcagcagttcagagaggagaaaaagaatccgttcactgggatgctccgtctgttcgcagtcatctgacagcagcttccagacatgatcctcgccatcgaactccagtgccaactcccggtaggggatgtcccgcccggtgcagtagagcgtggctgtgttctctctgcgcttactcttgcggaggacaaagttgctgtcggtggcaccgctgagtccggtggtgccggagatcatgttcatgggatcatcgtcattcatcttccgcaggtgatgcaccagcagaatggcgatgcggtgcttgtccgccagcgctttcagaacgccgatgtcccggtagtcgctggtatagggatttgcgtcattgcctgcggtgcggatgcgctggagcgtgtcgatgacgatgagcctggtctgcggatgctccttcaaaaattgctcgatctgttccaccagcccgttgtggagctgctgggacatgacggcgaagtgcagcgtgggcggcgcgtcctccgtgagatcaaagaggcggctttggatacgctggaagctatcctccagacagagatacagcacctcgcatgggcgcgtggcgaacgtccagagcggcttgccctgcgcggcgcagagacacagccacagcgccagccacg

SEQ ID NO: 10348 - DNA, 1415 bp, Unknown
  gut microbiota DNA sequence
tccgatgcgcaagttccacccgtacgcggtggcggcaaaggcacgcggcgtcaacatctatcacctcaacatcggccagcccgacgtacagactcctcccgcgtttttcgaggcagtccgtcacttcgagcagccggtgctggcctacgcgccctcgcccggtatccccgagctgatcgacgcgatccagaactactacgacaagctcgacatgcacttcgacaagagcgagatctacgtcaccgccggcggcagcgaagcgcttcagatcgcgctgcagtgcattcttgacgacggcgacgaaattttgattcccgagccgttctacccgaactacaacacgatgacccgcacctgcggtgcatcgattcgcccgatcccgacctgcccggaggaggggtatcgctacgctgaccgcgagaagatcgaatctctcatcaacgagcacacgcgcgccatcatggtcacgaatcccggcaacccgaccggcgttgtgctgagccacgaggagatggagatgctcgtcgatgtcgcacagaagcatgatctgttcctcatcggcgacgaggcgtaccgcgaattcgtctacggcggggagaagctccagtcgtttggcgagtttgccgacagggcgggtgacaacatcatcgtcatcgacacggtctccaagcgcttttccgcctgcggcgcgcgtatcggctgcctgatctccaagaacagggaactgatgaaccacgcgatgaagtactgtcaggcgagattgtcggttgcgacgctcgatcaggtcgcctccgccgcgctctacaccgtcggccccgagtattttgccgccgtgcgcgacgagtacaagaagcgccgcgacacgctctgccgcaagctcggcgagatccccggcgtggtgttcgacgtgccgggtggcgcgttctacgtgatggccgcgctgccggtcgacgatgccgacaagttccagcaatggctgctcgaggaattcagcgacaatggcgagaccgtgatgatggccccgggaggctcgatgtacgcgacgcccgggaagggcaaaaacgaagtccgcatggcctacgtcctcgaaagcgacaagctcgagcgcgccatggaaattctcaagaaggccattgaggaatacaatcggattagagcgtgagacaaaagcaaattagaagttaaccattttccatgatgctattgccgaccgaatgaagtcagccggcaatagcggtatggacgcacggatttattgcgaaaaaacaaatccgcctctgtatcacacaggggcggatttgcttattggtcatacggtactcgaaaatcgtccggatatttcttgaacttgctgcccggtgttgtagttgttcatgtgatgaacctttctcttcatttctgctcctacctaaaag

SEQ ID NO: 10349 - DNA, 393 bp, Unknown
  gut microbiota DNA sequence
gaaaagcccgatatgaagatcatcaagcgcgacgccatgagcggcaaaccgattgtcggcacggtattttcggtgaagtctgttaccggcagctattccacctccgtcacgaccgggacggacggttccgcaacgctctcggccattcctgccggtgtctatgttgtgcgtgaggaatccgttcccgagccgtacatcgtaaccaataccgagcagaccgtggcgctgcgccccggcaaaacctccgaggtcactttcgttgactatgaaaagccgggtcttgagatcatcaagaagaacatcgccaacggagagcccatcgagggcgtgacctaccgcatcgagcagatcgacggcaacttctccaccagcgccaccaccgataaccatggc

SEQ ID NO: 10350 - DNA, 6089 bp, Unknown
  gut microbiota DNA sequence
cgctccattgactgttttatgaacacccatctaaacagtggggattttttatatcaatttataccacttggaataagtagaacttgaggtaatccgtctccggcacgttccagaggatggggtggtcacagctctgcgtgcgcgcttcgatctgccgcagctcgacgcccgcgtccgcggcggcggagcgcagcatccgctcaaagcgttcggcgggcatgaagtggctgcacgacgcggtcgcaaggtagccgccgcgcggcagcaggcgcatcgcgcgcaggttgatctccttgtaccccttttcggcgttgttcgccgtacggcgtgatttcgtgaacgccggagggtcgaggatgatgaagtcataaggcttttcgtgcgcggcctcgagctgcgggagcaggtcgaagacgtcggcggcgagaaagtccattttgtcctcaaggccgttgcgcgccgcgttcgcgcgcgccatttcgatggcgctctcggacacgtccaccgccgtcacgtgctctgcgccgcctttggcggcgttgagcgcgaacgagcccgtgtgcgtgaagcagtcgagcacgcgcttgccgtgcgcgaggtgcgcgacggcgaggcgattgaacttctggtcgaggaaaaagcccgtcttctgcccgttttcgacatccacacggtagaaaacgtcgttctcgcaaatttcagtgatggggctctcgggcgtttttttgccggggaggggaaaccaacccttgttctgcgtcaagccctccttttcgcgaagcacgacatcgttgcgctcaaaaaggccgtcgatcgtctcgccgtcctgctccagcacctcgacaatgagggggaagagcatgtccttgatcttttccatgccgagcgagagcgtctgcgtgacgagaagattttcaaaccggtcgaccgtcaggccggggaaggcgtctgcctcgccgaagatcaggcggcagcagccggtctgcccgtccatgaccgccttgcggtagtcccaggcgtagcgtacgcgccgccgccagaaattttcatcaaagcggtcgttcgcgttgcgcgagacgatgcgcacgcggagcttactgagtctgctcaaaaagcccgtgccgagatatttgcccttttccgacaccacgtcgacgagcgcaccgttttcacactcgctctcgtccggctcgcgggcgacgtcggagtcgtacacccaggggtggccgctctcgagccagcgcgtgcccttggcggtgacggtcaggatcggatagtcgcgtgcagctttcatagatcaaaattccttctttaaaacaagttttccccatcataccacggcaaaagccgcggcacaactcatttgttgaggaaaaacagcccgacaaggcacagcgcaaggcccacgagcttgttgaccgtgatggcctcgtggtagacaagatacccaatgaacaccaaaatcgtcgcgatggccgccgcagacgacacctgaaacgcgctgaccggccagcccgccttgtaggcgtgcatgctgccagcttccaaaccgacgaccgcgagaccgagcaggtacggtgcccagttcatctggctgtattcgtgcagaaggttcgccccgccgcggttcgtcacaaaatacaggatgcccgaaaagattgagccgatcagatacgtgaccgtgagcgacgcgagcggatcaacgctctcgggcagcgatttggcgcagatgtgatacacgctgttcgacgccacaacgagaatgagcggccagaagtaatccataaatattccctcctattcaaatgccggatgcaaaacggcagccagacttccgcctgactgccggtaggtgcgcacccgtaatagacaagaaaagtgtatcagcggcgcgcgctcttgtcaaggaaaatcccgccgcggcggcgattccgacaaatttgtaagcgacagttcatacaacctgccgcttgtattttccgctccgccatgctaccataaaaatgtcatatcaatcccagccgcgcttgcggcgcagactttaatggaggcaaattatgagctatcccaagaccggcgaagaagtttacgtcagcctgaatctgtctaacacgatgctcacaggtctcggcaagggcacgatcacccgcgaggacgtttctgtggactacctcaagaaactgtttatgcagcacggcgtcatcgtctcggccaagcccgagtaccgcaacatcatggagcgcgtgaacagcacctatgacttagggcttgaaattcccgcaaagctccagctcttccagctctccgagcagcaccgccgcctggtggtcgtgaatatctccggccttcagcgcaagaacggctcgcttctcccgtcctacacggaagaggagcttgacgaggcaacgttcacgttcgtcaagtattacgtgcagggcgagcactacgacgagcttgtcgaggagaacaagaagctgcgctacgagctcgagcaggagatctcctggagaaaccgcacggattccgagggctgagttcgcaacaccttacatcaaaaaaggaagaggttcccgatgggaacctcttccttttttgactatgacaaaatgcttcgcagaattccgcgtccgcagacgcggaaaaaattgaggtcgtaaatcgccgcgaccggcgcgtggcgatttactcctctcgctccgcgcgtgtcgcagccgccaagggcggcaaggcacgaagcggagtgcggctttctcaaaaaagaggctctgcctcttttttgaaattacttcttgtcttcttcaagcagccccttaaagctcgcggcgagaccggcgaggctctgaatctcgctcgggacgatgatcttcgtcgcctgaccgtcggcggccttttcgaacgattcgagcgccttgatcttgatgacctgctcgttggggttggcctcattgagcatcttgatggagtcggcaagtgcctgctgcacgttcaggatggcctgcgcttcaccctcggccttgaggatggcggcctgacgctcggcctcggccttgaggatggccgcctgcttttcggcgtccgcgcgcaggatggtggactgcttttcgccctcggccacgaggatctgggactgcttctggccctcggcctgcaagatggactcgcggcgttcgcgctcggccttcatctgcttttccatcgcgttctggatctcacgcggcggcaggatgttcttgagctccacgcggttgaccttgatgccccacgggtcggtggcctcatcgaggatagagcgcatcttggcgttgatgacatcgcggctcgtgagcgactggtcaagctccatctcgccgatgatgttacgaagggtcgtcgccgtcaggttctcgatggcgttcatcgggtgctcgacaccataggtgtagagcttggggtcggtgatctggaagtagatgactgtgtcgatctgcatcgtgacgttatccttcgtgatgacgggctggggatcgaagtcggccacctgctctttgaggctgaccttcttcacaacgcgctcgaaaaacggaattttgaagtgcaggcccacgccccatgtcgcgctgtaagcgccgaggcgctcaacgacgtaggcgcgcgactgctgcacgatctggatgttcgtgacgagcaccagaagcaccagcagcactaaaatgccgataccgatatagccgatccattccatagttcttttcctcctaaaatgttgtgtagtttgggtttactctcttctctcgctgggttctttactctcgcgcacgtagagcttgacgccctccatgcgaacgattcttgccattttccccttagggatgatattgccgtcttcgctgcgcgccgtccatgtcttgccgtcgatgtacacagcgcccgtggcgttctcgttgtccaccgtttcggtcaccttggcctcgtggtgcagcacacggtcggcattcgtgggcacgatagtcttatccagcatcttgcgcgcaaggggccttgttgcgatgagcgccagaatggatacgatcaggaaagccgcgaattgcagccacagcaccgcgcccagctccgtcgccaccagcgcggccaccgcgcccacgacgaaccagatcgacaccagccccgccgtcgccgcctcggcaatgccgaagatgatgatggcggcgatccagataatggtcatcatttcatctgctcctcctttcaaactgcgcatacagtagacgtatgccggaccgatcatcgcgatgacggtcagcagcatgatcccgatgcttttgttgtagggcgacagattcgcgtacaggtttgacaactcgctgccgagcgtgcgcgcggacagcagcggggcttcgaccggcggctcgccgggggtggggacttcttctttgaacagctcgtccatcgttacgccgtagcggttgcagatgaagatgatcttctccatctcggggtagccccggccggattcccagcgcgagaccgactggcgcgagacctgaagctgttcggcaaattcctcctgtgtcagtccgctgcgtttgcggacctcctggagccgctcgccaaatgccattgcgttccctccgtttctctgtctgaggataagatagcaaaaccgcgcgtccatttccagcaactttagtgttgcattccgtattttttcgaaaaatttcgcgcaagtttgatgttacattcatgtgacagcgcgctttccgcgctgtttttcctattgtaccacacgctccaccgctttaccatgcttattttgacgcggcgattgccttttttgttcccatccgctatactaaagtcaaatcattttttcgggagcgttattatgctggaatttgtcattccctgcctcttgggccttgagagcttagtgggcgatgagatcagaaaactgggactttctgacgtgcgcgttgagaacggccgcgtcctctgccgcggcgaggcgcgcgacatcgcgcggctcaacatcaatctgcgctgcggtgcgcgcgtcattctggttctgcacaagttccgcgcgacggattttgaatcgctctttcagggcgtgcgcgcggtgcactgggaggactggatcccccgcgagggggagttccccgtggtgggctactccatcaactcgacgctccactccgtgcccgcctgccagtcgatcgtcaaaaaggcggtcgtcgaccgcctgagcgcggcctacggcatcgcgcagctccccgaaacggggcggcgctatcaggtgcgcttttccatcatgaaggacgaagtgaccgtcgggctcgacacctcgggcgagggcctttacaagcgcggctaccgcgcccacggcgtggccgccccgctcaaggaaacactcgccgccgcgatggtcaagctctcgcactacaatggccgcgacccgttctgtgaccccttctgcggcagcggcaccatcgccatcgaagccgcgctcatcgcgcgcaaccgcgcgccgggcctcaaccgcagctttgccgcgcagcattgggccacgctcgacaaaatgctctggctcgatgcagccgacgaggcgatggacaacgagttccacggcaagtacgagatctggggcggcgacattgaccccgacgccgtcgagctctcgcgccacaacgccgagctcgccgaggtcgacgacatcgtcaagttcgaggtcgacgacgccacgcgcttccactggggcggcttgtatggccgcatcgtgacgaacccgccgtatggcgagcggcttcttgagcgcgaagaggcgggcgagctctataaagccttcggcaaggcgatggataagctgcccgacacctggcgggtgtatgtgctgtcgtcacatcctgactttgagcgctgctacgggcgctttgccgataagaaacgtaagttgtacaacggcatgctcaaatgtgatcttttcatgtatggaaaaagattgtaacgccgcgcgctgcgcggcgggggagaaagcagcgccagtggcgctgcacgaatcaagggggccattctctcacgtgagagaatggcccccttggacccccaagagaacg

SEQ ID NO: 10351 - DNA, 464 bp, Unknown
  gut microbiota DNA sequence
cgacattggcagtctcgatcttgaagagctgcacgcgctgcgcaatgtaagtgcggtgtacatggcttcgccatgaatccctacgtttcgtgacaactctcaaccgcgccttactatcgtgaggcgcgagtgacgtttgctcggcggcagactgcgtgccgaatgcggcattgctggcgctcgccgcattgtggagtgccctgatagacgggaattactgcgcacttctacaagatgggcagagcggcagcggatagtaggagcaagtcaaatcgtatagcaatgctaacgcggcaaagccgcgcgcaggcagctgcattccggaggctcaaagattgttcaagctccaaactgccaatctaaacctttctcttgggggatctaaagggggccattctcttttgtgaaagagaatggcccccttttgtgccgcggcgcgcacgccgctctcccctcccgcatag

SEQ ID NO: 10352 - DNA, 970 bp, Unknown
  gut microbiota DNA sequence
tggagactggagatagacggaaattaggctgtacttctacaagatgggcagagcggcagcggataatagaagcagaggcaaatcgtatagtaaaaccaatggcggcgagcgttagcaatgccgccacgcaggcactttcactccggaggcatgaaagttgttcgagctccagattgccaatcaaagcctttctcttgggggtcaaagggggatattctctttccacggaaagagaatatcccccttaatcgtccccctgcacggtgcagggaaaaccccgccctttcgggcggccttgattcattgtgccatatcggcacgaaaataaaccgtccgctctggcagcgataagatcagcgtatactcgctgcttttcccgcccgcagcatcggtgtattccgtgacgccgacaagcgccgtaccggtctcaccgtccagcgtaagatcatagaggacgtcgttcacatcgtgctgggtgagggtgtaggtgccgctttgcgtgctgccgtcggaatccgtgagcgtcagcgtgccgtcctgtgcggcgcaggtgaggacggagaggtcgagcggctgtcccgcgctgtcgatggcgtttgcgtatgtccagtcgtggccctcgatggtcaggccgtcatccgttttgccgcagccggcaagtagaaaaatgagcagcagcggcagtaaaatcttgtatttacctgtcatgtgtttttcctttctacctcttgattttcagcgcgagcagcacaccaagtcccacgacaaagagcgacagtgcggctaaaaacagatgtgaagggaaccggcccataacgtagatgtctgtcgccatatcaacgccgccgacgatcgaaacatcctccggaataggcggcccggcagtaaaatactgtacggcacatatgagcagtaccggtacgctgacggccaacagcacccatgcgccaatgcgcagggtctttgtgcg

SEQ ID NO: 10353 - DNA, 6406 bp, Unknown
  gut microbiota DNA sequence
cccacttcgtcacggcctgccgcgagacctcgagtgcctgcgccagcgcctcctgcgacagcccgcgctcctttcgaagcgtgcggatgcgcgcgccgagttcgttgtccatagaaagtctcctttgccttgatggcgctatcgtagcagtttttggcgcaaaagtccaccaagtattccgctactatcggtagcgaaacggaaaaagccgcccgaatgggcggcttttcacgcgcatttacttcttgcggcagctcagctcgccgttttcggcgtcgagcacgagcgtgctgcccgcggcgaggtcgccgcgcaaaatctccttggcgatcagcgtctccgccgcgctctggaggtagcgcttgagcggacgcgcaccgtaaatcgggtcgaagccgcgctcgatgatgaggctcttggccgcatccgtgacttcgagcctcagcgtcttgtcggcaaggcgcttcttgagaccctccatcaggatgtcgatgatgccgctgaggttttccttcgtgagcggcttgaacatgatgatctcgtcaagacggttcaggaattccggacggaatgcgcggcgcagctcgcccatgacggcggcgcgggcgctctcggaaatgctgccgtccggctggatgccgtcgagcagctcggaagagccgaggttcgaggtcaggatgatgatcgtgttcttaaagtccaccgtgcggccctgcgaatcggtgatgcggccgtcgtcgagaatttgcagcaggatgttgaagacgtccgggtgcgccttttcgacctcgtcgaacagcacgacactgtacggcttgcggcgcacggcctcagtgagctggccgccctcgtcatagccgacgtatcccggaggggcaccaatgagacgcgagacggagaatttctccatgtactcggtcatgtcgatgcgcacgaggttgtgttcatcgtcgaacagacagtcggcgagagactttgcaagctccgtcttgccgacgcccgtgggaccgaggaagaggaagctgccgatcgggcggttcgggtccgcgatgcccgcacgcgagcgctggatggcctcggtcacgagacgcacggcctcgtcctgaccgacgacacgcttgtgaatgatctcgtcgaggcgcagcagcttttcgcgctcaccctccatcagacggctgacggggatgcccgtccacttgccgacgatatcggcgatctcgttttcagtcacagtgtcgtgcaccatggagttgtcgcccgtgtgcttttcggctgcggcctcggcgtccttgagctgcttttcgagggcggggagatcggagtacttgagctttgcggccttttcgtactcaaggttcgcctgcgcgcgttcgatctcgccgtgcatctgctcgatctggctcttgagctgcttcacgctgtccacgccgctcttttccgcttcccagcgggacttcatggcgttgaactgttccttttcatcggcaagctctttcttgagctcctcgagacggtcgcgggagagctggtcgtcctctttcttgagggccatctcttcgatctcctgctgcatgatcttgcggcgcagatcgtcgagctctgcgggcatcgagtcgatctccgtgcggatcatcgcgcaggcctcatcgacgaggtcgatggccttgtcgggcaggaaacggtcggtgatatagcggtcggagagcgtcgcggcggcgacaagcgcgttgtcgtggatgcgaacgccgtgatagatctcatagcgctccttcaggccgcgcaggatggaaatggtgtcctcgaccgtcggctcgttgaccatgacgggctggaagcggcgctcgagggcggcgtccttttcgatatactggcggtactcgtcgagcgtggtcgcgccgatgcagtgcagctcgccgcgagccagcatcggctttaagaggttgccggcatccatgctgccctcggtcttgcccgcgccgacgatggtgtgcagctcatcaatgaagaggatgatcttgccgtcagacttcttgacctcgttcaaaacggcctttaagcgctcttcaaactcgccgcggtatttcgcgcccgcgatcagcgcgcccatgtcgagcgagaagatcgtgcggtccttgagcccttcgggcacatcgccgcgcacgatacgctgggcaaggccctcggcgatggccgtcttgccgacgcccggctcgccgatgagcacggggttattcttcgtcttacgcgacaggatgcggatgacgttgcggatctctgcgtcacggccgatgacggggtcaagctccttcgtgcgagcgcgctcgacgagatccgtgccgtacttcttgagcgcgtcgtaggaatcctcgggattgtcgctcgtcacgggggaggtcttgaccttcgcaagctcatcggagaagcggcttctcgtgatgccgtggtcggagagcagctggcgcacgctctgcgagccctcggagaagatggcgagcatcaggtgctcaacggagagatactcgtcgtgcagcttttcggcggtcttttcggcaaggttcaggatcttgccgacctcgggcgaggcgtacacctcgccgctgccgccggagatgcggggcagattgcggatcagcgtgtcgagctcggagagtaagccgtcgcaatcgacgcccatcttaccgaacagtgacccaatcagtccgccgtcctgatcgagcagggcatagagcaaatgttcggtcgttacatactggttgccgttttcctgcgccatgttctgcgcggtcttgacggcttccaaagccttttgcgtatatttttcagcattcattcaagttcacctcaaattcgtgttttttacaattaagtgattaaatcagcagcgttctgcttcgcagatcgccgcggtaggccatttcaacatcgctcgcggagagcgagccgtcgagatagcccttgagcagccggtcgaagagctggacataagcgctgatcgcaccggcgacatcatcggcagtcagcgcctttccgcgcggcatcgcgagcggacgaacgaagcgcccgtcgtacagcgcgcaggaaatggagctgccgagaagcggtgcgaggcacttgtcttcgatctgcacccagagccggaagaagctcgtcattgcggagatcagcgccgccgactgcgtgcggaagacgatgttcagcgagcccatcgtctggccgtcgccgctgctcagatcgacctcgtacttgaccgtggggcggtatttgtacgataagctcgacttgagcgacattgtggacgagccgggggcgaagaacggcaccagctcgcgcgtgggcgtcatcagctcttcgatggcctcaaagatatcgttccagcggcgttcaggcgtcggcacggagacgtactcggccaaaatctggttgacgagcgccgaacggttcgtgcccatccggtgggccagcgcgtcgacctcgcgcaccacatcgtctgacagcgtcagactgtaaagatttttcttcatcatgcgcctccttggggttcttttcttttctggatgctatcatagcacgtgaacaaattttgtcaatagttttatataaatatatttacgagttatatgcgaatttacacggagttcataattgcgaaggaagcggaaaaagggaaaagccgcagtgaatttcactgcggcttttcccttttgagagatatgagagatgagagaatagcaaatttacagcaggccttggagcaggatgatgacgatcaggatcggcagcacccactggaaatagggcttgagcttgggcgagagcttgatgcccgtgcccttgttgacctcagcaaggtacttgtcaaagccccagccccacttcatgacgcagaacagcagatacacgagcgagccgatgggcagcaggaggttgctcacaaggaagtcctcgctgtcgagcacgtccttgccgagaatggggtggaagtcgctccagatgttgtagccgaacacgcagggaagactcaggagcatcagcagcacgccattgatgaaaacggccttcttgcggctccagccgaaggtatccatgcagacggcgaggatgttttcaaacaccgccagcaccgtggacatgctcgcgaacatcatgaagaggaagaacagcgtgccccagaagcggccgccggacatattgacgaacacctgcggcagcgtgacgaagaggagggaggggccattgtcgggcgctacgccgtaggagaagcacgcggggaagatgatcgtgccggccatgagcgcaacgaaggtgtcgagcgcgcagatgcggatggactcaccggcgagggtgtgatcgtcggacatgtagctgccgaaaatctccatcgccgcaatgccgagcgaaagggtgaagaaggcctgattcatcgcatcggtgatgaggctgcgcaggccgttttcgcggatggaatcgagcgaggggagcaggtagaacttcatgccctccgccgcgccggagagcgtcaggctgtgaccggcgagaatgaggatgagcgcgagcagcgcgagcatcatgaccttggacacgcgctcaaggcccttttgcaggccgaacgagcagacgatgaagccgacgatgacgatggcgactgctaaaatacccatttcgactggatcggacagcagctggccgaacacggcggacgcgtcctccgcgggcatgccggagtagaacttgccggtcaggaacctgccaaagtagctcaccatccagccggaaaccgtcgtgtagtacatcatcaagaggtagcagccgatcaggcagaaccagccgtggatgtgccacttggacttgggcttttcgagcgtcttgtaggcgaggatcgcgctcttgtggctcgcgcggccgacggccagctccatcgtcagcacgggaacgcccatgatgagcaggcacagaatgtaaaagagaacaaaatagccgccgccgtttttgcccgtcacataggggaagcgccagacattgccgatgccgatggcgcagcccgcgctgacgagcaggaagcccagacgggagcggaacgattcgcgtttcatgttgatcgacctcatttgtaaaagatttatgaacgatgtgcttatcttaccgcagggagatgggctttacaagaccgattatcggatgatataataagcaaaacttatgttatgaggaaatgagtacatgaatcgcaatcagctacgctattttgtctccgccgcggagcaccggagtttcacaaaggcggcggagcagtattacatctcgcagaccgcggtgacgcagcagatccagcagcttgagcagacgctcggctgcgagctcttcgaccgcagcacacgccctgtaagcctgacgagcgcgggaaagtcgttccttttggacgcaaaagcgatcttagagcgcatgagccgcgcacaggaacgcgtgcatgacgcggcgacgggcctgaccggcacgctgcgcgtcggctacgtgcgcggctatgagcgcagcgacctctcggtcctgatgcgccacttccaccagaaaaacggaaatgtgctcatctcgttctaccgctgctcgacggatgtgttggccgcggggttactgcatcaggagtatgacatcgtcttcacttgggactcgacaaacctgcgcacacaggagggcgtcacgtttcagacggtcgaaaaggctcggctcgttgtcgcgctctatgcgggccatccgctcacgcagcgccgccagctcacgcggcaagagctgcgcggggagaacatcttatatatgtcgcccgacgccgcgcccgattcctacggcgacgcctttttcatgcagcgctacgccgaggcgggctacaagccgaacattctcttccgctcggcggacaccgaaagcatcctgatgatggttgcggcggaggaggggatctcgctcctgcccgactactgcaccaaccgcctttacaatgccgacaacctcgtcttcgtcccgctcgtgggcgaaggggaggaggaagagatcatcgccgcctggcagagcggcaaccagaaccccgcactgggacggtttttgacagagctcaatcaaaaagacccgccttactgaggcgggtctttcctattgcaatatcaattgtaaattgtcacgattcggccttttcagcgttcagtgcttcaagtgtctgctccatttcggccgtttcggtgcgcggctcaaggcgatgcaggcagtcgaggcattcgatgcagtgcttacgcttgtcctgcggccaaagggcgctgagttccggcacgttgatggcttgcttctcgagcaagagtcttattttccaagtgatgtaaagtgtaatgccattccaccacggggagcccatttttcgtccgac

SEQ ID NO: 10354 - DNA, 467 bp, Unknown
  gut microbiota DNA sequence
gtgccttactcagccgcgcggcggcggagacgtactgaccgtcctccacgtcgaacagcgcgaggtacgacagcgcgatcggcatctggctgtattcatggaaggactgatagagctcctcggcgtacgagagcaactcgcgcgcgacctccttttcgccgctctgataggcggcgacgccgcagtcggtgtagatgatggccgcaccggggtacgagccgcggcgctggttgaagagaatggccttgtcgtagtattcgagtgccttgtcgaagttgcgctcaaggcggtacgtttcggcaatatagttgtacgcgcccgcgatgctgatgacatagcggccctcgccgtccgcgtcgagtgattcaaaaaagctgatggagcggtcgagccagctgcggcacttgtcgtattcgccgatcatcaggtacatgaggccctgtaggcgcaggaacttaccccagtcc

SEQ ID NO: 10355 - DNA, 6210 bp, Unknown
  gut microbiota DNA sequence
attttccaaacgcgatttatactgcatgccaaggcgcagatgctcacgcataacgggaagatcataggtctggatggcatagtagatgaactgcaaatgcgcgttcgcggccatctgccagtcgcccgcggtagtactgctcttgaggagctggccgacaacggggaggcccgcgtcgtattcgccgccgtggatgtagtagcggctttcgacgtacaggagctgacgctcgagctggtcgagctccttggcgtttgcgccgaactgcgtggagcgcagcgaggcaagctcacgctcgaggatctgaaagtagccggtcagaccatcctccttgactgtcagcgcgtccgagccgtcggtcaggatcggcatgagctcatagcacataccggcaaatgcgtcaagggaaagtactttatacttgaaggctttgaaggtatcgccgcctgcggtgaagtgctgcacgagctgatcgtagaggtcggtcgaactgtcgctgccgagctgcgcctccagatattgcgcggcgcgcagatgcaggatgcggcgcgcggactcggactggcgctgcgagagcatcgccttcacgcgctcgtgcgtgaacgaatagccgagcaccttgccgcgcgtggattcggtgagcagatttttctgcttgagctggtcgcagaggtacagaagctcgagcggcgtcttcgtcaaaagggaagtgagaatgtcgaacggcgcccagtcgcggaagaccgagatgacgtcgagcacctgcaattcatcggacgaaaggcccgcgaggcgcatctgaatgatgctgtccgcgctggcagggatgtttttgagcccattcgactcgtgcatcgagtcgagcagctgcacgaggaagaggccattgccctccgtgctctggtagaggttgtcgatctccttttgcgagtagcggcccggggcgtagaagttgacgaagcgcgttgtctcctcctgtgaaaaggcatcgatattgtacacgtcgagcagcttgtcgcgcacggcgttgttgagcacctgctgggcatagggctgcaaaatgtcgcggctcgtgcagatgatcgtgatgttcgtgctgcgcaggcggtgcagcagcatcgaaaggaggtcggcgctgttgttgtcgatccagtggatgtcctccaaaatgagcagcaccggcacctttttggcgaccgtcgacaaaatgagcagcgtgctctcaagcgcggcgagataatctgcgcccgcgggatagtcgctcgaaatgccggagaaattgtgctggcattcaacggacaagcaggggaagaggcctgcggcggtcttaatgtaaacatccggaacacggatattttcggattcgaatttcgggatgagctggagcatgatcgtgttccacggggcgagcacggtgttcatctcggactggtagcacgaggcctggcagatcgcccagccggaaaaatcgtactggtgcaggatgtagttgatgaggtatgtcttgccgacgcccgtcttgccctgaatcagcgcgcagatcttgtcgctttcaaggcgcgagccgttgcacagcgatacgagcttgtgcagcaccgcgtccttgccgatgagctgctggtcgctgccgacctcgagcttgtaggtcgaggtgttccacgcgtcgacgatctgatagtagagtgcggaggtctccttgagcggggagatgctgaattcgtcggaaaggttcttacagagcgtatggtaaaggccaagtgctttacggaacttcttctggtcgcggtagacctgcatgagcgtggagaacgcgctttcctccagcgggtcgatggcgatgtactccgtgccgtatttttcggcaaggtcgagtttaccggcgtaatacgcctccttttccgccgccaaaagctggtgaaggtactgcgactgatagagattgcgctgatcgctcagccatgcgtcaaacgcggaggagtgggagacattgaagtccttcagaaattccccgtgataggcgctgagcatgtcgccgcgctcaaaatcgtagacatcgcaggcgatctcaacgtcggcggagaattcaacgatcgagcgctggctggggacgaagggatcgaaggcaaacgccttgcggatggtgtagatcgcgtggcgtagatttttgagcgctgtggcggaatcggtatcctcgtagagcaggccgatgagctcgctgcgggtggttttgcgcttgaggatcaaatagtacaaaagagcgtcggcttttttataggggagcgtgatctcccgcccgtcgacggaaacggcgggcgtaccgaacagttttgcgtttaactcaggcatgtcaaggcctcccaacagaaataacacgttagtgcagtaaacaaagatagtatattcaaaccgttgaaaaatagcaagtacttcgacggaaacacgatattctaagcgaaaaataacgctatggtcgaatacctcaacgctaattcaacgcgcgtatgatataaaggcagcatcaaaatagtacgggtctgccttttgctgcccgtttagtttaggaggcatccatttgaattacgttggaacagcgcgtccgatccacgacgccaagggcaaggccacggggtataccaaatacgccggcgatctctcgctgcccaatatggcgtatctctgcatgctccacagcaagatcccgcatggctatgtcaaggcggtccacgcggaaaaggcgctggcgcttccgggggtttatggcgtttatcactgcctgaacaccacggaccgcaagtataaccgctaccgctcgaacttcgaccaggcatacttaccgaacgaagagtgtgcgttcaacgattacgtgcgctttgtgggcgacaagatcggcgtggtcgcggcctgcgaccaggaaacagcggagagagccgcgcgtcttgtcgaagtcgagtatgaagagcttccgttttccatcggctttgatgatacgctcgcgggcaagaactgcctggagggcgaaacacccgtccgagacgaatacacgctggatgtcggcaaaaagcaggagagcaccgaagggctcattgaggtgtgcagcacgatggagctgccgcgcctgcatcacgccacgatggagacgcacgcctgcattgctgactacgatccgtatatcgacatgctgaccgtttactgtccgaatcaggccgtgcacggcattcgcaccgtgctcgcggactatctggagatgccggagagccatgtgcgcgttatcaaggcgacgatgggtggctcgttcggtgccaagcaggagtggtttttggagcccgtcgcggcgctcgtcgccaaaaagctctgttgccccgtcaagctcgtctactcccgcggcgaggcgatgaccgacacgatcgtgcgcggcgcgatgcgcatgagcgcgcgcggctactacacgcccgacggcgaaatgaaagagatctactgcgatgtgacgcttgacgcgggcgcttacatcggcaacgcgggcgactatatccgcgcgctggccggtaagccgacacgctgctaccgcatcccgtacatgcactatcacgggcaggtcatcagctcgaattcgccggtctccggcgcgttccgcagttggtcggcggcagaggaagcgctgatgatggagcgccagatcgacgccgcagcggaaaagctcggcatcgaccgcctcacgatccgcctcaagaatgcggcgcatgccggcaaagaggacaagaagctccacctgtcgctcgaagacatccgcatcggcgatgcgatcacactcggcagcgaaaagttcggctgggacaagctgaaagctgaggacgcggcgttcaacgcctcccagcagcgctaccgcaggggcgtcggcatcgggatcggcggtcacggcaatacatacttcccgcgcttcaatgactacggcgagggcagcatcagcttaaatgccgacggctcgatgcaggcgaatttcaccctgcacgaccacggctgcggcacggtgacggcgatgcgcatgatcgccgccgaggtgctgaaagtgcccgaggataagatttacatgaccgagggcgacaccgcggtcacgcccatcgactacggctgctttgccagccgcacgacctatgtggtcggccgcgccgtgcaggatgcggcgaacgccctgagaaagaagatgctgcacgcggcgtctacgcttctggatattccagaagacaagctgttcttaaacaacagccacatttgccgtgcggggcaggacgagccgctcctttcgtttgccgagctcgccaaaaagagcatgcacacccacgccggcaacctgacggcctacgcgagctattcgaacgtgacgaaccccggcgtgacgggcgcgcactttgcccatgtcgaggtcgacacctggacgggctttacaaaggtgctcgactatctcgccgtgcacgatatcggtcaggccatcaaccccggcctgtgcgaggcgcagatccagggcgcggtgcagatgggctgcggcgctgcgctgcgcgaaaagatgaccatgcagaaggacggccgctgcacggagagtttgtccaaatatcatctgttccttgcaaacgacctgccgaacatccgcgtggagcttttgcaggacggacactcgaaggagggcccgttcggcgcaaaatccatcggcgaggtctgctatgtgccggtcgctccggcggtgtgcggcgcggtgaacgacgcgctgcacgcgaacctctcggtgctgccgtatgatcccgactgcattctcaaatatctggcggaggtgagagagaaccatgacgcttaattttattgtaaacggaaagcccgtcacgctcgaaaccgagcctgaccgccgcctgctcgacatcctgcgcgaggacctgcacctcacgggtacgaaggaaggctgcgcggggggcgaatgcggcgcgtgcacggtgctgctcgacggcgaagccgtccactcctgcctgaccgccgccatccagctcgaaggccgcgaggtcacgacgatcgaaggccttgccgaaatgggcgctctcgacatcatccagacctgctttgtcgaagagcttgccatccagtgcggctactgcacgcccggcatgatcatgtctgccgaggcgctgctgcgcaaaaatcctgacccgacggaagatgaaattcgtctggcgctctccggcaatatctgccggtgcagcggctatgtccagatcgtgcgcgcggtcaagcgcgccgcgaaggagaggagggaagcgcagtgcagagcttaacgcccaaaacgcttgccgagctcgcgcaggcactttccgccgccacggaaaaggcgaaggtcatcgcaggcggcacagactttatcatcaaggagcgcgcgggcaagttcgcgcccgaccttttgatctaccccggcttcattcccgagctgaacaccgtcacgaaagaaaacggcgtactgcgcatcggcgcggccgtgccgatgaacggcatcaccgccgcactcaaggacgacaaggcgttctgcgccatcgcggacgcggcgtccgacgtcggctcgccgcagatccgcgccaagggcacgatggcgggcaacctctgcaacgcctcgcccgcgggcgacatgcttccggtctcgtggctgtatgatgcgcagcttgagctgatgaacgcggacggaatggcgagtgtgacgccggtgaacggctttatcaccggcccgcagaagacgatcttgcggccggatcaggccgtcacggccattctggtcgacttgaagcagtttgagggctttgtcagcgcgttccataagatcggttcgcgcgagcgcgtgtccatctcccgcgagggactggccgccgccgtcaggctcgacgaaagcggtaaggtcgaacaggcgagactttctctcggcgcggtcggcggcacgccgatccgcgtgacggacgcagaggagtatatgcgcggccgcgtgctcgatgaaaagctcgtcgaagagatcacgccgatggttgccgagaccatccacaacaactgccgtccggcaaatcgcctctataagactgaggccgcccgcggcctgacggcggataccttcgccaagctgatgagccgcctgtaacgcgaaaaacagcatagaaaaaggacgcatccggtcggatgcgtcctttttgcggt

SEQ ID NO: 10356 - DNA, 588 bp, Unknown
  gut microbiota DNA sequence
agaaaatactcgcagtccgctttaaggcgccctaaaaggccatattcaaaactgtaatcatacggttctgtttctccctcaagcggctcatcggtttccggctccggcagactgacaacaggggtttccagatagcgaccttcatctaccaggcgttgcacgacaccggcagcccgcgcccaggacagtttcgtttcctgtgtttcgccctgcttatcctgccattcgatagtgacaccttcactattgaacatggcgtatttcacgcccatttcatcaccggagaacccttcatagccatatagcttttttaggaaagcagtaaattccgatccggtggggtgggtctgggcaaactcgtagatttgttcctttttccctgcggtaaggggacctttctgcatgacacgctcaacaagcagatcttccgtactcttttccagggacagaagcgagagctgctccggctgttcttcttccacgaccggaatagcttcggcagccggacgcaaatccacatcgacttcttcatcattgaccatcatagaggcccgcaccggctcatagccctggctgcggatgttgttc

SEQ ID NO: 10357 - DNA, 6162 bp, Unknown
  gut microbiota DNA sequence
cgcactaaaaaccgtggactggggactgctggccaccttcgccgcgttcttcaccttttccggcaaccttgctcgaatggaagctgtccacatactgttcgctcgccttttgtcccatggaaccattctgatctccgcgcttacctgccagatcatcagtaatgtccctgccgccattttactcagccgcttcacgcaggatgcctgcgggcttctggttggcgtcaatgtgggcggtgcaggaacgctggtagcttctctggcaagcctcattacctttcgggaatatactcaccatgttcctaatggtggaaaacagttcctttttcttttttctgggatcagctttgccttcttgacgattcttttggctgccatgtccttcctgaacggatgagcctttattgccggcatctttgggaaaaatccttaaataattgtgttgtcgtaagctgtatgtcgattaataacccattctaacgcactttcgttttcgcgcttcacttctttaaggcttcctgttcatccacagcttcgccctctttcggatatccatttaacgacccgtcatctgtaatattgtggaacacggtcatttggtttcatagtttttcttttttgcgtaagatttatctgtatggcattactatattttaggtttatttcttacaacatacaaacctgcaaacgcgaaataaaatactaaatcggccttttctataacatctgtcagcggcttgcattggccgtcaaaataagataaaataaacaccctaatggtcaaacgagtggggagggacacggctgtgcggatagacaagagaacagctacgggcattggctgtcttgtgacgatcggtattgtgctcgcgttgatgatcgtgacctttcacgccattgcgcgcggtgatgttccggaaaatccgctcacgccggtcggcgtggtactggaactcgtctgcgccatcctgacgacctcgacctatgcaagcgtggtctttggcagtcattcgcgcaggcgctttcgctcctatttcctctggatgctggcgatcaacaccattgggcttttgagcgatgtgatctattgggggatcgggcttgattttcttcctgcccttccgcggcttcgcgagacctgctattttgtctgctacgcctcggcatttccactgctcattttttacagcacctatctcatcagttacatcaatgaagactcgaaggaattgcagcgatataccgttttgatgaccggcctcagcgcggatggatttctgctcgtgatgatctctgtcatcacgtcgcgctctcagaatgccccgtggcatctgtcggatcacccgtggctttacttcttctttttggccatgccgatggtggtcaacatcggcatcattctgaacttcaggaggatgctgaccaaccgcaaggcgatctctttccttttctatgagctgctggtggctgccgcggtagtggttgacacggtcatcggggagatcacactggctcatgtcgttgtggcgttttgtctcatccagatatatatcactgtgcagatcgaatacgaaaagcagcaggaagagcagctcttgcagcagcgtatctccattatgatcagccagatacagccgcactttctttacaatgtgctcaccagcattcgcgcgctctgccgcattgacgcgcgcgaggctgagagcgcgctgacggattttaccctctacctgcgagggaatcttgattcattgagcaataccggctgcattccttttttgcaggaactacagcataccaaacactatgttgatctggaaaaaatgcgctttggccgggatctgaccgtccttttcaacacgccggtcacgcaattctccctgccgccgctcacattggagccgatcgtcgaaaacgcggtgcgccacggcgtgatgcagcggcttcagggcgggacggtgatcatctctacaagcgagaccgagtcggatttcgtcgtgactgtttcggatgacggcatcgggtttgatgcagagcagcttgcggcgggcggcaagcatatcggcttgtggaacgtccgtgagcgccttgccgcggtgtgcggtgggcacatggagatcgaaagcgggatcgacaaggggacaaatgtgacgatgtgcatccccaaatgtcgaaaggagagcgaatgatgggactttgcttgttggctgttgacgatgaatctttggcgctgagcgatctgacagcggcgctgcaagctgccgagccggcagcagcggttcacgcctataccgatccgacgaaagcgcttgaggcggtgagaacgggggagatccttccggatatcgccttcctggatattcagatgcgcggttggacgggactggaccttgcactggaattgaaaaagacgatcccggcgctcgagatcatttttgttacggcttattcgcagtatgcgctggaatcctattccctccatgcgcgcggctacctgatgaagcctgttacggccgaggcaatcgaggaggaacttcgtaatatcggcctgaccacagtgcctgtgaggaaggagctttccctgcgtgtccagtgcttcggcaattttgaagtgttttatgagggaaaaccgctcgaatttgcccgcgcaaagagcaaggagctgtttgcgtatctggtatttcgccgcggttcggcctgcagcatccgggaatgtgcggccattctctatgaggaccgggaatacggcagcgcgctgaaaaatcagatcgaaacctttaagtctgatatgatgcgcaccttgcgaaaggtggattgcgaagatgcggtcatcaaggggcggaatcaactcagcgtggatacagaaaagttttcctgtgattattatcagtttctcaacggcgaatcttcggcgatcaatgcttttgtcggagagtttatgacgcagtatagctgggcggagatcacgacggcatcgctacagggcaagatgactgaaatcattcgctaaaaactatcaaaaacggcgaaaatgcagaggtgatcgaaatactctgcatttttgttgtctttttgttgtccttgatccggtaaaatgaatcacaagaggagcaaggatgcaaaacctatctcccaacgttttaggaggaaagctcaatggaagaaaaaaacctgcacgtcgaagaaggcgcgctcaaggtgacaaagctcacgctttatgaggcggtagcgatcatcgtgggtgccaatgtcggttccggtatactcggccttgcatattcttcccgccttgcgggatggccgatcctggtgctctggctggcggtggccggtctgttcaccacattctccatgctctatgtggcggagtccgcactgcgtacaaaaaagcccctgcagctgcccggccttgcggaaaaatatgtcggtaaggtcggctcggtcctgatcttcatctctgtctgcgcgaactccatcggttgcatggtcgcctacacgacaggttccggcaacatcctctgcacactgctcggtctccccaactgggcgggcagcctgctgttcaccgttccctgtgtgctggtcgtctggttcggcctcaaagccaccggcctttgggagaaattcatgtccacgggcatggtcgtgctgctcggcatcattgtgatcgcatccttcctctccggcaaggcggatgtctcccgcgccgtatacgcaaactggacctatgccgttccccttctcagcagcgctattttctgctacatcgcgcagtatgccgtgcctgagctggcgcgcggtatgcgccacacgcccaagaagctcccggttgccatcattctcggtatgttcatcaccggcgtgctgctggccgttgttccccttgccgttctctctctgaccggcgcggaggaggtcacacaggtcgctacgctcgcctggggtcaggcactcggtacctgggcgctctataccgccaacatttttgctctctgcgccatgatgacctcttattgggcggtcggcggttccatgctcacgaacatcgtcgatatgttcaagctcaaggatgagaaggacaccaagacccgtctcatcgccatcgcctgcacggtgcttcccccgttcatccttgcctacgccggtcttgtcagctttgttgacgccattggctgggccggtaccttcggcggcgtgattatgtcgatcgttcccgttctgatgctcaacaacgcccgcaagaagggcgatatcgagccggagtggaagtgcggttggtacgcgcatcccgcagtgcagggcatgatcatcgtgatcttcagccttgcggccatctacttcatctgctccatgatcggcatcctgccggcaggttggtaagggaaaggaaggacagatgtcatgcgtgtgatcccgaaagataaagtgattttccacttcaacccgacaaatcccgcaaactataccgtcgaggacggagagaccttctgggtcgagtgcgacgactgctatagcggtcagatcaccgacgaaagcgtcaagcgcccggatattgacatcggcatcatggactgcgccgtaggcccgatcgcgatcagcggtgcgcaccccggcgataccctttgcgtggaagttatggcgatcgaccttgcgccgcagggcgtgatggtcacatcggtcggactcggcgtgctgggtgatcatatcacggagccgaacaccaagatcattcccgtgcacgatggcttcgcacatttttccgatgatatcaagctgcccctgacgccgatgatcggcgtgatgggtgtcgccacgaaaagcggcgagatccactgcgcggtgcctgaggaccacggcgccaacatggacaccaagctcatctgtgtcggctcgcgcgtatacttcccggtcaatgccgagggcgcgggcttggctgtgggcgatatgcacgcctgcatgggcgacggcgagctctccggcacgggcatcgagatcgcggggcgtatgtgcctgcgcgtcacggtctaccacgaccgtcccattgagcgcccggtcatcgaaacggcggacagcctgtacttccttgcttcccgccgcacgctggaggaaagcgtcaaggtcggcaccgaggatgcggtcaacttcctgatgaagaagtttgatttgaacttcccagacgcttatcgcttgatgagcgccacctgcgacgcgcagatcagcgaggtcgtggatgataacgtgaccatccgcattcgcgtgccgaaatttgataaccgtgtacgcacgctgtaagagatttgaagatttgaaaaagagccgttgcttctgaactgcaccccacatgttagacagtatgatatactacctaacaagtggggtgttttgttatgccaaaaagagtgccaaacaagaaatacacaccagaattcaagaagctggtggtagaaacaatgctgaaaggaaaacttgggtatagtgagccaacgggccgcggagaatgatcggcttgctgaaaagctcgaacagctccacgaggaaagcccagataagggataccggcggctcaacgacgatctgcgccatgactgcggcatccatgtcaacgacaagcgggtgctccgcatctgccgggtcagagatatccgctctaccgtgaaatataacaaccgtggctgcaccagacaggcgaagaacccgcagtatcttgctgagaatcttttggacaggcagttttatgccgcaaagcccaatgagaagtggctcaccgatgtgacagaattcaagtggtttgagggtatgaaggtagaaaaactctatctgagcgccatcttagatctttgtgaccggcgcatcgtgtcctatgtgctcagcgaacgcaataacaatccgttggttttcaagacctttgataaggctgtgaaagccaatccggacgcgcatcccctgttccatagtgacagaggattccaatacaccaaccgcgctttccacaacaagctcgtgcaggcaggcatggcgcagagcatgtcccgcgtggcgcattgcatcgataacgggccgatggagggcttctggggcattctgaagcgggaacgctattacggcagacggtttaccagcaagcacgagcttgtccagatgatccagcagtataggacgtac

SEQ ID NO: 10358 - DNA, 544 bp, Unknown
  gut microbiota DNA sequence
ctgaaaatggtgtgggtcaaaatgtgggtcaaccgcctgacccacaccgtgacccacacgcgaaaatgtgaggataggttcaaagagtaccggagaggaggttttgccccctctccggtatttcgcatcctttttctgcttacatcacttgcgccatgaagctgcccatcgtttgtgcggcttcgtcctgcttctgcctcgtagcgtgggtgtaggtgcggagtgtgaatccagcgtcatagtggccgagcatactgctgacggttttgacgtccaccccattttgcagtgccagcgttgcgaaggtgtgtctgaggtcgtgaaatctgatgtgcggcagcccggcgtccttcaggatcttcttgtgcagatttacgacggagtctgggtagtacatctcaccagttaccggcgaggggaacatgtagggattctcgggatgcttgccgtgttccgctatcagcaggtctacggcatcctgcgggatagatacttttctgaccgaagtctccgttttgggacgggacagcgtcagttcgccatt

SEQ ID NO: 10359 - DNA, 445 bp, Unknown
  gut microbiota DNA sequence
gtgcaagaccatcaactactttgaccacagccggacggactacacggagttcgacaagctgcacgcgcacatcaaggcaagctaccccaacatcatgcgcgtgggcacgtttgaacgcatcggccaccacgccgtgctcatcaccatccccggcagcgacgcttctctgcgcccctgcctctacatgtcgcatcaggacgtcgttcccgttgttgagggcacagagcaggactggacgcatcccgccttttccggcgacatcgcggacggctatatctggggccgcggcacgcttgacatcaaagagcaggtcttcggcgtgctggaggccgcggaatatctgctcgcccgcggcaagtcctttgcccgcacggcgtatctcgccttcggcgacgacgaggagaccatcaacttaggcgcgctcgccatcgccgagcatttgaag

SEQ ID NO: 10360 - DNA, 587 bp, Unknown
  gut microbiota DNA sequence
gcggcaacgcaacgacatggtctgcaaggagttttcacttcctgtatttcaacccagggaacaaaagcagaaaacaaagactatgaccatcggagagtatcacacggcggcccgcggtcagagcaagaagctgcagctcatgaatatcatcaatgactgtatgcgccacgcttccaaccgcgaggagttcattgcgctgatggagagcgagggctacaaggttcgctgggaaaagtcccgaaagaatatcacctataccacgccgagtggctggcagtgtcgggaccgtttgctgttcggtgacaaatatctaaaggagaacatggaatatgaattcaggatcagagaagaaattatctatggacgagctcatggccctgaaccggcccgagccttcaccgcagccgacagcgcaggagtcgagttcaccgatcacgcccattgtcatccagtgtccgttgccggaggctctgacgatgctgacacagaagacagaatccatcgggtgggaagtgcgtggaatgcgggagtatcttccgaacctgagatcacacacagacctgacagcggtgcagaacagcatggcg

SEQ ID NO: 10361 - DNA, 905 bp, Unknown
  gut microbiota DNA sequence
gctggactggcttccggacttcgacctgatcgtagtggccaaatggatcgtactggtactgctcatcgtggcggcactgctggggatggggtatggcacagcgacagtggtcagcaacatccgcaacctgtttctatgaagccgctccacgctggactgtatggtctggcggtaactggagcgttactggatgatggtaacgaagatgtcgaggaacgttaccgccgtatccaggcagaacaggaagccaaaaatatcggcgctgtcatcggactggtggccggcgtagccatggtgctcacacaggatgagcaatcatctacagaacagcagtggaccgaagatcagcaggcagaacaaacacagcagcagaccatgtaacggtctgctatttttgttgcctgactgtagcgtcaggggaaaggaacgatatggcgtataaattcaaatacaatgagcgtccccgctcctacagtgaagaaaagcatggagatgaggatattccctctgccaaggcagtgcgggataccgcagtggaagaaagggacgacaagattataaaaagccgccgacagcatgtatgcggcagagagtacattgtgttcgcggaattcagtttcggaggaacgcaatctacggtcgatcttatgaaacaggtcatcgacctggagcaggacgcaaaaaatatttccgcctgaaaaacaggttcgcatagacaaacaaaccgattgagggtattgtatggttgcaatctctcaatcggtttggcgttttatgaaggaggtcaatatgttacagccaaaccaaaagatcacggcgctctattgccgtctgtcccgagatgataatctggagggcgactccaacagtatccagaaccaaaaacttatcctgcaaaagtacgc

SEQ ID NO: 10362 - DNA, 750 bp, Unknown
  gut microbiota DNA sequence
gccgtcatcatcacaaaggatctttcccgccttggaagaaaccaactgcacaccggtctttatatcgaggagatattcccttccaatgatgtgcgctacatcgctgtcaacgacaatgttgacaccaagtatgaaaacagcaacgagctgatgcctttcaagaatttgttcaatgagtggcacgtgcgggactgcagccgcaaggtgcggaatgtagtgaacgccaaggcacagcggggaatccgggtggggacacgagctccttacggctaccgcaagggtgcaaccaaggactctcctctgttggtggatgaggaggcggcggctgtcgtcaaacgcatcttcgccatgtgcgccggcggaatgggaccagcccagattgcaaagcagctcaagaaagaatgcatctacagtccatccatgtacgcctatacgaaattcggcacatcccattccgggctgaatgcagagcggccctacaactggactggcgacatggtggcggatatgcttcagaacatggtctaccttgggcacacggtcaaccttcgctacagcaccaagtcctacaaggacaaaaaacgatgtgaacgccccaaatcagagtggcttatctttgagaatactcatgaagagctggtggatcaggaaacctgggatatcgtacaggaggtgcgatctcataagcgccgccgcacgaatatggatgagcagaatatgttctctggattggtgtattgtgcggactgc

SEQ ID NO: 10363 - DNA, 355 bp, Unknown
  gut microbiota DNA sequence
tcgcttcatttgttctgtcacatgcgtgtaagtgtccagcgtgaatgcggcactatagtggccgagcatgccagcgaccgtttttgcatctacgccgctctgaattgctaaggttgaaaatgtatgtctcaaatcatgaaagcgaacactttcatccactccggcagcggcgagcatttgcttgtgtaggtggcgaagagagtctggactccagtatccattggttctcggacaccaaaacatgagaggactatcaggatgcttgttgtgctcttctataagcacggcgacagtattctccggaagagctattgtccgaatcgaattctccgttttcggtacagtaacgcgtagt

SEQ ID NO: 10364 - DNA, 1080 bp, Unknown
  gut microbiota DNA sequence
ttcaggattcaagtcagcccactccaggccaagcaattctccccgtcgaagcccacttgtcaattccaaatagaaaagcgcatagactccaagtcgctttgcctcatccagatatgcaccaatcttgtcctgcggcaggacatgcatttccttcttttcacgcttcggaattttacagttatcgcaagggttgaagggaataattcgctccttaactgcttgttttagagctccactcaatacagcgtgaatgtgtttcacagtgctagcagacaatggcgcatatttccgattaccatggttgtccaagcggccctgtgtatgcagatcgttgtagaatcgttgaatctggatcgagctgagttttgaaagctggatatggcccaaaaccgggatgatgtggttctcgatcatgctcctataaccatctgctgagctggggcgaagatttggctttgtgtaggaatcaaaccaaagccgaatccatgtagaaaggggctgtgaatcatatcctttgcccttgcgataataaggccctgtatcctgttggatggctcgtgccagcttcgctgcgcattcttttcgtgtcttagcaaaaacgcccttttgaatacgctttcccgttagaatatcgtagccggcagtatatcgaccttcccaacagccggggtatctctctcgaatgctgccttcgccattcgctctttgcctaccagccataatgatctctcttttccatttgcgtctgagcatcaagccacgagagaaattttcctttgtcaatatagaccctttgaccacttaccgtatggggaaagtcatctctctttagaagtctatatgcaaccgtaagactgcatccgagggtctttgcaacgagcggcatcgtcatcacatccggaagatcttctttgcgccggattcgcggcatcttactatcgtccatccttgtcactccgtatagaagagagagtccttctcttctgtttgcacatttagccaggtaaggaatttgtctttcggcacgaagatacgacttccaactttgaaggcaggaaagtcgatgcgcttcacaagctc

SEQ ID NO: 10365 - DNA, 358 bp, Unknown
  gut microbiota DNA sequence
cgggctacctcgaaaaccttccggcatcgggtgaatatccgatagcatgagtaggtcacattggtagttcaaaagaacaggcctgtcgagcgaggtctcgattgcgtcatattcgcgggtagggattcgtggcgggtggaaaggtgataatgcggcacgattgatttccatcgccagttcatcgtggaggatgagcttcaggagagtgtcaccttccttattattggtaaggaacagacattgcgcaaagaacgttgaaacgacgaagtacttgttcccaaatggctttgctccatgacagaggcgctgtgccacactcatggtggatccgatgacgatctggtggattgacgtgata

SEQ ID NO: 10366 - DNA, 931 bp, Unknown
  gut microbiota DNA sequence
gatatccgatagcatgagtaggtcacattggtagttcaaaagaacaggcctgtcgagtgaggtctcgattgcgtcatattcgcgggtagggattcgtggcgggtggaaaggtgataatgcggcacgattgatttccatcgccagttcatcgtggagaatgagcttcaggagagtgtcaccttccttgttattggtaaggaacagacattgagcaaagaaagtcgaaacgacgaagtacttgttcccaaatggctttgctccatgacagaggcgctgtgccacactcatggtggatccgatgacgatctggtggattgacgtgataccgaaacctcttgcgagcagaaggcttttcacagcggcagcatagttctcctcgctattcttcatccagtacattcttgtgctacctgtgaagtaaagaaagaagcaacaccgccctttgacgataataccgattgtgcgtgagctcttggatactgactccggggagtactcctcgatggcgacacgcaactcgtgtgcggcgtagtaatagattttgttgggatccggcacgaccgcattcgtcgctcttttggcaggcgacatgagagatggcttttgagagatgaggagcgtcgcacctgccgcattagacataaccgtcccgatggcaattgcgtgaagccgcaggatcttgtcgatccaaccagggtaaatgcgctcagagctattgactcttgaatagatcatggacaccgcttccggatccctctgtgcaacatactcgaaccccttctgcgtcaagctcattgaacgaatcacatggcgcttatgcttcttccgatatagccgcacatagccttcccgaatcgcacgatacatgaccctgcgattccattcagcgccgccaccgatccgcaccgccagctgcgtcggaaactcgata

SEQ ID NO: 10367 - DNA, 451 bp, Unknown
  gut microbiota DNA sequence
aatcactaccaatttctgcccattactcagagcaggttttggtagttgttttaatgtgatttttggcccaggatgaaagcgtttcaggtctcatcaggtagaactctgcgctgtcccgatcagacatcctcgtagcctggaggaccgtgcataggagaccgctatcattggtcagtagcatcgattcaatgacatccaaataccgcttggtttcaatgttgtcatagtcacgaatgcgcctttttccaagagcagcatcatagttgtgaacaatgcagatggcgcagctaccaaagcgctccattgggttctctttgagatagtccataatcgcgtgccgaagtggccgagtcaaaaatgcttgattatctctctgattccttttcggaagaatcgcgggaactgagatcttgagccaatcatgagtctcctcgaccttaatccccagcag

SEQ ID NO: 10368 - DNA, 244 bp, Unknown
  gut microbiota DNA sequence
atgaacaatgcagatggcgcagctaccaaagcgctccattgggttctctttgagatagtccataatcgcgtaccgaagtggccgagtcaaaaatgcttgattatctctctgattccttttcggaagaatcgcgggaactgagatcttgagccaatcatgagtctcctcgaccttaatccccagcagatccgccacctcacaatagaatggcgccgtatcatcacgaactgttctggcggtcaga

SEQ ID NO: 10369 - DNA, 582 bp, Unknown
  gut microbiota DNA sequence
tgcgggaactgagatcttgagccaatcatgagtctcctcgaccttaatccccagcagatccgccacctcacaatagaatggcgccgtatcatcacgaactgttctggcggtcagatttctcagagtaaccgaggatacttctgccgatcgaaccagactaaagagtttttgctgggggttatactgatccatacgctctaagtcgctagcaacctgaaagagttcgtggctgataccatcaaaatcagaagccacttggcgcatgacttgaatgtacttggggttatccatatcacacctcatagtttgtagatttgttctacgccgtcagaaccagtcaggactccataatcgttatcatctctgggaatcagctcatccagtgacttcatatcatctacgacaatcaaacgaacggacgcctctggcacgagtgtgcgagaggcgttgatcgatggaatattgcgttggctaccggaaatcagatcataatccttatcggctgaagagaatgagagaattgccggaggctcactcgcacaaaaatccagcacatgatctctcatctggatgaatgcccag

SEQ ID NO: 10370 - DNA, 229 bp, Unknown
  gut microbiota DNA sequence
ctgcttcattcgtaggtcaagccctcggactattagtaccgatcagctgcacacattactgcgcttccaccttcggcctatcaaccagatcgtctttctgggtccttactccttaaaggatgagagatctcatcttagggggagtttcacgcttagatgctttcagcgtttatctcgtccgtacatagctacccagctatgcccttggcaggacaactggtgcaccaga

SEQ ID NO: 10371 - DNA, 452 bp, Unknown
  gut microbiota DNA sequence
ctcgagctgtaaacagtcctccgccctcttgttataaagattcgattgagcaggttgctccggctatgccgcgtgcgcgtcacgaaccaaattgaatcgtaataagccggtgcgaaagcattgcaatattttatcaggaaagaaggaatgcccatgctcagtatcgggatcgatgtgtccaaaggaaaaagcaccgtgtgcggaatgaagccagggggagagatcgtgtacgctccgtttgaagttcagcacacaagagaaggaatgtcggagctcgtatcgctgctgcgcagcagcggcgaagaggttcgtgccgttttggaaagcaccggcagctaccattgcccggtggtggctgctttgttggagaacggaatattcgtctccgtcatcaattcgctgcggatgaagcggttttgctcacaaagtatccgcaaggtgaagaccgatcg

SEQ ID NO: 10372 - DNA, 229 bp, Unknown
  gut microbiota DNA sequence
ccgatttgtggtcaacacaaaatatggaaatcaggacaacgcctctttcttcaactgcaccgcaagcgagtacatcgccaatcggatgcagaaggccggcatcaagaagggccgtctgatcgagatcatcggtaatctgaatctgcgtccctacgagacggatgagggcatccgtcagatctctgcggatgtcagtgtcctcgagtggcactttactggttcaaagccg

SEQ ID NO: 10373 - DNA, 229 bp, Unknown
  gut microbiota DNA sequence
gacagaaagataagcgcaatgagcgaaagaacatgcacctttagctcagctggtagagcacctgactcttaatcagggtgtccagggttcgagtccctgaaggtgtaccatcccactggatgggagcaccatccagtggggaccccacgacgcaaggcatggcccgttggtcaagtggttaagacagcggcctctcacgccgttaacatcggttcgaatccggtacggg

SEQ ID NO: 10374 - DNA, 370 bp, Unknown
  gut microbiota DNA sequence
ctgcgggaaaagcgtgtcgccctcggccacaagccggacgaccatgaattcgaaccgcagagatacacgatgcagttccattgattcactaaagcacaaagcgcgcatattttgtgctgctgaagtcaataaaacatttccaaaaacgcaccgctgtaaataaagatgattctcgaaaaagtaatagctttcctgccagaattgtggtatgtatgttggctaccaaaggaggggtcaccatgtacgactacatgaaagccttgcaggaacgattcgacgaaaagcagccggagcacctcgtctacgccgtcaaatccgcccgagaggaactgcggcgggacatggatgccgcagagcgtaagaagctgct

SEQ ID NO: 10375 - DNA, 857 bp, Unknown
  gut microbiota DNA sequence
cctactccttcgatgccgacgaagagcaaaaaacaaaggagatgattacgaatggctaaaaagcgcgccaacggcgagggcaacatccgcaagcgtgcagacgggcgttgggaggggcgctacaccgcgggctaccaccccgaaacaggaaagcgcatcatcaaaaatgtgctgggtaagacacaggcggaatgcaaggcgaagctcagcgccgcaatggaggctaccagaggaatcgatgtcagccgtgcggatgagtacacggtagcaacttggctgcggagctggtatgagatctacgcaaaaccgaatatccgcatctcaacagcaaaccgctatcaactgatggtcgagcaatacacgatcccccgcatcggcaacatcaaactcaccaaactgacctcgcgcgatttacaaaagctctacaaagatctgatggaaaacggtcgcatcgaccgcaaaagcggtcacggcaatccagggctcagcagcaccacggttcggagtctgcatctcatgctgcacagcgccttggaacgggcggtcaaggagcgcctgatcctgcggaacccgaccgaggactgcatcgcgccgaaagtacaaaaaatcgaaatgcagatcctttcgcctgagcacatcaaggactatctcgaggccgctgacaggagaggactgctcccgatgttctatctggaattggtcacgggcttgcggaagggcgagatcacggcgcttctctggagtgacctcgacatccaaaacaaaaccatctccgtcagcaaacaatatgtaaagaatcccaatggcgaactgacgctctcccgtcccaaaacggaaacctcagttagaaaaatatc

SEQ ID NO: 10376 - DNA, 638 bp, Unknown
  gut microbiota DNA sequence
ccaaaaagccctttaggatcgtgtcctcggcctcttcctcggtcagccccagcgtctggagctttaagagctggtcgcccgcgatcttgccgatggcggcctcgtggatgagctgtgcgtcggtcgaattcgccgtgatggcgggaatggattcgatcttggccttgcccatgatgatcgagtcgcactgcacatggccgaagcacctgctgttgccgacgaccacggggtggaagacctgctgcgattcatcctgcgcgacggagcgggaaatgacgcggccgcgcgcatcttcaccgttgagttcgatctccatgtcgctctcggcgtgctgcttgccgtgggtgagcaggcgctccgtgacgacagcctcgacgtccttgccgcagacgatcttcgtcttgcgcacggtggagtcgatgccgcggatctgtacggtttccatctggatgctcgcgccttcgtcaaggtagacgatggtggtggggttcatcacgcgtgtgccgctgccgtcgccctcgccatagtgcttttctacgtaacgcacgtgggagtttttggagacatagaacgtgtggatgccgtcgtggcggctctcgttgcagccggagttgtggatgccgcaggctgcgcagatc

SEQ ID NO: 10377 - DNA, 3720 bp, Unknown
  gut microbiota DNA sequence
cttctgcgcggccacagggggagaacctcagtgtcccccttgcgcagcaagcccctttcatgctatgatattttcacagaaaaagagaaagtgaggagatcatcatgactctcgataaagcgatcaagtccctgatggctttgcaggccaagctcgcggcctacggccacgccatgggcctgctcttttacgacggcgcgaccaccgcgcccaagggcacggcggcgaaccgcggccagaccatgagtattttgagcgaggagcactacaagcttacgactggcggggagaccgtcgcgctgctcgaattcctcgacgcgcacaagtccgggctcaacgaaaagcagcagcgcatggtgtttttgctcatcaaggacatccgcaatatgcagaagatcccgatggacgagtacgtcgcctaccagcagctgcttgtcgaggccgacgacgtctggcaccgcgcgaaggagacgagcgactttgctctcttcgagccggtgcttgaaaagatcttcgagacgaacatccgctttgcacactactgcgcaccggaaaaggaaccctacgactactggctcagcgagtatgaggatgggctgacgatggcgcagtgcgacgaattcttcgccacgctgcgcgagcacatcgtgccgctcctgaaaaaaatcaaagaaaagccgcaggtcgacgatgcgatgctgcgcggccattttcccgaggagaagcaggcgcagctttccgactacctgatgcgcacgatgggcctcgatttggaccatgtcggcctgtccacgaccgagcatccgtttacgacgtcgctcggttcgcactttgacgagcgcatcacgacgcactatttggaggagaattttgcctcctcgatgttctccgttatccacgagggcggccacgcgctctatgacaccggcagcgcggatgatctcgcctatacggtgctcgacggcggtgtctccatgggcatccacgagagccagagccgtttctatgaaaatctgctcggccgctcgcgcgccttcacgggcttcgtgttcccgaagctctgcgagttgttccccgagctgagcggccacacggcggaggaattctaccgcgccatcaataaggcggagccgtccctcatccgcaccgaggccgacgaggtcacctacagcctgcacgtcatggtgcgctacgagctcgaaaagcgcgtgatgcacggcgagctcaaggtacacgacctgccgggcgagtggaaccgcctttacaaggaatacctcggcgtcgacgtgccggacgacaaacacggcgttttgcaggacagccattggtcgggcggcagcatcggctatttcccgtcctacgcgctcggcagcgcctacggcgcacagctgcttcgcaagatgaaagagacggtcgatgtggacgagtgcctcaagaccggcaattttgcgcccatcaatgcgtggaaccgcgagcatatctggcagtacggctgcctcaaaaagcccggcgcgctcttggagcaggcgcttggcgaaaagttcgacccgacggtctacacgcagtaccttgaggaaaagtacggcgaaatttacggtttgtaagagcggaatagcatcaaaaaggcggtatccgaccggatatcgcctttttgtgcgtgaaacgtggaaagtccattgcattgtaaccgcatttccgatacaatgggcggagagaagcgggtaacgagcggaggagagaccgcacgcccgcaatgagagatgggagagcaaaaatgaatactgcgctgtatgagacctacgttcagattttgcatgaggagcttgtacccgcgatgggctgcactgagcccatcgccgtcgcctacgcgggtgcgcttgcgcgccaaacgctcgggacacttcccgagcgcatcgagctgaccgtgagcggcaatatcatcaaaaacgtcaagagcgtcatcgtgccgcacaccggcgggcgaaagggccttcccgtcgcggtcgcggcgggtgtacgcgtcggcgacgccgacgcgcagttagaggtgctggcgaatgtgacggaggaccagctgccgctgctggacgagtacctttccgcggcggagattacggtgagcaaatcgccgctgcgctgcccattcgacattcaggtgcgtgttttcgcaggcggggacacggccttcgtccagatcgtcggcagccacacaaacgtcgtgcgcatcgagaaaaacggcgaagtgctgctcaacaagcccttttccgaggaggcggcccagccgcccgagagccgcaggagcctgacggtcgaggacatcatcgtctttgccgacgaagtcgacttaaacgacgtccgcgcgcccatcgcgcgccagatcgaatataacacggccatcgctgaggcaggattgacagggcagtacggcgcggccatcggaaaaatcttgctcgattcctatggcgacagcgtgcagaaccgcgccaaggcctgggctgccgcgggctcggacgcgcgcatgaacggctgcgaaaagcctgtcgtcatcaactctggcagcggcaatcagggtatgacggcctcattgcctgtcatcgtctacgcgcgcgagctgagagcgagcgaggagcagctctaccgcgcgctcgtcgtgtcgaatcttgtcaccatccatctgaaaacgggcatcggcagcctttccgcctactgcggcgcgaccagcgcgggcgcaggggccggggccggcatctgctatctgtacggcggacgctatgatgagatcgcccacacggtcgtcaacgcgctcgccatcaactccggcatgctctgtgacggggcgaaggcgagctgcgcggcgaagatcgcctcggcggtcgaggcggggctgctcggcatgcagatgtaccggcacgacagccagttctacggcggcgacggcatcgtcgtcaagggcgtggagaacaccatccgcgccgtcagcagcatcgcgcgcgacggcatgcgcgagaccgacaacgagatcatccgcctgatgatcggggaggaaactgtcaaatgaagatacttgtcacaggcttcacgccgttcggcggggagcagatcaacccctcgtgggaggcggtgcgccggcttcccaaccgcatcgggggagcagagctcatcaagcatgaaattccgacggagtttgacgcctccggtgctgcgctgcacaagcttttgacggagctgcgtcccgacgcggtgctctgcgtcggccagtacggcggcgcaaattgcatacgcgtcgagcgcgtggccatcaacctgcgcgacgcgcgtatcgccgacaacgcgggtaagcagccgacggacgagccggtcgtggccggaggtccggacgcctattttgcgacgatcccgacgcgggagatcgtcgacgccctgcgtgagcaggggattcccgctcagctctcgtactccgcgggcacgttcgtgtgcaacgatctcctttactgcgccctgcacgagagcgagcggagcaatccagccccgcgctgcggctttgtccacgtcccttacctgcccgagcagaccaaggacggcaacgcgccgagcatgggtttggaaatgatggtcaaagcgctgcatattgcggtggaagcgatcgcagaggaagagaagcagtgaactgaaaataagaaagcccgcggcaatgattgataaaaacgatctttctatctc

SEQ ID NO: 10378 - DNA, 235 bp, Unknown
  gut microbiota DNA sequence
aggcctatatactgcctttctcgtgcctacgatgctgaccatgttttccacacgcgcctttgctgctgacaccatttggacgaaggcgagtgcaatcatgcaggatgtgtacacgcaaatcctcggcatcagcaccatcgcagctgttgttactgcggctattgcgcttcttctgatgaacttctccagatctggacgaacggttgatgagtcccgtgcatggttaaagcggatc

SEQ ID NO: 10379 - DNA, 530 bp, Unknown
  gut microbiota DNA sequence
tggaacgggaattgtccacgatgcggaaacgggatggcgaactggatgtagtgttcaagcggatgtatgaggacagcgccttgggacgggtgagcaatgagcagttccgtttgctgtctgaggcatactccaaggagaaagcgcagctggccgaagccatccctgccacggaggagcgcctggagaaactacgcagtagcatggccaacgccaagaacttcatcgccaaggccagaaagttcaccgacatgacggaactgaccccggaactgctccgcacctttgtggcgaaaatcatcgtgtatgagaaagaggtcaaatactccaagcacgcaccgcagaagatccacatctgttttcgggacttcaacctcaacgagacagacgatatgcttctatgcggagagacaacagaaaaggcagacagtacaattgcactgcctgcctaatccgaggacacgcttcaaggtacccctatcaggagtagcggaagcgtgtcttttctttttggaggtgacacccggatttga

SEQ ID NO: 10380 - DNA, 1017 bp, Unknown
  gut microbiota DNA sequence
tcaacgtcaatgcctacgacctgattatcggataccgtgccgatgactcctattttgactttgctgcgtctttcctaaataacggaatttccgtacagcaactcgcaaacgctaagcgacttggcaagttgggcgaacagattgtcatcaagtctaaatacgccttttcgctgctgcattacgatggattttctattgcagaaaaggaaaaatattatgtccgccgtaaggctcgaaatgatgaagccgaccaactttattcggatatacttgaagaggaaacagatggtctgtatatccttgatatcataagaggaggcatccaaaacgatgacccacgcataccaagaaatctatctgagtaacgcgcaggcattactgggcgatgcttttgattatgctatcaacgcgtgtggagttgccggagatagctttataaagctgttttccgtcagttccgtcagtaatcggattgagaatggtgaaccttcatatctttttgggaaaagcgggattgaaactgctgttgatgttctcgttgagactacgggcaaagcgccgaccgccaagcctcaagcgaatttcagccgttccagagagtattggatcggctgggcagtcgcctactatcaatggttctccggaagaaagttcagtgatatttttaaggttctttcgtttgaagatttgcagcagatgtatttcccccttcatgaagcggatgtcactaaattcgctgatattgtcgatgccaaagtgcgcgaatacttcgctgacaccaacctcaagcgtatccgcatgctttatggctgcacgcaggcagagcttgccaagcgaagcaatgtcagtcttcgctcaattcaaatgtacgaacagcgcaacaaggatatcaataaagccagcgcggagactgttcttagccttgcaaaagtcctcggttgtacgatggaggatcttctggaaacgtaagtccgtaacaaaaagggtagtctttcccttaaaaaactacatgaatta

SEQ ID NO: 10381 - DNA, 229 bp, Unknown
  gut microbiota DNA sequence
cgtcgacaccagcatcgttaaaacatacgcctggatcagcgcgtgcagcagcgtgaacatcacgcccacgatgaccggcagcacataggaaagcgccgcgtagtaatacacaagctccgtcacgagcgcgccggaaagcagcgcgccgaagagtcgaaagctcatcgagatcggcagcgagaaatccttgagcgcgtgcagaaatccgcccacgcccgcggcgatcagt

SEQ ID NO: 10382 - DNA, 449 bp, Unknown
  gut microbiota DNA sequence
acttaatagaactcggttggaactttaggctcattatattctgcgaattggaacttgtcaataggaacttttaggaacttgatggaactatttcttgaaggttatggacaggaggtatgccgaatatggaaggccgagttgtattgcatagtgacctcaacaactgctatgcgagtattgaatgtatgctgcatccggaattgcgtggaaagtacattgcggtttgcggcagcacagaggatcgacatgggatcgttcttgcgaagaaccaattggcaaagcaatgtggggtgaagacaggtgaagtgatttgggaggcaaagcaaaaatgtccacaactgacgattgtagaaccgcatatggaacaatatctgaaattctccaaaattgtccgctctatctatttgcgatactctccggaagtcgagtcatttggcattgatgagagc

SEQ ID NO: 10383 - DNA, 286 bp, Unknown
  gut microbiota DNA sequence
gatgcaaatggacttttatcagacagcgaagtgtttgtatgtgccacctgagttactggacttcaagctccggattctacaatgccaaggtgtaagaatcatagctccgtatatcgcgcatggggatttcctcaagcgagatctggagcagccgttgagttaagtatgctgtcaggtgaggcttataaggtctatgtgagcgtttttgtagagcatcgttcggatgggacaatgctgcctagggaaatcatctgggaggatggccagaaatatgaaatagaccgcg

SEQ ID NO: 10384 - DNA, 229 bp, Unknown
  gut microbiota DNA sequence
cggctttgaaccagtaaagtgccactcgaggacactgacatccgcagagatctgacggatgccctcatccgtctcgtagggacgcagattcagattaccgatgatctcgatcagtcggcccttcttgatgccggccttctgcatccgattggcgatgtactcgcttgcggtgcagttgaagaaagaggcgttgtcctgatttccatattttgtgttgaccacaaatcgg

SEQ ID NO: 10385 - DNA, 12564 bp, Unknown
  gut microbiota DNA sequence
ggcgcgctcgccatcgccgagcatttgaaggcgcagggcgtgacgctcgaattcgttcttgacgagggcggctgcaaaattgagcccggcacggccttcggcgcgccggagacgtccattgtcagcgtgcagctgatggaaaagggctatgccgatttggagctctccgtccacagcatcggcgggcattcgagccgcccctacggcggcacgtcacttgggcgtctctccggtgcgattgccgacatcacgcgcgcaccgtttgccgtgcgcctcaacagcgccatgaccggcgcgtttgaaacgctcgcgccctatatcacgcaggagccgctcaaaacgctcgtgcaggatgttgcgggcaacgcggacgccatcgcggcctgctgcatgggctcgcccgacctcttcccgtttgtcaccaccactatcgcgcccacgatgatccgcggcggcagcgccgcgtgcaacgtgatgccgcaggatatgaccgcggtcatcaacttccgcattgccgacggtgacagcaccgagagcgtcatggcccactgccgcgaggcagtgcaggataagggcgttgagatgcgttttttgcaggccaacgatccctccgccatcgcgcgccgcgacggctacggctaccgcacagtggtcgagagcttccagcgctactatcccgaagccgtgttcattccctcgatggccgtgggcgcgacggacgcgcaccgctatgaggagatctgcgacacgtgcctgcggtgcagcccgtttatgaccgagcccgcggaggccgcctccggcgtgcacggcacgaacgagcgtcttctcgtccgctcgtatttgcagggcatccgcgtactcatcgacctgatggagcacgccaacgtggaaccgtgaatttcctttcttttcaatgaaaaagccggagcagctcaggctgctccggcttttctttcctgttcagttctcgcccatcgtgtagaccatatcccagaagcgcaggtcaaaaaggcagcaattttcgaagatctcgcagagccgctgcgccttcttttcatcgatcacttcggcgagcgcgtcgatccggtcgatcaaggcctgattcgtctgccggtactcctcggaaacgtagcccgcgaaccacgcgccgtagttctcatcgtgcagggcgcttgggcagcgctccaccatctgcccggcaatatacgcatagctccacgagcagttcaaaagcgtcacgagccccgtcagcacatcccccgcctgcgcctcgcagagcatgtaatggctgtaggcgctgttgtcgatgtgcgggcgcgcatcggcgatctccttctccgtgacgccgaggcgcttcatgtacggaagatgcgtgcggaacgtctcgtcgatcgtgttcgccatctccccgctcaaaaagcggatctgctcgaagtcgtcggttttctgaaggatcgccgcaaaaattttcacgtaatcccgcaggtacagataatcctgcaccatatagtagcggaacttttccttcggcagcgtgccgtccgccatctccgtcacaaacggatgggtcagataccgcggccagagcgcctttgcccgctcgtagatcctctcggagagcttcactctgttctccccgctcatttgtgggcgatgagcgcgacgtagccgccgctctgatagccggggacgacgtcctccacgctctcgttggtgtacatagggttcttcaagagcgtctggtagaagtcaaaatcgtggaagccgagcgatttgagcgcgtcgaccttttcctcggtcgagtgccacacgcccgcgcagcacagctcgagcggatacggcagtttgggcatgacaccgcgcagggacgggtggtcgaacgtgccaacggccttggcgagaaggtacatgaagccgaacgcgctctccttgggcacatccagcgaaatgaacttgccgttcggcttgagcgcctttttgcacacgttgaatgcgcgcgtcaggtcctccatatagctggagctgccgttcaaatagatgatgtcgtaggcgttctcctcaagctcgacctcctcgatcgcgccgaaggcgatgacgttgatgccgcgcttctgcgcgatcgcgcccatgtcgcgcgagggctcaacgccctcgatgttcttgcagtcgatcatactctcgaacaggccgctgccgcagccgacggagagcacgcgcttccccgaaatatcgccgagcgccttttcaaacaggcggaattcgctctggaacacgttttcgttttccataaaccaggcgtcgtactgcgccgcgtagccgtcaaatttgggtttcatcgtcaagtgatcctttctgttttgtcaattttcaaggtcccgcccgccgtttccgcttccctattatcctgcgccgcaggacgcgggaaaacaggccgggcctgtgcctttttgatgaatcataccacaatcagctcactaccgcaacggtatgtttgcggtaaatatccatcacctttcgcccgcgtacacggcagttatagagttcgtgtcacccaatagattgaatcggcaatgagaaaaagatggattccggctgcaattcacagatgggaggaatgcatagggaaggcttcattacaaatgttctcaatttataaagggtacgataaagggtaaatggcacctcagggcaataaaaaaccttgaagccactgaatcttcaaggttttttctggtgcgcggtacaggactcgaaccggcaaaaaggtgttttagatcgtccctgcctatgccaaccggtaccataatgtggggaagtcatgcgattttattgccatctcatgttagttaatcttatctcgtatcaatgcagaaaggctaaaaataaggctgaattttagctgccgcacaggacatgcctttttcgtcagaagcccgctacctgctcttgatcttagcggtgtcatgtccaaaaattgaaaacaattcaaactcgtaggagtgttccatatagttcaaacgatgaaggccattgattttactcaagggaatactcctcgcacggctttattgttgtctccggactacgcatactacacctgaccttgcagatgatgtagtattgcatatgagggtccgcgcggcagcgggatgcccgagatgttctataccggcgaggccatctgcgcagacccggcgcttgcttccagcgtagctctcatcaccgacgggcgcttttccggcgcaagccgcggcccggtcatcggccacgtcagccccgaggccgctgtcggcgggccgatcgcactggtggaagagggcgatctgatccgcattgatgttcccggccgcgtgctggcgatcgtcggcgtgaagggcgaggaaaaaacgcccggcgagatcgacgccattcttgccgcgcgccgcgcgcgctggcaggcaaagccgcccaaatacaaaaaaggcctgctcaagcgttataccgagcatgccgtgagccccatgaagggcgcctatatggaatgatcctgaccggcaaaaaatgggatgtaccgcgcggtacatcccattttttatcattttttcagcttttccagctcgctgagaaggccgtcgccgaccgctttgaattcttccgcgctcagcgtcaccttcggcagcgtatcggtaaagggtccgccacactgcaaaccgtcccgatgcttcggaacgaggtgcacatggaaatgcgaaacgatatcgccgtagatcgcgtagctgatcttatccgccttcgtgtagttcgcgatcgcgtgcgccatgagggaaacctcggcaaaaaaaccgctgcgctgctcgtcatcgagctcgaacatctcgtcgtgatggcctttgagcgccacgacgcagcgtcccttgtgcttctggtcgttgaaaagataaacatccgatcactgaagctcggtcagcggcgtcatcagcgccagcagcgctcgtccttttcgcagtaaaagcagttcatccgccttaccgctgcactctgccggtgccgtcgccgcccatgagcttcgtcacgtcggaaacattcacgcggttgaagtcgccgatgaccgagtgcttcaggcagctcgctgccacggcaaactccagcgcggactgcttgtcctcatagtggttgagaccgtagagcaggccgccggcaaagctgtcgccgccgccgacgcggtccacgatgtcgcgaatctcgtacttcttggaaacgtagaagtccttgccgtcgttcaggcaggccgcccagccgttccaatcggcactgtggctctcgcgcagcgtgatggcgatcatcttcatatcgggatacgccgcgagcactttgtcgccgagcgccttgtactttgcgcggtccagctcgccggactcgacgttcacatcgtccacggtgatctcaagggacttctgcacgtcctcctcattggcgatggccacgtcgacatactttgcgatctcgcgcatgacctcgctggccttcttgccgtacttccagaggttcttgcggtagttgaggtcgcaggaaacggtgatgccgcgcttcttcgcctccttgacagacgcaacggaaagctccatcgcgctctcgctgatggcgggcgtgatgccggtgatgtggaaccactccacgccctcaaaggccttgtcccagtcgatatcgccgggcttggccagcgcgatggcggaataggcacggtcgtagacgaccttgctcgggcgctggttcgcaccgccctcgagatagtagatgcccatgcggccctcgccggtgacgatgcgcttggtatccacgtcgaaacggcgcagctccgccttgcaggcgtccgcgatggcgttatcgggcaggaccgtcaggaacgccgcgtcctcgccgtagttggcaagggagacggccacgttggcctcgccgccgccgaaggtggcctcgagcatcggggactggaagaagcactcctgtccgggcgccttcaggcgcagcatgatctcaccgaaagtcagaaatttcatcgttcgttcctcccttacttctgcagcaggtggacggcaaagccgccgaattcctgcttgagatagaccgcgaccatcttctcgcccttgtacttggcggtggactcgtcaagcgtgaagccgttcttggcaagctccgccgccgcgcggggaatggaattggtcttgaccgcaatgtggccgttcttgccgagataggggctcttcatgacctccacgccgctgccggcgaagttggagctgttgccctccttcacgccgaagccgaaggccgcgtcgagcgcgcggcacaccgcaagggactcctccgcgtcgccggcgttcacgccgacgtgcgcgatctcaaagccgagcgcggtcttgcgcgcctccttgcagaggctcgtgatcttgtcgaagttgtgcgcggcgatgtccgccttggcgcacagccagctgccgccgacggcatggatgaacggcgcggagatatactcggcaaggttcttgtcgttcacgccgccggtggggatgaacttgatgccgccgaagggaccggagagcgccttcattgcgctcaggccgccgtagacgttcgccgggaagaacttcacgaccttcaggccgtgggacatcgcggccatgatctcggtcggcgtgacgcagcccggggtgatggcgacgttgttctccacgcaccagctcacgaccttctcgctgtagcccggggagacgatgaactttgcgccgcaggcgacggccttcttgcactgctcgagtgtgatgaccgtgcccgcgcccacgagcatgtcggggcactccttggcgactgccgtgatggaatcggcggctgccgcagtgcggaacgtgatctccatcacgtccacgccgcccgcaagcagcgccttagcagtcggcaccgcatccgccgcgtcgtcgagcacgacgacgggcaccactgccgcgttatagagtctttccaatgctgtcatattttttacctcccgcccttttcgggcaaacaaatggaataattacaggtgattgaccggatagcgaggagttctcccttccagtacgtccacaacgttctgcgccgccttggtcttgagctccgttacgccctccgccgtggagtaggccgtatgatcggtcagcacaacattgtcaagctggcagaagggcgactgcgcgccgagcggttcgtgattatgcgtatcaagccccgccgcaagaatgcggtgtccgcgcagcgcgtcgagcagatcctcgtccttgacgagcggaccgcggctgacgttgatgaggatcgccgtcggcttcatcagtgcaagcgtctccttgcaaatcatgccgtttgtctcagcattggcgtgcagatggagggagatgatatcggaaatgcggagcagctcctccttttccgccttgcgcacgccgatctcagccaactgctcagcgctgatatagggatcgtatgccacgacctcggcaaaaccgaagccgctgaccttgcggatcagcgcgcgcgcgatgcggcctgcgccgatgacaccgagcgttttgcccttcagccggaagctgtctgcctgaatgttccatttcccctcgcggacctcgcggtcgcgcagtgggatatgacgcagacaggaaagcatcagcgccaacgcatggtcggaaacatcctccatgcagtaatcgggaacattggtgacctgaatgcctgcggcggtcgccgcatccagatcgacattctcaaaaccgacaccgtagcggctgatgaccttgcattttctcaaccctgcaaccgcctcggcggtcataggtgcaaggtcaagcagtacggcgtccgcatccgcacactgtgcggcgatatccgcagcgctttcgcagtggcagagcttcagctctgcaccggccttttccagaatggcgcgctcgatctcatagctcgcatggcgctcatcgctgacacaaacaagatattttgccattgcttcctcccgccttcacttgacaagatagccgccgtcaacggggatgaccgcaccgttgagatagtcggaggcgtgggcacggaaatccgccgcaaccttttcaaccttatcgctcgacccgaagataacgacggaagcacccgcttccatcagtccctctgccatgccgtggccgagaccgcgggtaccgccggtcacgatggcacgactgccggtcaaatcaaataaattcgtcatacgaatgctcttttttctcaaaatcagcgcgcggaattgaagttttccagcgcaggatccagcacagcgaggttatagctgcggctggaatgactgtgcgcagcaagcgcccacagataggcgttgcgcgtgccggggctcgcgaccgtcgggtgatcgcccacgggagcctccaccatcgtgccggagtgaacggtgtgggtcacgatatcctcgacctcgccgctcttgagatagctgatgtggaagccgaagtgcggcagcggcataccgaagtagcagtagacctcttcaagatccttttcgtgctggtgcggaggccagctggtccatgcgccctcgccgccccatgtaaggccgcagatcaggcgggacgcctcatccttgtccgacagggtcatcatgacctcgcgctgaccgatgccctcgccatggatctgatggatgtcgcctaccggctgggagaggtcaaagctgcggaagaacgcatgaccgataccctcatgatctttctcctcttcttttgattggttggtgaatggctttgtgctgttgtctgatgtattttgcaaattcagaatacatcagacaactctgttcgtcaatagttaatatttagttcacaatgttttctgtatttcgtctgatttctttgcgcattttttagttattttgcaaaaacgcacacaaatttcgttaggcatacgaaatctctgtgcgttagttgtgtgatgactcaaggtgtggtgcgctttcagcgcttcgccgcgcagttatcccgagaatgaaccatggaattgcggctggtgttcaggtgcgcgatcatgctgtactttgccccctccgggtcatggcggcggatggcgtcgacgatacgctggtgttccatgccgctctgggagcggtgctcatcgttcgtcaccgtgatcacaacgccgatcgccgaggcgatgatcgggatgagattgggcagcacatggtttccgctgcattcggcaagatactggtggaactttgcgtcggcggcggaataattctcctccgcttcgatcaggcgcgtcgcctcatcgcagtatgcctgcatctggtcgatctgctcgggcgttgcgccgcgcgcaacgatcgcgcaggtctccggctcaagcatcaatcgaatatcctgcaggtcgagcgcgagattctccgagccctcttccatcataaacgtcagtccgagcgggtcttccggcacgccgttcttctccgagacaaacgtgcccgcgccctgccgcgccgttaaaatattgcgggcaacaaggcgcttaatcgcctcgcgcagcgtgctgcggcccacgcccagctcgcgcgccagatcatactcgttcggcagcttgtcaccggccttcatatcgcggtccaaaatgacctgaatgatctgatcgactgcaagatcgacgcgcgtttttcccccaaccgcttttttcatactctgccttctttcctgtatcgattgtttgtttggtctagagtataatatgtctgatgtattttggcaagttcttttttatattcttcttactgccgagcggatccggggctttcacttgttagaacgtacactcatcgggcgcatcaacaaagcaggcgaccctgcagagctgtagtctgcatagtattgtcgacccacgactacgcaatactacacctaaccttacctgtgtagtattgcgtagccgtaatgtaaaccagtttctctctggcccttccttatgttcgcaaacgcctacactatgcgcaattgtccgaaacatcggcgcaccggccacacgcttccacgatctgcgtcatactttcgccgttgcctctatcaagagcggcgacgacattaagaccgtgcaggaaaatctcggtcacgccaccgcagcgtttacattagatgtttacggacacgttacgaagcagatgaagcaggacagtgcagagcgtatggagcagtttatcaagagcgtttcggatgcttgagggacaataaggctaaaaatacggctaaacagggtttcagggcaataaaaaaaccttgaagccactgaagcttcaaggtttttctctggtgcgcggtataggactcgaacctatgaccccatgcacgtcaagcatgtgctctaccagctgagctaaccgcgcgaatcgaacagtgatatactactatatccgcattcttttgtcaacactttttttcaaaaagtgcggattttctcttccccccgtgaagagactgtttatagcatacgctaagagttcgctgatgtaaagaggggaaaatagcagaaattcgccgccgtttttcatctatttttctgcgggcacatttcttgtcaagccgccgtacgttctatataataggcatatattatgtgtaaattgaaaatggggtgctttttacgatgggacaaatcggttttgataacgacaaataccttgccatgcagtccgcgcacatccgcgagcgcatcagcaagttcggcggcaagctgtacctggagttcggcggcaagctcttcgacgactttcacgcttcgcgcgtgctgcccggcttccagcccgacagcaagatccgcatgcttcagcagctgcgcgacgacgtggagatcgtcatcgcggtcaacgcgaacgacattgaaaagaacaaggtgcgcggcgacctcggcatcacctatgatgacgactgcctgcgcctgattgacgcgttccgctcgctggggctttatgtcggcggcgtatgcatcacgcagtacgcggggcagaacgcggcggatgccttcatcaagcgtctcaacacgcttggcgttcgcaactaccgccactaccccatcgcgggctatccctccgacgtcgcccacatcgtgagcgacgagggctttggccacaacgagtatatcgagacgacgcactcgctcatcgtcgtcaccgcgccgggccccggcagcggcaagatggcgacgtgcctctcccagctctaccacgagcacaaacacggcgtgagcgcgggctacgccaagtttgagaccttccccatctggaacctgccgctcaagcaccccgtgaacctcgcctacgaggccgcgaccgcggaccttgacgacgtgaacatgatcgacccgttccacctcgaggcctacggcgagacgaccgtgaactataaccgcgacgtggagatcttccccgtcctgcgcgcgatcttcgagcgcatctccggcaagtgcccctaccagtcccccaccgacatgggcgtcaacatggcgggcaactgcatcatcgacgatgaggtctgccgtcgggcctcgcgcatggaaattctgcgccgctactacaccgcgcaggtcgacgtcgcgcgcggcattgctgacgcctgccagctcagaaagctcgagctcgtcatgcagcaggcggatgtgacgcccgacctctgccccgctgtggccgcggccaagcagaaggccgaggagaccggcgcgcccgcgggcgcgatggtgctgcccgacggccgcgttgtcacgggcaagacctcttcccttctcggcgcttcggcggcgctgctgctcaacgcgctcaaggccatggcgggcatccgcagcgacatgaacctcatctcaaatcaggtcattgagccgatctcagcgctcaagatccagtcgctcggccaccacaacccgcgcctgcactctgacgaggtgctcatcgcgctggcgatctcggcgctgacgaaccccctcgccgacatggcaagagcccagctcggcacgctccgcagctgcgatgcgcacttctccgtcatcatctcggaggaggacatcaagctctacaagcgcctcggcattcacgtcagctgcgagccgaagtatgaatccaagcgtctttatcacaaataattcggagaaagcaacatcatgtctaacgaaaagaatcttccctatgccgtcgtctgcggcggcgtgaatatcgacatcggcgcccattccttcgctcccctgcgcgaccgtgactccaatcccggccgcgtcgagctgagtctcggcggtgtggggcgcaacatcgcgcacaacatgcgcctgcttggcgtgccgacctaccttctgaccgccgtgggcggcgattcgcgcgcaagccaggtcgaagagagctgtaaagaactcggcatcgacctttcgcacgcgctgcgcgtgcccgacggccgcacctcgacctacgtgttcgtgggcgacagcgacggcgacatggccgtggccgtatctgacatggaaatctgcgaaaagctgacgccggactacttcgcctcgcagaaggagctgctcgacggcgccgccgcggtggtcgtggacgcgaacctgccgcgcaagtccatcgcgtaccttgtcgagcactgcgccgcgccgctcttcgtcgatccggtgtccaccgtcaaggcagaaaagctccagggcttactcagtcacgtccacacgctcaaacccaaccgcattgaagcagagctcctctccggcgtgaagatcacagacaatgcaacgctccatcaggccgcgcaggcgctgctcgatcagggcgtgcagcgcgtgtttctgtcgctcggcggcgacggcgtgttcgccgcgcagcagggcgagacgcatttggagcccatctgcaaggccgagatgcgcaacgccaccggcgcgggcgacgcgatgatggcgtccctcgtctggtcgtttctcgcgggccgcgaccttgccgaaagctgcgccgccggcaccgccgccgcggccatcgcggtcgagagcgaagagaccatcaatccgaacatgagcgccgaggccgttctggcccgcgccgcgaagtaaatttctacgacaaaaaagaaccgtccgatcggacggttctttttttgcttattttctcagattcagcagcatcgcgacgtggcgatagaggcttctcttgaccgcgggggtcatgctggcctccctgatgggcatggcgagctttctgagctcgtcctcggcctgcgcgatgacctcgtcatccgtggcgtcggagtcgatcttcgccgccgtctcagccatcacgaccggatggggcgcgaccgcgcccgcagccagacgcgcggggcgattgccgccgcagcggagcgcgaagttgatgatcgggaagtcgatcgtcgtgcgcatggcgtacttataaaagccgctgcgctcgccctcttccgccgcggggacgagaaagcgcgtgacgaggatgggcaggtgctcgtggcaggcaaggccgttggccacaggtgcggctggttgaagtagatgcagcgg

SEQ ID NO: 10386 - DNA, 229 bp, Unknown
  gut microbiota DNA sequence
gaaagcagattggaaagatacatcaacctatcaaagttgaattccatcagccgatttgccgcaagcagtattcttccctctggtacggcggcctggtggtatctatcaaggtgcacgggtgtgtttttgccattcacgcctgcggagatatctacgccacactttacgataagagtgatggtacagaattactctatgtcaaagataagagtaactctggacgttttgg

SEQ ID NO: 10387 - DNA, 474 bp, Unknown
  gut microbiota DNA sequence
gaatgcatcagcgagtacaagcgcggcaaaggccgccttactacaggtgagtatccgaccgacccggtcgcgtaacgcctcaaattatgaaagggttaaaaccatgaaaaagcggatcacatcattgatgctcattcttgtcgtcgcagtatccatgacgatgggagcgagcgcggcatcgtacattccggacgatgtcacctaccagaatctgaacggccagcagcttgccatcaagacctatacgcttcttccagatcaggatccctccgacctgtatgaagacgacttcgagtatgacggattcctgtattctatgagcgatattgtcaaagaagaacagcgctaccaggaagagaacgcacataccgaggttgtcactgtcacaaccgcaagtaagaacctcgaagatatccttgttgagctgaaacctacgatcgagtacgatgacggagtctcctccggcacactttc

SEQ ID NO: 10388 - DNA, 433 bp, Unknown
  gut microbiota DNA sequence
ctacatcgataagaccgtagagaagaatggcagaactttgagcctctccaatgtaacttggagcgttgagagtactgctctggtcggcgatgagctcgccccggcaacttactctgcggtagccacctattctggctctgccagttctaccgtcgcaactggctatattacgaccgccgaatacaaaggcactgtcgtatcctctggtatttccagcattctctataccgtaacctacctgggcaccaagattgaaccgacgaaagcggaacccaccttcaaaggtgcggtcttggtgatctccattatcggcggaacggcccttttggccgcactgttgttcctcggcctcacgcttcgtaagaatactacagtctacaaagcaacaggcaaaggcaacgaatatgaaaaatgcggccggcttcatctgaag

SEQ ID NO: 10389 - DNA, 794 bp, Unknown
  gut microbiota DNA sequence
cctcacgcttcgtaagaatactacagtctacaaagcaacaggcaaaggcaacgaatatgaaaaatgcggccggcttcatctgaaggtcaagaatcccgagctgcgtattgaccgcttgaaggatattcctgaaggtgtgatcgcaatcgaagtggatcaggcagtcgcaaagaagctcttcggccagaccatcgccatccgttgctatgacaatactgtcgagcacaccgttggcgaggtcaacggttcgtactggttcaaagtcgatattggctctcaggaaggtgaatccaattatgaggaggaaccttaatatgaagctcaatcgacttttgaccctgtactgtgcgctgagtatggcactcggcatggtgactttcgctagtgccgcagactattccttcaaaacctctcctgaccctgtctattacggcagcacgaactacgaggatctctacgacgctgagtatcgttacggctcacgcaatcagatcgattacgacatccctgagatccaatacggactcagtcaggaattcttggaaagctccctcaataatccctacctgaatggcaacacacagtacggctttggcgggagcagctcgagtacgcagtacccggagtccgacttcggtagttccagcatcatctccggcggtggtacgatcgagatgccatatgaaccctctgtcaccttgaacgatctcaagcagagcgatggcagtatcggccaagtctccattgaccgtgtcgggctgaattgcaaagtgtatgaaggcgccaccgacagt

SEQ ID NO: 10390 - DNA, 1712 bp, Unknown
  gut microbiota DNA sequence
gccggtcattacagttcttccggcctctacaccgggaatgttggcttgttcggccacaacagagggaatcatccatacttcggaaagctgaagaatgtgaaggatggggacattgttaagtacaagaccgcaatcggcacgaagacctacaaagtgacattcgttggtgcgatctcctacacggatttctcttacctcaatgagatgggagataatcgcatcaccctgatcacctgtattgctaaccagccctctctgcgtctgtgtgtgcaggctgtagagattcgataaaccattggaggaaaaccatgaacagtaaaaagcctcgcaatcgtgagaatcgcacccgatccattcccgcagaagctaccgtaaccgtccatatgcttctgccgcgttccgcttatgaggagatgcgccagcttttgagtgaacacaggctctccaaagcggatatcctcatggcaggcatcgcagcctgctcgaatcagaaagttggctgaagaacacgcgtagagagtggctggaaaactatcttctacgaggtgactcacatgaaaaagcgtttcattacattcctctccggcatggttgtcggcgcagtcatgtttggcggcagcgttgcatacgcttccggcattcttgccgatctcagcaacaatcagatttttgtggatggcacacttacccccatggaggcgtatgtgatcaacggccacaattatgtgaaattgcgtgatattggccaagctgtcggttttaacgtcttttgggatgatactgccaaatgcgtccaggtcgaatcggacaagccctatactgggattgcgcctacaaagcaagagggcgagaagacaagtggccagctccaccagactgatgttgatgccataaagaaggatgtcgttacccgtaccaacaccctgcggcataataagggagttgctgtattggaggttaatagccttctgatggatgcggctcaagtccgcgcggatgagatggcggcaagtggtgcctattctcacactcgccccgatggacgcagaagcaataccgttacagatagccggcgcaccggcgaaaacatccactgcatcacagaactgtacctcgaacaacagcacaagactttatctgatgccgtcgtcaatctttggtcgaattccaagggccatgcggataacatgctgaatgttcgctacggcgagattggcgttggtttagcgcgtggtacggacagtaatggcttggcgtcttggtactgtgtgcaggtcttcctcgtagacggatgcgaggtcacatgggtggacgttcccgcaataggctgatcaatgattgcctctgcggtggatcaatccattcgaaaatggtcagttcgaaaagtgaatcattcaacgaagcaggttgaggaaactcgacctgcttttcttgtgttacaaatgaaggagatctcttatgaaatcaatcaaaactagacttgtctcagcattcttgctgattatgacaattctcagcctgtttccaaccacagcattcgctgcatccagcacaggcaaaggcatcacgatcacaaagaaccagaactactggagcacccgcctgctcgccaacggtaccccgtacagctaccgccctccgctggcagacggcaagctcgtgtactgcatggacagcggcctcggctatcattacgccacaaaatcatttct

SEQ ID NO: 10391 - DNA, 1448 bp, Unknown
  gut microbiota DNA sequence
ccggtggagacggcgacgcgggcggctatgccaacgccgacacctacgagctgtatctgagccttatcgactccctccttgcaaagaaagcagctgaggatgccgagttccagcgtcagatcgaggagtacgctgcgcagggcattgctgcaaccatcgtggaggatgagagtgcaagatgggcggtgtatgcgatctccagcaaccgcaaaaatcagtcattctttaactattatggaccgcgcaagctcgtaacgagcgagcctgcgcccgaccagcccgagcagcctgcgggcggcatgggcaagatcgtgctgaaaaaaaccgccggtgggaccacaaccggtctcgccggtgcccgtttcagcatctactttaacggtcagatcgtcggcagcgacatcaccaatgcgcagggcgagatctatgttgagaacgccgccaccggcctttggagcttcgtggaaacctctgcaccggacggcttctgtgttgatcccacgcccaaaagcgtttatgtagatgtgtccgagggcgaccgcgaatacagcgttgcggcgactaattatgagctgcccgatatgaagatcaccaagcgcgacgccatgagcggcaaacccattgccggcacagtattttcagtgaagtctgttaccggcagctattccacctccgtcacgaccgggatggacggttccgcactgctctcggccattcctgccggtgtctatgttgtgcgtgaggaatccgtaccagagccgtacatcgtgagcaatacggagcagaccgtggcgctgcgccccggcaagacctccgaagtcatcttcgttgactatgaaaagccgggacttgaaattttgaagaaaaatattgccaccggagagcctatcgagggcgtgacctaccgtatcgagcagatcgacggcagcttttctaccagcgccacgaccgataaccatgggcggattttcctcgactctgttcctgttggcacattcaaagtaacggagatcaatgtccccgaccatgttattctctgccccatcccgcaggaagtggcgctgaaacccggtgaaacctctaccgtcaccttcttcaacgccctcaagcccagtctggagatccgcaaggtagatagcgtcaccggtgatcccgtcaagggcgctaagttccagatctggtatggcagcaaccataccgacaccggtgagctcaatgacctcggcacttacttttctgacgcaagcggaaaaatcattcttcctgagatcaaggatggctggtacaaagtaacggaattggaaccggcgtccgggtacgccatcaaggagcctgccacgcaggaatgcttcatctccggtggcgagagcaaggtgctgacctttgaaaatacgcctctttccgccatcatcatccgcaaggtggacagcgagagcggtcagccgttg

SEQ ID NO: 10392 - DNA, 127 bp, Unknown
  gut microbiota DNA sequence
tcccaaccatgtcattctctgccccatcccgcaggaagtggcgctgaaacccggtgaaacctctaccgtcaccttcttcaacgccctcaagcccagtctggagatccgcaaggtagatagcgtcacc

SEQ ID NO: 10393 - DNA, 21514 bp, Unknown
  gut microbiota DNA sequence
caggctggaaaatgtattggtttttctgatttaacaatttatttctataaacaaaaaaaagcacaattgattagtgtttaagatgctgatattcaagatgtaatattttgaatgtcaaagaaatcttgctttcttttactttgaaattgttttgatagtaaaaaaataataattttattgctgaaaattcatcaattattaaccttaattattttaatcgtttatggaaaaattaaatgttgcggaacggaggacatacgtcgctccggagttaagtattgcagaatttgcaatcgagaacggtttcggcaattctgtcgcttcgttcgaagaggaaacctatgaataacccctcaaccttccgaattattatgaaaagatttttagcttgttttggttgtgcagccgttttggctgcttcggtttcctgtacgaaggatacgacggttgcgccggaagttaagcaaggagctatgaaatcaccgcttcggtagaaggtacccgtacttcgttggaaggtgctgatgtacggtggtcggcgaacgatgcgctcggtattttctccgggacgaagttcgtgaacgcgaaatttaccaccaaggatgacaacgctgcatccgcgactttcacgggcgatgcgaccgatgctgagggtacggaggctgcgaaggctttcgcctattatccttatgctgcaggtgctacgctggaaggaacgaccgtttccggtctggagattcctgccgtgcagacgttcgccgagggaactttcgctacgacgctcaacccgatggcggccgtaggcgaagatcatacatcgttggcgttccgttcggtgggtgccgtgctgcgtttcaaactgacgggtaccgatacgttcaacaaactgatccttacgggtaacaacgacgagtctatcgccggtgcttatgcgctggatttcagtggtgaagtgcctgccatgactttctcgggcgagggtaaatccattacggtgacttgtgcatcggacgtaacgctcaagacggatgttgctaccgaggtgcattttgtcgtacctgccgggatcgagtttacgaagggtgtttcgctgaagatcgttcacagttattacagttgggatgccggtgatgtgaataaagagattttgacccgtaagttcacgactccgctgaccacggcggccaataaactctataatgtgacggagttcaaggcggaagacctctcttcgggcatggacaccaacctgcgtgcttatctgttgagtgaatacgatgcgaatggagacggtctgctctcgcaggctgaggccgaaagcgtaacggaaatttattcgactggtttcgggggcaaggtaaagagtttgatgtatattgagcgtttccccaacttggaggtgcttgttgtcaattcgaattgcgacgaactgaatggtattacgctgtcgaacaataagaagctgacaagggtgtcgctctctccggccaatggtttgtggtcgagtctcaatgtgagtgggcttgaaaacttgacgacgtttgagctcaagttctccaacgaccaggccaacttgtccaagatcaatctttccaattgtccggcattgaagaaagtggttgtcgagggagccaaatcgctcgaaactttggatttgaccggttccgcatcgactgtcgaaatgttctggttgcagtcttgccccaaaatgacgaccgtggacatccacgagatgcccattaccactttcgcatcggctgactatgcatccagcggtacgaatatgttcgccgacggtaccatgatcatcgctacgctggctcaaaagtctgcgatggccagccagtattccgactatggcgtatccgttacctggtggtgcgtcgatgaggagcgtacggaggctgctgcgtcgatgaatgccgtgctgcgcaaggctattctggacgacgaaaccgtcaatcccgtcggagatatcaatacggtgattacggaggagatgctggctaaggtgacggagatcaatataacgacttctatggatgctaccggacttaccctcgacggattggatttgtgtaccaatctgacaaagttgtcgatcaatgcatggcaagtttcgttgggcgacattgacctgtcggcttttacgaaactgaccgatgtgactatgtcgccgaccgcaggctatacttcgatccaactgcctgacggaattaaaagctttaagtcgattatcaaatatgctaatcatgaaccggttggtccgacgacattggatctgactcaatataccgacttggaatatgtgagcgtaatggatagctacggagaacccgcagcgctgaagtcgctgaatgtatccggattgagcaagctcgcgctactctacgtcggcggcacggctgaagtgaatatcgctaactgtccgttgctgactacttgcattcaaaattatggcacgtacgagtccggtttctactggtccggctacgattcgcagacgattatcgtcgagtccgaggctaagagagatcaactgaagaccagttggaaagaggtgatgggctacggcgaagagaatcctgccaatgcatggacgattcagtaatggtccttctgcgtcacaacggtagcgggcgcgaggatgcctgtcgccggtagcgatgctttccggccggttgtaccggctgatacgaacaacgatatcccgcccgaggtttccccgggcgggattttttgccgcttgccccgccgggggcatgtctttctgcggtgagaacgttttgcatagtacggatggagtatgaataagatgggaagcggcccggattctatgatttgaaaagtgcgaagaaaaagttcggaattgataatcattttatatctttgcttccggtttataactaaaaatatatgaaacgtatcttaatcgtaggtgccggtggccagatcggttccgaattaacaacttatctccgtaaaatttacggaaacgacaatgtggtcgcaacggacgtgcgcgagtgcaagcagcttgccgagtcgggacctttcgaggtgatgaacgccctggatgccaatgcaatggcggaaatggtgtcgcgtcagaagatcgattcgatttttaacctggtagccctgttgtcggctgttggcgaagcgaagccccagacggcatggcaggtcaatatcggtgcgctgatgaattcgctggaggtggcccgtcagtataactgtgcgctgttcacccccagttcgatcggcgcgttcggtccctcttcgcccaaggacaagactccgcaggataccgtgatgcgtccgacgacgatgtacggcgtatgcaaggtgacgggcgagatgctcggcgactattaccacagccgtttcggtgtggatacccgttcggtgcgtttccccggattgatttccaacgtgacccttccgggtggcggtacgaccgactacgcggtggagatctactacgaagcgatccgttcgggccgcttcacctgccccgtgccgggcgatgtctatatggacatgatgtacatgcccgatgcgctgcgtgcctgcgtggagctgatggaggccgatccgacgaagctcgtacaccgcaacagtttcaacatcgcgtcgatgagcttcacgccggagatcatctatgccgagatcaagaagcgtctgcccgacttcacgatggattacgacgtcgatccggtgaagaaagccattgccgaaagctggcccaattcgctcgacgatacctgcgcccgtgaggagtggggttggaagcccgagtgggatctgtcgagcatgacggacgatatgctggaggtgatccgcaagaagaatctgaaatagtgtcccgtaatccgttgcgggagctgcgcggcgatccgggcggagaatcgggcggagttgtgtcggcggactcccgcgaggcacggaccggttccacgacgatcgtcgatacttccgagagttgggacggcacggcgctgccgtcttatcctgcgggaacgccccgtattacgattcttcggattacgatcgctcccggtgaacggctggcgatgcaccgtcatcccgtaatcaatgccggtgtcgtgctgcaaggcgaacttaccgttgttgcggaaaacggtctgtcgaagactttttcggcgggcagcggtatcgtcgagctggtgaatacgttccactatggtgaaaaccaggggacggtgccggttgatctggtgatgttctatgccggaggcgcggacctgccgctttccgtgaaacgataagaaacggccctgaagttttcttcagggccgttttatgtctgtttcggaacaccggggcgaggtcccgatacggactttcggtaatgaaataaaaagacagacgggttaaaaatcgtagccgacggagagggaccaactgcggttgcggaatttggaggtgtcgtcttcctgggcgatgttgaggaaaccgccgccgtaagaggcgccgatatagacggagtggatgtttaatccgatgcctatccgcccgccgaagtcactgcgttgaaacattttatttttgccgaacaaattctgttggatttcaagtcccaagtcgtcaaaggactgtttgccgtccacacccagcgatccgtagaatccggcgaaaggaatgacagcgactttcggggcgagccggatgtggtagttgagcatgacgggaagttccaggtacattgcgttcagggagagctcaatgtccgagccgccgtcggtagcttggacttttcctcccttgttgtgcagcatcaggccgaactggaaatagaagggcttgtcgttcagcagtcggatctggtccgtcaggccgatgttgaatgaggtccgtaattccgacaggtatttctctccggaaccggtatccaggatgctgattttgctcatatccataccgacccgaaggccgaaaatattctttttgggcgtttgtgcccatgcggtggagatcgctgccgttatcgccagcaaacagaggaaaagttttttcatacgatcgaagttagggttagttttctataccgaagataagaaaatatcggtgataaaaaaaggtttttcgttgataaaataagtttttggcgtcggatttgccgtttcttataaccgacttcgaagggagaaataatgttattcgaataacagtttgtctgtaaaaatcgttatctttgcacggttcgacagattgcgctgcggcagttcggaattcggatccgcctcgttgcgacttttcgtgcgtccggtgggtgcgatccggcagacaaccgaggttgcaggtagatgccgcacctgtgaaacgaccgttgaaaacgaaattgttttttataaaattcaaaaatttacaactatgcagattgtagagatccatgcaagagaaatcctcgattcgagaggtaacccgaccatcgaggtcgaagtaagaaccgtatcgggtgcattcggccgtgcagccgtgccgagcggtgcttcgacgggagagcacgaagcccttgaactgcgtgacggcgacaagagccgttattcgggcaaaggcgtcgagaaggcggtggagaacgtgaataacatcatcgctccggcgatcgtcggtatgagcgtaacggatcaggtgggcatcgacaagacgatgatcgcgctggacggtacgccgaccaaatcgaagctgggcgccaacgccatcctgggtgtttcgctggccgtagcccgcgctgccgccgactatttcggtctgccgctctaccgctacatcggcggtgtgaatgccaagacgctgcccgtgccgatgatgaacatcatcaacggcggttcgcattcggacgctccgatcgctttccaggagttcatgatccgtccggtgggcgctccctcgttccgcgaaggtcttcgcatgggtgccgaggtgttccacagcctgaagaaggtgttgcacaaccggggcctctcgacggccgtaggcgacgaaggaggtttcgcacccgcgctgaagggtacggaggatgcgatcgagtcgatcctcgaagcgatcaaggctgccggttacaagccgggccgcaagagcgagggcggcgacgtatcgatcgctatggactgcgcctcttcggagttttatgcggacggtgtttacgactatacgaagttcgagggtgcgaacggtgcaaagcgctcttcgaaagagcaggtcgagtacctcaagagcctggttgccaaatatccgatcgattcgatcgaggacggtatgtccgagaacgactgggagggttggcagatgctgacggccgagctgggcgacaagtgtcagttggtcggcgacgacctgttcgtaaccaacgtggatttcctgcgcaagggtatcgagatgggatgcgcgaactcgatcctgatcaaggtgaaccagatcggtacgctgaccgaaacgctcgacgctatcgagatggcgcatcgtgccggatatacgtcggttacttcgcaccgttcgggcgaaaccgaggattcgacgatcgccgacatcgccgtagcgaccaatgcgggtcagatcaagaccggctcgatgtcgcgttccgaccgtatggccaagtataaccagttgctccggatcgaggaagagctcggtgacgaggcgatttacggctatactaaggtttaccgcaagtaatccccgtttaatggaagaatccccgccgcaagaccaatgcttgcggcgggggttcttttgttgtaggctgtcgtggagtgcgatatcgaaatgtcgtttccagggccgtatttgccggatgttttactctgtgtcctctgccgtttcggaaccggatgcagcaggcattttttccggatcgattccgaaagccgatacgatgatcattttttcatcgacattgttggggttggtgacgatgatgccgtattcaccggcaggggcatctccgaaagtcaggtaataggagttttctccgtatttttctgcggtaaagggcaggtactccatatcgttggatgtgacgttgaacgaacctacggccgagatgactgccgagcgttgttttcggttgttcttcatggcgaatacccgtacgatcgacatcgggtcggttttgttgtctacggcgcggacaatcagattgaccggttcgtcggctgcgaagcgtacgttggcttgactacctgcgacgagaattttagttttcgacttattgacggccagacctgctatatacactccggctccggtgcgcattttgacattgtgtttttccaatttttccgccgtgccgtccgaatgaatcgccaatacttcgccaatgaaatcgggttcgggaatttgggcggcgataccggatgccaataccagggcgaacagcgtgaaaagaatttttttcattgtttagggatatttgcttagggtttatattttgttcggaaacgttcttggggaaaagtggatgtattcccgggcgaatgagtttccgctgcaaatataagtaattcccccccccgccaaaatttaccgggaaaaattacggatacggttgaaaaatgacgatacggaagcgatgtccgtgcggcgggtgattcgaatcggttggggagcgcggaggcaggacgagttgttgccgaactattttttcttgtgcggattgaaaatacggtatccgatcgacaatccgatcttgttgggataccactccgacgaaccgttgaacggatcggggtatttgggttcgacctgatggccggggttcatgtcgattttcccgtccatggaatagccgttgtagaagctgctcatccacgaccagccgaagtaggcgtcgagcacccagcgttcgcggaagatgtgttcgtagccgacgcagaggccgatcatgaatccgtagcctttgctgtaccggttttcgaatttgagcttccagttttcgatgtagggtttcgagaggtcgaaagcctgcataccgatattggctccgaggtaccagccccggttgtgctccttgaaataacggcggtattcgcccatgaagatacaaaagagggcgtgatgattgtttaccgactcccacggcgaaacgactatttcggtctggaaggtcgatttgggggagattgtgaattcgacggcgggattgactacgcccacgagcgcatagagtccgttgagtttgacgtaggtttgggcggaaattttcgatgcgcagcctgttgcgagcaggcatgcgagcgatattttaagaatgagtttcatagttgtcttgccgcgaaggtattaaaaaaaggcggaatttcagacgattccggtaaaaaatagcccgatcgggcgggatttgtccgttgtggacgatttttgtgcaggcggagccggtgtgtgccgggttacaaggacttcttcagatagaccatatctaccagttgtctgccgtcctcgatgatggggtggtcgtaatgatcggtgaagaagccggggatcgagtgcgagcgaacgtatccgcatcgttcgtaaaaacggagtgtgcggggaacatccccggtgccgacgagaagcgtccggtaacgctcccggtagtacgcctccagaaattcgagcgtttgtcgtccgtatcctttccgttgatactggaggggtacagccagattcttgatctctccgattctgtcggcttcgtccgtgacgacgcattcggcgacgacctgtccgtcgtcacgggctacgaacatttcgccccgttccaggtagcggtcgatcatggattcctgttcgtcggccagcaggagcaggtcgaggaagcgttttttgtgcgtggtgattttttcgaatcgcagaggcatgacgggcgagttttcttgagtgggtggggtacctgatataaaaatccccctctgatgaaagatacaccccggcgtttatgcgtcggggtgttcggtttctcggagaaagcgtatctatacggtcatgatctctttttccttgttgtcgagtatcgcgtccagcgatttggtgaacttgtcgagcagcttctgcgcctgggtttcaccgtctttcgcctcgtcttcggacatgccttccttctgggccttcttgaaggcttcgacagcgtcccggcgtgcgttgcgcaagctgatgcgggcggtttccgcctcctggcgtacctgcttgaccagctctttgcgccgctcttccgtcaggggcgggatcgacagtcggatctgctccccgttgttcgagggggtcagcccgatgttggagtcgatgatcgccttttcgatcgcgcggatcaggtttttgtcccagggctggatcagaatggtcttggcatcgggtaccgtgacgcttgccacgcctgaaatcggggtttgagatccgtaataatctacgaaaactccgttcagcacggtcgggctcgccttgcctgcccggatgttgagcagctcttcttcgaggtgctcgatcgttttctgcatgcggtcggaagcttcggaaagaatggttttggtatccatatgtcgtatttgtttagttggcggagttgagttgtcgctcgatcagcagaatgagttcgtcgaattcgggggcctcgtaaccgatggtcgcggaaataactttgccgtctttgccgatcaggaaattacgcggaatgtagttggaggcgtaaagtctgtaaattttctgttcggggtcgagtcccatcgggaacgtataacccatcttttcccggaaagcggcgaccgtttcgcgggtttcgccgcgcgatacgggcaggaaaacgaagtcttcgttccccttgaagcggtcgatgatgtccttctgtacgcggctcaattcctcgcggcagggaccgcaccaggtcgcccagaaattcagaagcaccactttgccgcgcagactgcccagggtgaaggtcgtgccgtcgaacatttccacccggaaatcgggtgcctgtgtcccggctttaacaagggtcgtagcctcgatgtcgtcgggcgcatcgttcgtattcttggtctgttcggtcttcggagcgttcgttgcgggggctgcgggctgcgatccgtcgggcagcagccacatcagggcgatgacgaccgcgagcaggacgatcatcaggataagacgtttgttattgggttttttacgttcggtcatagcgatataataggttttcagagtttgaccagtgtgccgatcttctctccggcgagcaccttttccaggttgcccggagtgtccatgtcgaagacgatgacccggaggccgttttcgcggcaaagcgtgaaggcggtcatatccataaccttcaggttgcgacgataaacttcatcgaaggtgatttcgtcgaacttctccgcagcagggtctttctccggatcggccgtatagacgccgtctacgcgcgtacccttgagcatgacgtcggcttcgagctcgatgccgcgcagcgccgatgcagagtcggtcgagaaataggggttcgacgtgccgccgccgatgatgactacgtatccggcttcgaggtagtcgagcgccttggctttcgagtaatactctccgatgggttccatccggatcgaggtgaggactttcgctttcacgccgttgtcctcgagggccgactgcagggccagcgagttgatgatcgtggccagcatccccatctggtcgcctttcacgcggtcgaaccccttgcgggcgccctgaagtccccggaagatgttgccgccgccgatgacgatgcctacctggactcccgttccgacgacggctttgatttgctccgcatagctgtggagcacgtcggtcgaaagaccgtatttctgaatcccttgcagggattcgccgctgagtttcaggagtattctgtcgtatttcataagcggagcggaatttgataatgcgaagataggaaaaatttcgaaaaaatgtcgttttttaatgctatctttgcctatccatgatgcattcggaatataaatggctcgatcggattgattcgcccgatgacttgaagaagttgtcgggctctgacttgcgtcagtattgcgacgaactgcgtcagtacatcatcgagcaatgttcgtccaatccgggacacctggcttcgagcctgggggcggtggagcttgccgtcgctctgcactacgtattcaatactcctgacgataaaatcgtgtgggacgtggggcatcagacctatgcccataaaatcattaccgggcgccgcgaggcgtttcggaccaatcgtaagctgggcggtatcagcggcttcccgcgtatgtccgagagtccttacgacgctttcggcggcggacatgcctccgtgtcgatttcggcggcgttcggtatggccaaagctgcggaactcaagggcgagcagcggcaggtggtggccgtgatcggcgacggttcgatgacgggcggtctggcgttcgaagggttgaacaacgccggagcgagcaagcagaccaacctgctggtcattctcaacgataacaacatggccatcgaccaggctaccggggctttgaagaactacctggtcaagatttcgacgtcgaggcgctacaacgctatcaaacgccgtttgtggcggattttgtcccatacgccggctgttttgcggttttgtcagaaagcgggcaatgccgtcaagcaagggctgttgaagaacagcaatctgttcgaaagtctgaatttccgctatttcggtccgatcgacgggcataatctgccggaactggtgcgggcgctggcggccttgcggcgcatcgagggtcccaagctgctgcatgtgatgaccgtaaaaggaaagggctataagcctgccgagtgcaataagccggtatggcacgctccgggcaaattcaatccggaaacgggcgagcggatcgtcagcaagaccgaggtggcccgatatcaggatgttttcggacagacgctgctcgatctggcccgtgccgacgagcggatcgtggggataacgcctgccatgccgtcgggcagttcgatgaatattctgatgaaagagatgccggagcgttgtttcgacgtcggtatcgccgaaggacatgccgtgactttctccgccggactggcggctgcgggcatggtgcctttctgcaacatctattcgagtttcatgcagcgggcttatgacaatgtgattcatgacgtggcgattcagcgccttccagtggtcatgtgccttgaccggggcggtctggtgggtgaggacggagcgacgcatcacggcgctttcgatctggcctatttcggtacggttcccaatctgacggtggctgcgccgatgaacgaactggagcttcggaacatgatgtttacggcgctcgaggccggtcggcctttcgccatccgctatccgcgcggtaacggagcgggcgtcgcctggcgcgatgagccgttcgcagcgatggaaatcgggcgggggcgttgcctgaaggacggggagcggattgcggtccttacgatcggcacggtcggcaattttgcttccgaggccattgcgcgtatggaggcggacgggattcgggtggcccattacgacctgcgtttcgccaagccgctcgaccaggagttgctgcacgaggtcggacgtaagttccgttgtgtggtgaccgtcgaggacggagccttgcgcggcggcgtgggagaagccgtcgtcgcgttcttctgcgagcacggctatctgccgaaggtcgtgaacctgggtattccggatcgttttgtcgaacatggaacgcccgcgcaactgtatgcccagtgcggttatgatgccgagggaatttaccgcacgctgaaaagtttgcaggaatctttgcaatagacgtaatccggtatagaatatgcgatacaccctcgttatgaccagggtgaaaatcgaatatatgctgtttgcggcgatgtcgcttgtggcgggcgccgcgtacggtcggggaccggtcgttgccgctgtcggcagtggaccgtgggcgaatcccgatttgtatgtcggcgagtggtacgagatcgctcgtttcgatcatccgtttcaggaggggacggtcggatcccgggtggtttaccgattattgtcggaaagtaaaatgcgaatcgtctatcggggcaaggacggcagaacgggccgggaccggatttcgagtgcaaaaggtcggttgtctgccgattacgaatgcctgcgggtttcgtcttgttggtttttttatagcgactatacgatgtcggcatgcgattccgctgccgagcggcagtgggtcgtcgtaagcggccgatcggccaaatatttatggattctcgctcgccgacctcgattatctacgcaggtgctggtccggattctggaccaggtcgaaaaacagggattcgataccgataagcttcatttcgtcgatcagcggtgaaatgtcggcccggtggaaaaataaccgcgaatattcgtttcggatattcgcggttgctttgtatttggcggaggttcggattttccgggtgcgagtttcctattcgatttcccgccggttcatcagtgcgtgagtaatcgtcagttcatccacgtattccagttcgtcgccgaagccgatcccccgggcgatcgacgtgactttcacctgcgggtactggcgcagccggttgagcagatagaacagggttgtttcgccttcgaccgaggtcgagatggcgaggatcacttcccggattgtcccctgggcgatccgctcgatcagcaggtcgatcttcaggtccgaaggggcgatgccctgcatcggagagattacaccgcccaatacgtgatagagtccacggtactggcgggtattttcgatcgagagtacgtcggcgacctgttctacgacacagacggtcgtatggtcgcgctcccggtcggcgcagatcggacagatttcttcatccgagaggttgttgcacaatttgcagtatttgatgtcgcggcggaatcggtcgatactgcgtgtcatgttgcttaccgaatcgggttccatgcgcagcaggtggatcgccaggcgcaacgccgtgcggcgtccgatgcctgggagtttcgacagttctccggtcacgtcttgaagcagtctggacacgttcttggaaatttttggattcgcaggggcggatccggtttttttagatggtttcgaacgtcgagcactccatccagccctttttgccgtcggcgatggtgatttcgcaccagccgttcagacggtccgaaatttctactttggtgccttcgtgcagaatgaagagatcggtcgagttctgatcgggagagcttttgacggcgacggcatcccgcagtacgacggccgatgtgcggtcgatcgcctcccggcggtcgatggctgcgaagcagagggtcagtaccagcagcagaaaggctgtcgcggtgccgtagaatcctatcttgcgtcgtaccagacgacgggagagcagatagaaaagcgccgagccgagcattgccgccaggaagaccagcgagaggacggcccatgtcgtgctgctcaaaaggttgcgcagattcgacaaccaggtcttgacgaaaaattcggggacggcgtcgatgtggtctttggtcattttctcggcgacttgcaggttgtagcgtatgtcttcgttcccgggattgagcctcagcgcccggttgtagttgaggatcgcccgaccgatttcctgctccttgaaataggcatttgccaggttatagtagagtttgcccgattgcctgccgctcgacagaatcgtttcgtaaagcgaaattgccgtaggaaagtcgttgttgatgtaagccgtgttggcctgatcccacaacttgtcgggatcggatgcgtaagctgccgaggcggtttgctccgattgcgggtgttgagccagcgaatcggttcgggcggcagtctgccccggaactgccgcgctcaacagcgtagcgaggagaaagagaatatatcgtttcatggcttttagcgtttgatgatcgattcgatgcgggaaatcagttcgaggccgtcccgatatacgtcgctcatacgggccgaagccaccggcgaatattgggcttcgtcgcagcgggtgatgagttccgagaagagctgggtgtcttccggcgcagccccgcgcttgtggagctcttcgcggacgttttccttggtgagattggctaccgggatattgaatttatcgctcatatacccccataaagccttcagcatctcttcgtagaaggcgtgctggttgtgctcttccatatagttcttggctattctgaaacgctgaatggccactttgttggcccgccggccccggatcaaagccgcattctggctgtcgcggatctgcttgcgcagcgcgatgtaagttccggcgaaaaggacgagaatcgcagccagcagtccgatatagagtccgctcaggaagaatggctcgtgcatcggctggaggtgtgccttgcccaggcggatgaaacggatgtcctgtcccagcatctgaacgtcctccttggagagtcctttgaccatgtagctctctccgccgttggcatccggtgtgatttgcagcgggaagctttgcgaggagagggtcacatattcccggcggtcgggattgaagtaggtgaaaagaatcgaatcgatacggtacgtcccttcggcgcgcgcgatgaacggatattcgaattgccggtagccggaggttcccgcagtcgccgtttggatggattcggtggttttgacgttgtattgctcgaacgaggcgggcagcgtcagtttcggtgcttggatgaaaggcaggttgccctgtcccgtgattttcaccgtgaaggtcccggccgagttggccgccagttggtctgcggagagcgatgcctccatggagaatttgccgacggcgcccgtaaagctggccggagcgcccgcagggagctctttgaccgtgatgttcacgcggggcgtctgcaatttgcgccgcaggttatagacttcgtgcccgccgccgaagaacggatcgatgttgcggcggctctgtacgataacttgtgcaatggcggtgatcgttgcgggttcgatcacgagcgtacccgcctgctgcgggtagagcagacactcttttacgactgtcgattcatagaccttgccgttcagggtttcacgctgccacatggcgttcgaaacgtcgatgtcctgcgtccagaagccgttgaaggaggggaatttaatgtcttcgtagcccacgatcgccacccggcggtagagcttgaaggtcgccagcaggggttcgcctttgaagaccgactgtttcgatatgtggacgcgcagcaacagatcgtctttggcaatctgtccctgggcttcctcctcgatactttcatccgaagagtctgaatttccctgcggagcccgggcgctgcctgccgacggtttgtcggagatctcgatcggcagaggctgggtcttgtatctttttttatcgaccttgatcgaggctggaccgatcgtgatgttgcccgcgtcctgggccagcaatacgtaggtgatcgtataattgacgtttttggtcatcgcgccgttgatgatctggatcgagtgtccctgggagatcgccgggccggccagtacgtcgaacgccccgaaatccggcgcttcgaacgaatcgtcgtcgggcgtggcgttgagcgagaactccacccggaaactttcgcctgccgtgacgaccatcggggcgttggcgctgaaagtaacctcgtcggctcttgctgcggagccgacgaagattacgaaacataatgcgagggttattttacagaaaaaacctttcattgactgtctgtttccttggttgcccctataacggccggggcggagcgtttagtgtttgagctgcgcgaaaaaatcgttgcctttgtcgtccacgaggatgaaggccgggaagttttcgacgtagatcttgcggacggcttccatacccagttccgggaaatcgaccacttcgaccgatttgatcgaatctttggccagcacagccgccggaccgccgatcgaaccgaggtagaatccgccgtgttttcggcaagcgtccgtcacctgttgcgagcggttgcccttggccagcatgatcagcgagccgccgtgctcctggaacagatccacgtaaggatccatacggcctgccgtcgtgggtccgaagctgcccgaaggcattcctttcggcgtcttggccggaccggcgtaatagatcgggtgtttcttgaaatattcgggcatcggcttgccctcatcgagcatctgtttgatgcgggcgtgggcgatgtcgcgggccacgatgagcgtgccgcgcaggttcaggcgcgttttgatcggatatttggagaggatttcgcgcaccttgtccatgccttgatccaggtcgatgtccacggcgggcgacatggcgggggcctctttgggcaggaagcgggccgggttcttctcgagctgttcgaggaagatgccctcttcggtaattttggctttgatgttgcggtcggccgagcagcttacgccgatgccgacggggcacgacgccgcgtggcgcggagcgcggatcacccgcacgtcgtgtacgaggtatttgccgccgaactgggcgccgataccgctctcccggcagatctggaggattttctgttcccactccaggtcgcggaagcagcgtcctccttcgttacccgaggtgggcagctggtcgaggtaacctgccgaagccttcttgacggtcgccagacacatttcggccgacgtgccgccgatgcagacggccaggtggtagggcgggcaggctgaggtgccgagatccatgagtttcgagcggaaaaattccagaagcgatttctcgttcagcagcgctttggtctgctggtagaggaaggttttgttggcggagccgccgcctttggtgatgaacaggaatttgtattcgttgcctttgtcggcgtagagatcgatctgtgcgggcaggttcgtgcccgagttcttctcctcggtcatcgtgaagggcaccacctgcgaatagcgcaggttgcgctccttgtaggcttcgtaggcgccccgggcgatacattcggcgtcgtccgctcccgtaaagacattctcgcccttcttgccgatgcagatggccgtgccggtgtcctggcaggtcggcagttcgccttcggcggcgaccgtctggttgagcagcatggtgtaggccacgaatttatcgttgtcggaagcttccggatcctccagaatgtggcggagttgctccagatgggccgggcgcaggtagaacgatacgtcggtataggcttcgcgggccagcagttcgatacctttgggatcgaccttgagaatgcggcgtccgtcgcattcgacgatcttgacatactctttggtcagcagacgatattgcgtcttgtcacattcgatcgggaatggttcttgatagatgaattccgacatggtgttgaggtctttattgtagcgttagaaaaattgccaattattcgcaaatttactaaaataaaatcagaatattccgtttgagcgctattttttctcccgcctgatttttattcgggaaagagcctgttattaaggaaataatgcttaattttgtaaagataggaacgcataaattcttaaattattatataattatggtatcttataaagaactgggcctggtgaatacccgcgagatgtttgccaaggcgatcaagggtgggtatgccattcccgctttcaatttcaataacatggagcagatgcaggccatcgtgcaggcgtgcgtcgaaacttcgtcgcccgtgattatgcaggtgtcgtcgggtgcccgcaagtatgccaatccgaccattctgcgctacatggcccagggtgccgtggagtatgccaaggagttgggcaagaacattccgatcgtgttgcatctggatcacggcgataccttcgagctttgcaaggattgcgtcgatatgggtttctcgtcggtgatgatcgacggttcgcacctgccttacgatgagaacgtggcgctgacgaagaaggtcgtggagtatgcccacaagcacgatgtgacggtggagggcgagctgggtgtgctggccggtgtcgaggacgaggtttcggccgaacaccatacctacacccgtcccgaggacgtggaggatttcgtgaagaagaccggtgtggattcgctggccatctcgatcggcacgtcgcacggagccaataagttcaagcccgagcagtgcacgcgcaatgcggacggcgtgctcgtgccgcccgaactccgtttcgacatcctggaggagatcgagaagcgcatccctgggttcccgatcgtgctgcacggctcctcgtccgtgccgcaggagtacgtgcatatcatcaatacgcacggcggtgcgttgaaggatgccatcggcattccggaggagcagctgcgccgtgccgccaagagcgccgtttgcaagatcaacatcgactcggacagccgtctggccatgacggccgccgtgcgtctggtgctgaccgacaaacccgcagagttcgatccccgcaaatacctggggccggcccgcgaggagatgaagaagctctacatgcacaaatgcgagaaagttctcggatcggccggcaaggcgtagccgattcgtgcggattgcgataccggaccgggcaaatcgcccggtccggttttttctttcccgaaatgtgggttgcggtgcggattttgttcttctttgcatacaatcaatattcgatggttatgaaaaagtatgaattgaagaataataaggcgctcggacgttatgaattcgatttgggcggtgctacggcagcggtggattacgaggagtgcggtcccgggtgtatcgccgttacccatacgggcgttcccgatcggttctgcggacagggtatcgcctcgcagttgacactggcggtgttggaagatttgaaacggcaggggctgaaagtggttccgctgtgtcgattcatggcccgttatattctgcggcatccggagtggaagcagatggttgcggacaagtagcgggtgcgacggcgttataccgtttgcgcctggagattcgtttttgggtagggtcggttccgtgccggccgttcttcggctataaggcacgcggccttttgcctgacggcgaatgggcgggagccagggggaatgaatgccgtttgcccgggttctgaagcatgcgggagcgtcttttgccgacagtggccggaaaatatcgtgccggacggtgaattagtaggagcgaaatttggtcgattgccggaaaaatcattatctttgcccatccgaggagaggtgctcgagtggttgaagaggcgcgcctggaaagctcgtatacgtctaaagcgtatcaggggttcgaatccccttctctccgcaaacgaccgggtggtcggctgggttgcaaacattcgtttgcaaccttttttattttcggggtggacaaatttgtccggaacggtcttaagataaaagttggtcgtatggctggcaggcgaaaatcaggagttcgcaaggtcgcctccggtccgacggagggaaggacgggcggcatgcggtaacgcgaagtcgagcgcgctctgccgaagagtggaaccggggcgaaatgttgtacggaaacacagcttttttgtctctgcaacgcggcaaagtcgttcgaatgggctgccgcgatagaatggccgatacgttttttgtttcgggacatttgtaccctccggccggatcggggagaggtgttttttgtgaagctgatccgcaatccctgatctttcaaacgataaaatttgaaaagccgcaaacattgcttgcggcttttcagttaccaggatagaatgagtgcattgggggcacggtatacgaaattgattcgtgcggtgtatcgacttatttaccattttcgttgtttttcagcgtaatgcctatcatgacggtttctgcctgtgcgttgttccatacggagtggggaataccgcctttgacgacgaacgcttcgttttcgcggatgattcgctcttgtccgtccagcagcactttggcttctccctgcgtgacgatgaacaggtggtcggtagcgtgggtgtggggcgtgacggggccgccgccgtcaggggcgagataggcgatggcgccgtttacgatctggccgcaggctccgaacagatttttggccaggaaatttacgtgttcggatggtgtgatgaatccatcttttttatacatatcggtatttttttgaagttgtccggggtattttgcccgttatttgttgaagcgagtacagattgttaagacgaatcgagtaccttagatttgcgcagtaaacaggagatgagatagagttggtaattttgtagagaagaggttagctaaaagaaagggaggcagggagtgaaccagg

SEQ ID NO: 10394 - DNA, 37089 bp, Unknown
  gut microbiota DNA sequence
ggggggggtacgtcggttttgtcgtcactgcatgctccggcgaacaccgccaaaataagaaaaggaattaaaatttttttcataatcttattattttttagtgattaattcactactaaaataaataaaagtagtgagaaaacaaaaaacggatgattttttaggatgttaaatttaagttttttaaaattggattgatgtcttatgaagaggtaactttgtattcgtattctcggaactgccggaagtaaagaaaccggtcatagtaacttggggtatgatgctgttgtgatattatattgaccattcgaataaattcggagcctgtgtccgtttatacccgaggaaaagggtatgtttgggattcgagatattgatatttgattccctgcagaagcatcccaatatataggtatttgggagagtgcaccttgccgggtaaccttttttcattatttttgcacctgaaatgagcggacaaaaactcatacgggtattcaatgcgggggcgctgctgctgatcctgctcgcggcctatgcgggcaaaagcctgcatacccatcccgatgagtactatcgttacctcacggagaacgatgcaaataccacgtcgccggctcttgtggacgactgtgcgatttgccatttccatttcttctcgtatatccattctaccgactgggtcctcgacagtgagttccgtttgctggaaacctttttccggccggagtgttacgatccggcaatcgttgcgatatcgggctcgcagctccgtgcgccgcctgcaatcgggtagataaattcgttccggaaccattcgtttccgggactattcgaccgcacgtgccgagcggcgcggcaaaacatcgttttcacagggtattctctctcatcggccgtattacgggccgttgcccctgcctggcgaaaacagacccattttacatcttaaaacataggattatattgtgtatccatttgggagcatagcgccccgagtccattccgaggaggagatttaggaggacttcattacagacgcagcctccggccgcgaataaacgccctcgaactcgattccgcgaccgtcggataatgggacattgaagatataatcgcctaattattataatatgaaaaaattgatcctcttggccgtaatgtgcctggtttatcatacactttttgcagacgaaacgaccccgactcctaaaagcgacgctcatctctacggccatgtcatcgacagcaaaacaggcgaacacctgccctatgccaccgtcaccattcccggcacgaccatcggcaccatgaccgatgcgagcgggcactatttcctgaagaatctgccgacgggcactatcaccgtcgaggcccgcatgatgagttacgatcccgtgcgccacgaagtaacgctaaaaaaaggacagtccctcgaactcaacttcgaaatcacggaaaacggaattaccatggacgacgtagtcgtctcggccagccgcagcgaaaccacgcgtcgcaaagccccggccttggtgaacgtcctcgaccgcaaaattttcgacaacaccaattcggcctgtctggcccagggactcgggttccagcccggcgtacgcgtcgaggacgactgccagaactgcggtttcatgcaggtgcgcatcaacgggctcgacggacactattcacagatcctcgtcgattcgcatcccgtcttctcggcactctcgggcgtttatggactggagcagattccggccagcatgatcgaccgcgtcgaggtgatgcgcggaggcggctcggcactcttcggctcctcggccatcggcggtacgatcaacatcatcaccaaggaccccgaccgcaacagcgccgaagtcggtcacacgatcacggcgatcggcaacagcagcagttacgacaacgtcacctcggccaatgcctcgctcgtcaccgacagccgtaaggcgggactttatgtctatggacagaaccgccaccgctcggggtacgaccacgacggggacggcttcaccgaaattccgcaactgcaatcccaatccctcggactgcgctcattcttcaagaccagcgcttattcgcgtattacgctccagtacaataccgtcatggagtaccgccggggcggcgaccggctcgacctgccgccgcacgaagcgatgatcgccgagcagaccgaccacaacatcaacggcggcagcctctcgttcgacctctcgtccgccgacttctccaaccgtgtgaatgtctatgcttcgttccagcacatcgcccgcaagagctactacggctccaagcaggatcccgacgcttacggtcgcacgcacgacctcaccgtggcgaccggcgcccagtacatccattcgttcgaccggttgtggttccttcccgccgacctgaccctgggcgtggaatataactacaacgatctggacgacgaatcgatcggctatgattatcgaacgaagcaaaaggtgcacatcatcggcgcctacctgcaaaacgagtggaaaaacgagcattggtcgctgcttatcggcggccgtctggataagcacagcctcgtcgatcacgtaatcttcagtccgcgtgccaacctgcgctacaatcccggagagggggcgagcctgcgcctaagctattcgagcggcttccgtgctccgcaggccttcgacgaggatatgcacatcgccatcgtgggcggcgagcgggtacgcattcgcctggcggacgatctgcgcgaggagcgatcgcacagcctcagcctctcggcagatctttatcaccgtttcggaaaagtccagaccaacttgctcgtcgaaggtttttacacgacgctcgaccacgttttcgccttgcgtccgctgcccgatccggatacggacgggagtacgatcaaggagcgttacaacggctcgggcgcccgcgtcatgggcatcaatatcgaaggcaaggccgccttcacccgctggttcgacctgcaggccggaatcacccttcagcagagccgctacaaggaaccggaacagtggagcgaagatccggaggtcgcaccgacccgcaagatgttccgcacgccgaacacctacggctaccttacggctgaattgacccccgtacgcaatttgcaggcagccattaccggaacttacacgggcaaaatgctcgtgcagcacatggcgggttcgggcacgcccgtcgatcgggccgtcacgacacctcgtttcttcgacctgaacctcaaagtgtcgtacgacgtcattctctataaggagatcgccctgcaactccatgccggcatccaaaatatcttcaacgcctaccagaaagacttcgaccggggggccaaccgcgattcgggttacatctatggcccgtcgctaccccgcagctggttcgtcggtgcgaagatcagcttctgacggtctgccggaagctccggcggctccttgcttcgccggacagggaatatcgttgtcgctcatccggattgacggcatacggaacttttttgaaaatatcgctttcggaaagtcatgatattttccgggtataaaccgaacggagctgcttggcggctccgttcgctcatggcggccgaacgctttagcaaccattattgcaccgatttgcacgagccgcaaaacaattttacggtttttctcgtttttaatatatcgatccatccgtcaaaattcgtatttgctgcgatttttgttctgttctcgaaacaggggtggcttgaataaccgacatacgatccctataaccagatttaaccccgaatcgttatgtttaactcccgatcttccatctccatctcgacgtttctttcttcactgattggatctatcatgcgcgggcgacgctccgtccgctgcggccaaacgtgcgagtaccgcaaggccagactcatcctgacccacgacccgggcgaagagctgtttctgggggcccttcatccggctgcggctcttttccgggaacatatcgatatccccgaactcatcgccgaacatgctacttatcgcaaagtgctcgaggaggccggagcgagggtactcacggtacgtcagatcctgctcgacggaaccggcgcggacgggaaacccgccgaccggacgaagctggagaacctgcgccgcttcgcggccggttttcttaccttcgacacccaaaacctctctccggaaacagccgagcagcaaaaggagtaccgacaatccatcctcgccaagacatcgccccgggatctggtgcggattattctgcgacaaccgatcatccgactgtcggaaacgcagatcaacacggggctcaaggccgaatattcggaaaaccccgtgatgaatctcttctatacgcgggaccagttgataaccacagccaaaggcatcgtaatcggacgcatgaactccccgcagcgggagaaaggatgcgacattctgcaattctgcctcgaaaaaatcggcatgaaaccgttacaccgcatcgaaggggagggagctcatctcgaaggcggggatttctatccgttcggcgatacggctttcatcggctgcgggatgcgcaccacgcaaccggccatcgatcagcttatggagcacgacctgctgggctgcaaccgtctggtcgtagtcaaggaccgattgttcagccaggcggaaatgcacttggacacctatttcaacattatagaccgcaatctggtgacgctcacagctcggcgtatgaccaccgatccggattctccggatctgttgctggccgatatttatctccgaggtgcaaacggcgtctataccaaaaccgaagaagatgtcggattcgtcgaattgttgaggagccgtatcggtgccgccatcatccccatttccgaagaggatgccgaccggctggcgggtaatttcctgacggtcgggtcgcgccgtatcatcggggtagcgggccagtccgaagccctgcggaccgaactgaaacaccgaggggtgaaggtcacctgggtcgggcttgacaacctttgcaaaggctacggtgccgcacactgcatgacgcaggtgcttcgcagacggtgaagactgtcctccgacgtatgtaaaaaagacactccggggaagtgaaaagtttttccgggagcgaccgttgtcgcaatgttccgaaagaatatggccgctgttgcccggcaaggagcgaaatcggttgttatgttccgttcatacgggtcagacgggaaactttccgcttccggatgcgggtaagtttcttatagaatacgacttacttccgacgaaatgtgcggcggaaggctctttcacgaaaaatccccggtcgaaagaccggggatctgctatcgttgtcggcaaacgcttacaacgccttgatctcgtgcagcacctggttggtcttgcggaccgcagcggccgatgcctcgaatttggcagcctcttccttggtgaggtcgagtttgacgatcttctcgatacccttgcggccgatcacggcgggaacaccgatacagatgtcgttctggccgtattcgccttcgaggtagcagcagcaggggacgatcttcttctgatcatgcaggatcgattcgaccatcatcgaagcagcggcgcccggagcataccaggccgaagtgccgatgagtttggtcagcgtggcaccgccgaccatcgtgctggcgacagcctcttcaagtttcttcttcgaggcgaattgcgtcacgggcacgccattgaccgaagccttcgaaagcagcggaatcatcgtcgtatcgccatgaccgccgatcaccatgccgtccacgttgttgatgttggcgccggtggctttcgccaggtaacatttgaaacgggccgaatccaaggcgccacccatgccgataatccggtttttgggaagtcccgaagccttgagcgccagataagtcagcgtatccatcgggttggcgaccacgatgatgatcgcgcggggcgaatatttcaccacgttctcgatcacgcctttcataatgttggcgttggtgccgatcagctcctcgcgggtcatgcccggcttgcggggaatacccgaggtgatcaccaccacgtccgagttggcagtctgcttgtagtcgttggtcacgccgacgagcttcgtatcgaaatccatcagcgtagaacactggtacatatccagcatcttaccctccgacaggccctctttgatgtcgatgaggaccacttcgctcgccacttcgcggcaagccatcacattggcgcaagtagcgcccacggcgcccgcgcccacaactgttacctttgacataatgttatagttttaaggcgagtccgacgtattgatttcggatgtaaaacaaaaatactgtcacaacagaacacgtcggactcacgttacggtatcttttgatgccggattccatcctgacactccctgccgacacccgtcgaaaacgggaggctgcggggttcgatttacatcgaacgaatattagccgatcaactctttgtactgcgcgtcggtaagcagcgactcgcactccttgggatcggtcagtttcactttgacgagccaaccctctccgtagggatcgcggttcacgatggagggatcggcatccactgcagggttgaactccaacacttcggcgccgacgggaatgaaagcgtcgctcacggtcttcacggcctcgatcgagccgaagacgtcaccggcggacaaggtttcgccgacggtcggaacatcgacgaatacgatgtcgcccaactggctctgtgcgaaatcggtaatgccgataaaagcctcaccgccctctacgcggcaccattcgtggtcattggaatacttcagatttgcaggtacgttcataattttcggtatttgaattggttaaaatgaaatttattcgcggtctaaaatatcattgcaaatataaggttatttttcgttcggccaacgttatcctgttatttttttaacacgcagcccgtcccgtccgttcgagccgtccgcttcccctcgataacgaactctatctcccggaacagatacccttcggtacggccgtcgggcagctccagcagcagctctcccgaagggcgcacgccccgcagcacggcctccactgtccggccgtcgggataacggtaccgatgccgctctccgagccggtacatccgccgtcggtagtcggcttgcagcgcctcccgatcccctttctcgagttgttcgtaccgggcggccagacagtcgcccaagcggtgcagtacctcctgccgatcgtattcgcagccagtttcgaggtgcatcgacgacgggttcggcaacgacggatcgaaccgggtctgattgacgttcaccccgatcccgacgatcgtacgcgacaggcggtcgcccgtcaggttgtgttcgatcagaatgccgaccagcttgcggtcgcccgcatagatgtcgttcgtccatttgatccgggcgtcgatgccgtaaccgccgaaaaggtccgtcaaagccaaagccaccgcttccgaaagcagaaactgttccgaaacgggcaggaaacagggttcccacaccagcgagaacatcaggttgcatccctcctcgctgctccaggtatgcccccgctggccgcgtccggcgctctgccgctcggcgcagatcgcatcgccgtgtccgtagcgaggattccgggcctcgtcgttggtcgaggtcgtctcttcgagaaaatgatagcgggtcctgtacatccgaaaggtattataccgaaactccgaaatcccggagcgctgcggtgagcgaagttttcttgtcggtggactccttgcggcgcccgataatcagcgcacaggggacgccgtactctccggcggggaaacgcttgggatagctgcccgggatgaccaccgatccggcggggacgtatcccttgtactgtttgggttccgcctccgttacgtcgataatgtgcgtcgatccggtaatcactacgccggcgcccaacaccgattcgcggcagatatgcgccccttcgaccacgatggcccgggagccgatgaaacagtcgtcctcgatgatgacgggagccgcctgcacgggttccagcacaccgcccacgcccacgccgccgctcaggtggacgcgctcgccgacctgggcgcaggagccgaccgtcgcccacgtatcgaccatcgtgccggcaccgacccaggctccgatattgacgtaggagggcatcaggatcgcccccggcgaaatgtaagccccgtagcgggccacggcgtgcggcacgacccgtacgcccagttcctcgtagccgtgcttgaggtccattttgtcgtgccattcgagctctccggcccgcatggtgcgcatctcctgcatcggaaaatagagcagaatcgccttcttgacccactcattgacctgccactggctccgggacggatcgatgggttcggccgttcgcaggcgtcctttgtccagttcttcgataacggcgcggaccgcctcccgcacacgggactccgcaagcaatgcccggtcgttccaggcctcttcgataatttgtcgcaactgattgtccattcctgtttttcgctttcgttattccggtttcaaagttacaaaattctcctgcggatcgccggatgccggcaactttttcgtatattctgcgaatatatggaacgttcggacaatctttgcgaacaaacctgcacgattgcgccggacttttcgtatatttgtctttcgaaaccttccaaatattaaaatatgttaaaacacgttaaaattactttggcggttttttgtgccgctgctgcacttaccgcctgtaagtcatctatgaaaatcaaacacctgccttatcccgaggccgagcgtacggaagttgtggataactacttcggtaccgaagtcgccgacccctaccgctggctcgaagacgaccgttcggaacagacggccgcctgggtcgctgccgaaaatgccgtgacgcagaattacctggatcaaattccgttccgcgaggcgatgcgtgcccgcctgaccgagctgtgggcttatccctgggagggagctccggctaaattcggggattattactatttttaccgcaacgacggacgacagaaccaggccgtgctgtaccgccaggcttcgctcgacgccgagccggaggtattcctcgatcccaacacgctctccgaggacggaacggttgcgctgtcgggcatctctttctcggaagatggccgctacctggcttatgcggcttcggcttcaggttcggactggagcgacattcatgtcatccgtacggcggacaagcagcccacgggcgatatcgtaaaatgggtgaagctctccaacgcagtgtggacacccgacgaaaagggattctattacagtacgttcgacgttccggaagcgggcgtctattcttcccagaaccaatatcagaaggtatattatcacacgctcggtaagcctcagtcttccgatcgtctgattcatatggacacacaacatccgttgcgctatttcgcttccagtgtcagcaaggacggcaagtggcttttcatcacggcatcggagggtacgtcgggcagtgagatcctctaccgaaaaagcagcgataagaagttcaaggtgctgcttcccggctttgccaacgaccacgagattattcgcgccgagaacgataaactttacgtgcgtaccaacctcgatgctcccaactaccgcgtgatccgcatcgacctgaataatccttcggtgatcgaggagattatccccgaaaatccgaagaatatgcttgagatcgtcagcaaaccgggcgactatatgatggcttcctacctggaggatgcccaaagccaggtttaccagtacgattggaacggcaagctcattcggaaagtcgagctgcccgccatcggatcggcaggcggattctccggtaaaaaaggcgaaacggaggccttctattcgctgaccaacttcacgacaccttcgaccgtttaccgttacgacctcgcaacgggcgaatcgaccctgtataagcgtcccgaagtgaaattcagccccgaagactacactacggaacaggtgttctacaccagcaaggacggcacgaaagtcccgatgttcatcgtctatcgcaacggactgaagctcgacggcaacaacccctgttacctctacgcttacggtgggttccaagtcagcctcgcgccctggttcaacccggctgccattatgttcatggaacagggcggcgtttattgcgtagccaacctgcgcggcggcctggaatacggagaagagtggcacaggggcggcatgctggacaaaaaacagaatgttttcgatgatttcatcgcagcggccgaatacctcattgccaacaaatatacctcgtcgaagaaactcgccatcgcgggcggttcgaacggcggcctgctggtgggtgcctgcgaagtgcagcgtcccgacctgttcggcgtctgcctgccggcggtcggcgtgatggacatgctccgctaccacaagttcaccatcggctggggctgggtcgtagagtacggctcgagcgacgacgaggagcagttcggctacctctacaaatactccccgctgcataacatcaagaagggcacgaagtatcctgcgacgctgataacgactgccgaccacgatgaccgtgtcgtgccggctcattcgttcaagttcgccgccgagatgcagtacgcccagggcggcgacgctccgatcctgatccgcatcgacaccaaggcgggccacggcgccggcaaacccgtctcgaagcgcatcgaagaggctaccgacgtgttctcgttcctgttcgagaatacggacacgccttacaagacggtcgaaacgaaataatgctattccggtcgcatgtccgaaacttcgttgaaaacggagtttcggaagcagccgggccgatcccgatgcgggtccggaacccggcacgacgaagtaccggccgataaccatactgttttattgagcgatgaaagtttacaagttcggcggcgcatcggtccgcaacgcggacggtgtgcaaaacctgctgaagatcatcggtgacgaacgggatctgttcatcatcgtatcggcaatgggtaagaccacgaatgccttggagaaggttttcgaagggttgcagaagggcgacaaagccttctcgatggagcacatcaccgcgctgaggcaataccacgccgaaatcgtaaacgaactgtacggcgctccgacccggctcgagaagatcgaacggcttttcggggagctcgaacaggtggcgaccgaaacggtctatcgtccggaagacgccgagctgtggtacgacaccgtcgtcgctttcggcgagctgatctcgacgacgatcatttcggagtacctctccgaacggggtatcgacaattgctggctcgatatgcgacgttgcttccgcaccgaacagcgacacaaggacgcctcggtcgatatcgccgcatcgcggactctgctgcgcaacgccatgaaacagtctaaggcctgtattttcatcgggcagggctttatcggaggtgctccggacggcacgaccactaccctgggacgcgaaggttcggattactcggcagcggtggcggccaatatcctcgacgcggaatccatgtcggtatggaaagatgtggacggcatcctgaatgccgacccgaaggttttccccgatgcggtgcagatcgcggaactgaactacctggacaccatcgagctggcttacagcggggcacagatcatccaccccaaaacgatcaaaccgctgcaaaacaagaacatcccgctctacgtgcggcctttcggggacaagcgaaaaccgggcacggtgattcgccgtatgtcggcgccgatcgaggttccgattctgattctgaagaaggatcaggtattgctgacgatccgttcgcgggacttttccttcgtgctcgaagagaaattcgcggcgatcttctccctgctggagcgataccgtatcaaggtcaatctggtgcataactcggcggtgaacctcagcctctgcgtggataactcctggcatatcgacgaggcgatccaagccctccgaaacgaggagttcgacgtaatgaaggtcgagaacatggagttgctcaccatccggggctataacggcgatttgatggagcgatatgcttcggggccggaggtttttctgttgcagagaactcaatcgacggcccgtattgtccggaaaaaccggtagtccaacttcgaaaaaagacgctaaaataaaagaagagaagtggggtcgatgttggacgaatacaagaaaaacattagaaaaccgaatccggaggagctacgactcattaagtttttggtacaaaaggcatctttgaatatgtccgagggctgggaaagatctttgactgtttcttgtttgaatgatggaggaatgggcagtatgaaattatatatgtctttaccgccgaaagaaataatatcaacgatttttgtcagtgagtgctcttttaaggattctgatggaatagatgtgttagcctcattatatctcgatcaagatcatgagatttgtgaagtggatatttggaaagctgatttttctcctttgataaggatctcttcggatattagcttataaaacggaggaacatgggagatttgggatattcgaagcatgcatttcgtgtaaatggtgaaacttattatcctggaaaattatgaaaaaattaataattttattgatcagtcttttcttcattgcctcctgtgccgttgtaaaatccagcagaatagttggaaaatgttacttgggttatccttatcgccagattatggtattcatttgtatgctgagttttatgccgatagtacgtttttatataggtcagctggctgttatgatataatcggccattggtacataagcggtgatacagtgattttatcttcgccaaatttcaatgtcgaaactcgtcctattgatctttatatttttgcagaagaagagattacagattggcgttttcctgatgagtattataaatttacggatatggagggtaatagagatgcatatattattaaaggagatactttatatcctgtactgaaaaacgggaagtctctaatagaatatttgtacgcaataccgaaaccgggccctgaattaggtctatataatagaggaatttattttgggccgaaaaaagataagtaatctttgattgttactgccggacttaatgtccggcagttttcttttgtagattggtgaattttatctatctttctacaaagaaaaaatgtaattatgaaacgactaataattttgttaatcggacttttctttattgtttcctgttgtagtgtcaggcccggcaaactgaccggtaaatggtttcgaagtacaacttgtgtagatgatgcaagaactcctggattatatgtttacttttatcctgatggcggctttttgtaccaaatggcctatgctgacggagctacaggtgcttggcgaatcgaaggcgatactgttattttatggtctccggatttcagtatcgtgttggatagtgttttgctgccgtacggcccacgctgttggcctaatttgaataaatatacagatgctacagatgataatagagatcgctaccttgttcgggggaataaactatatcccatcatgaaagatgggattaatgaacttcctcttgtaaaaatttcaaaaaaacaagcaaaaatagaactacaagattatccattttattacaatgtgaaagattaattaaagattgtctaacaaatccgtgaaattgaaagccccccctgtcagagtgcattctgacagaggtgaaaatgttagaatcggacttgttaggcagcccgttttaatttttggcattttggtagtgcccgaacgcacgtttaccgtcgccgaaagccgcggacgatcgaaaaaatcgtttcggaggcaggaacctcgccctgctgtttcatccgccagatcgtacgtaccatataccgctcgatgtcccggtagagccgtttgaaaagagggcagtcctgataattctcgttgtcgagcagcacgtcccggatcgatcgctgggtattggtgtaattgctcatttcgtttttcagcgccacgccctcctttttcgaggcagtgattcgcgccgcagtcatctgacgcagtttttcgcatacggtttccagtagcaccatcaccacgttgtccatcaacgtgtgcccgtgcatatagagataggtcgtttcgggcgttaccccgagccgaccgagttgtgcggcgaaatcgtccaactccgccgcctgtttgggatgcttgctggcgagcgtttgctcgcggcgggcgacattgcgctgtaaccaggcgatcgtccgggccccgttatcctccaaatcgaggtagttgagccttaccgaagacttgaaatcgacaagagtgaacacatgctcgtccgacagcttcgccgaataggcataccagagaaaaagacggtaaatcgtgcgggaatagtcggccatgaagcgttcgaaatcgaagattcgggtatcgttcttggtcgccttgacgcagacgttgtgcagcgagggagcatagcagaggtaattctccgtggcataggtgtaagtatggaacatataccgtgagtcgcggatcaggcgcgattgctctgtcgctccgttgaacaggaaatcgaaatccgaatccacgcaaagcaacattctctccgacgattcgggaatcatcgacatcagcaccttcttacctttgggcaggtctttgcgggtcggcaccgatatttcgaaatagaggtaaggattggagaaacagtcgaagacgccccgccagaaagccacgtcctcataaccttcgacgaagaccttcacgactcgcagcgacgggtcgcccggtagcggccggggcagcggaccgtcgtttttcctggcaaacggattgatccgccgcagtttatcggtgatttttctcatgtcgttttacaaaggtagtaaaaatgagggcagaataaacaaacttgtttgttttattctgccgaagtcaattatatttttcaatgcccctttatccgatggtcgcagcatcgaatccgcaggatgcttattcgcggcccgggccgtgtctgtaataccgacgttcccctgaattccctccttgggaggggacttaggaagctcggttctcaaagaggttcctaaagtacataatcacgttcgaaaaatatgttttgatttcatgctatctattacataaagtcgggaggaagtaatagtcatagcatcaggtctttcttttgcaatttcacggattttataaatcaagttgctaatttagctccgggagaatacttatacgaaaaaggagaatttcataaaatataaggaataagaaagtcgaaagagtcggattggatttccccgttcaataattatattttgatgttctgttttattactattattgttctatttcttgcattatgggcaagaaccgggtttatcagtctttaacttagctcgtaactatgagcatgcccggaaaccttctgattcccgaggcttatctatttggaccgttgaagtaaaaattatttgtcggaacaagcattgtgcgcatgtccgatcgattttgtcgggttggatgaacgagatcttaaaagaaaagaacgattgaaaggagtaatagtaatcgtagaaagagttgaaataggagatgatctggttgtattttagtaggttcgttaaaaaataacggttgttgtgcgttgtttcggagaaaatccttatatttgcatcgcgttgaatcccgaatgggaaacggacgcgatgcgcgaaggttgcgaaaggtagtttgagagagtggtgcggaaattttcttcttgtgaattttttgaaaaatttggaggaaagaaaataatggttacctttgcagtcccgagccatttttaacgggagcttagctcagctggttcagagcgtctgccttacaagcagagggtcgggggttcgaatccctcagctcccacaaaatcgaaaatcggatgaaagccactcaattttttgagtggcttttttattgctggttttacgagaaggtgttctttgagaagaggatctgcggaggaatgaatgtgatggcattggttttacgtaggatgtgaaaaagtaggattttttcgatgcttcggtttgttctaaacgaggattttagtattttatttatacatcaaaagtattaagtcgtttaatgcgaggaaatttcgtttaaaacatttgaacgcgtgcgggaatccgttcgtaccggtacggttttttggcacgtgttttgattttctgaaggagccgggtcggagcaatagcccgattccggcgaggtttcttcatttatttaagtttgggttagtagtttaggagggtaacctccgaaggcggaaagcagtcgagaagactcctttccgtttttttgtgcctgctgaagaaggcaggcaggacgatttctgttagtgttatttttagaagacaaggtctgccggatattgggctatctgttcatggcaggggctgtggggcgctccggaaggttcgacgaactcttgccgggatacctttgttcggggacgtttggagcctatcgcattttgtagctgatccgggcagaagtttccgggcaggtcgtttcggcgattggggattgggtcgttttgccttcccttcctctttccttttgactgttggcgggcttcctcccggctgtccaggttgtcgggggaggagcgacgtcggggtgatttttgcgtgcagacggtgtcccggtcgctgctcggggtgtttcgggaatcggtcgtgaaacggctgaaattatccgggcaggtcgttattccgcttcgtttcgtggtttttcgcaaagaattttgcctttttcgggaaaaatttgtatcttcgtttcgattgcagggaaatgcggaccggtttttgcatctctcctaaatccccgggcggatgaagatttcgccgggtttggtttaataattaaaaagaaacaacgatatgtcgataacgaagttcaaaggacagccggtgcagattgccggtgaatttgtcaaggcaggagctgcggctcccgatttcgaattggtcaagaccgatctttccaccctttctctgaaggatttgcgtggaaagcaggtgatcctgaatatttttccgagcctcgatacgggcgtttgcgccgcgtcggtgcgtaagttcaacaaactcgcggcggagctgccgggaacggtcgtgctggccgtttcgaaagacctgcctttcgctcatgcgcgtttttgcacggtcgagggaatcgagaatgtcgttcccgtgtcggatttccggaaaacctcgttcgatgagagctacggcgtgctgatgaccgacggcccgttgaaagggttgctggctcgttcggtggtggtcatcgacggggacggcaaagtcgtctataccgaattggtgcccgagatcacgcaggagcccgattatgacaaggcgctcgctgcggtgaagagatagccgcgaggctgaaaatcgaaggaagccggctgtagcggatttttctgcgtcgcgctttgtcgcggaagtctttctgtcgtggacagatcgcacctccggattcacgcaagacttgaacaggtgctttggtccgacttcttggaacagcgtcccgtcactatgtggcgggacgtcgtcgtttatttccataggggcttgccgcttttcgtatctttaattttgttgtggatattttgttccggcaaaacacaaatttatttgcttttgcgttcggttcgttcgcatcttggacgaagcctaagatactttcgttcggtaagatacgaatgggggcgctttgccctcgcttatccgtatctttgcagaagataggatgcggttcggcaatctgtgcgtgcaagcccgcacgattcctctcttcttttcctatctttgacatagtcttagataggatgcgcctcggaaaacagggaacaagttcccgttttctctcgcctttcactatctttgacttcgcctggataaaatcggattccggttgtgtttgccccggctttttcgtattttgacttcgtcttagatacttcgcctcggcaaaatgcaaataaatttgcttttgcattcggcttatttgtatttttgtcttcgatagcggctgtttttacacgatatggagattgtttatcacataaaaccttttgcggaactttcggtgggggagctgcatgcggcagcttcgctgcgcgaacgggtcttctacctcgagcagcatgtcacgacgctcgatgccgatgagaaggatcccttttctctcttcctgtgggccgagtgtgaggggcagacggtcggatttctgcggatgattccgcgtgggattgcttatgccgaaccgtcgatcggacgcgtttgcgttgcccgaacgtaccgccgtcggggaatatgccgggagatggtgagccgagctatcggctacatggttcgggagtggcgggcggaagcgatccgcatttcggcccaaagctatttgatacccttttacgaatcattcggattcgaggtcgtatcggacgaatacctggaagcgggcattccgcataagaaaatgctgattcgcctggatcgggaacatgggcgagaagcgtgaagcctgcggtgaaaaaaaccgtcgcacctgcttttcgccagccttgtaacgacaaagcgactgcgagcctgcgcgacgggaaataataccactttttattttttaactcgttattaaccatctttcgtatgtgcataaaacataccaagcgaaaaattttggaatcgtgtgcggaaagaaaaacgataggggcgggcgaaacatttttatttttcgatccgaaatcggttcggtaacgggtggaatccgaaggcatggaagaatttatcgcttcgctgacgcaattttttaccgactggggttatgtcggtctttttctctcggctttcgtcgccgggagtatcctgccgttcagttccgaggtcgtgctggtgattctggtgcggatggggctcgaccctttgctctgtctgttcgctgccgcttcggggaatacgctcggcggtatgacctgctattggatcgggcatttgggcaagcgggactggattacccgttacctgcgggtcgagccggcgaaaatcgaccgggtttcccgttttctcgaagggaaaggggccttgttcgcttttttcacctttctgccctatgtcggcgaagccgtcgccatcgtactcggcctgatgcgcagcaatgtctggattacggccgttgcgatgttcgtcggcaaattgctccgttacgtggcgattgtggctgctttgcagggagtgctttcgtggttttgaggctgtcggctgccggaacttgcgtgcggcacggcgaacggcatatatcttgttgcgtcgagaatagatagacttggttatgaatcaaagaatccaaaaacaaaatatccgggagaaatattggcgctattcgctctatgtcattcttctggggctgggtacggttatttttgtagaactgattccctttctgggcggcctgttgggagcccttacgatttatgtactgctgcgcgggcagatgcgggcgctgacgatccgccataaattgcggcgtagcctggccgcttcgctgctgatcggtgaagccatcgtctgttttctgattccgctgtctctgctcgtgtggttgcttgtcgctaaattgcaggatgtgaccctcgatccctcgactgttattcagcccattcggaacctggcggagctgattcgagagcggatcggctataacttgctggacggggataatatcgccaaactggtggagctgctgcctcgggccgggcagtgggtattgcagagcatcggcagctttgcggtcaatgtggtggtgctgctgttcgttctctattttatgttgatcggcggtcgggagatggagagctatctacgcaagttcatcccttttaaccggacggttactcaggagtttacgcgcgaagtggtgatgatcgtccgttcgaatgcaatcggcattcccttgctcgcggtcatacagggggcggtcgctctggtcggctattggttgtgcggtgtgccgtgggcgctgttttggggcgtagtaacttgtgtcgctacgatcgttccgctgctcggaacggcgctcgtatggctgcctttggcggcttacctggggctgatcgggcattggggcgcagccgtcgggcttttggcgtatggggtggtggtcattacgcaggtcgataacctggcccgcttcgtcctgcagaaacggatggccgacacgcatcctctggtgacgattttcggcgtgattatcggcttgtcgcttttcggtttcatgggggtaatcttcggtccggtgcttctctccatctttattttctgtgcggatcttttcaaacggcgctatctcgatgaagctccgatgaacgaagtacttgcctcgcctgcggaacgttcgtcggaatccggcagggaatgaatttccggcagttctatcgctgtatgtgcagaaatcgcagcggcatcgctcccggcgcaggctgtttcgcgggttgcagtcgtttgcgaatccgaattgccggttggaactacggacgggggaaatgcctgcgtattgtttgcccgttacggcgaaggcgggaccgaggttgtcggcccgatctttttcggggaatgacaggatactcggtttgctgcgattcttgttaaaggacggggagggaataatcgtgtgacgaagcctctgtttttcggattattgttgttgcgggagcggtcgttggctgcggccggccgatttggagcgggggagttgcaaacggaggttgtccgtatgaggatttggccgggtatgcgtgttttacttgaaaccgaggtgtgattcatatgtccgtatcgtggaatccttggcacgggtgtcagcgtgtgagcgaaggttgccgggagtgttatgtttatcgccaggatgctgcctggcaaaaggacggcgggcacgttgtgaaaacgacggccttcagcctccccgtgcgccgaagtcgggacggccggtggaaaattccggccggggagatggtgtttacctgttttacatcggactttctgcttgccgaggccgatgtctggcgccgtgaggcatgggagatgatccgtttgcggcgggacctgcattttatgttttttaccaagcgtatcgaccggttgtccgagtgtctgcccggggactggggtgcagggtacgagcatgtgacgatcggttgcacggtggagaatcagcggatggccgattatcggctgccgattttccagaagttgccgattcgtcacaagattatcgtttgcgccccgctgataggtcccatagatttggccccgtatctcggaccggaaatcgaacaggtatctgtcggcggcgagtcgggtcccgaagcgcgtgtttgcgattatgcctgggtgctctccctgcgggatcagtgtgcggaacacgatgtttccttttgctttcaccagaccggggcgcgtctgctcaaggacggacgtctgtaccggattcggcggcagtttcagcatacgcaggctcggaaagccgggatcgattttaaggtaggagggtgatgttatgtgcacttgcataaaaaatccgacactgtcagcagtgccggattaaatttaggaaatggcattttccctgtgggaggttaaaaatccatttcgatcacgcgatgctgtttgtcgaacttgatctccattctgttgtcgagttttacctcggtgctgcgtgtatctctttcgatctgtacgatcttgttgtcgggatagttgtcggcgacgtacttggcgatcggtgcagggatgattccggtcggaacggcgctgtacttgcaatcgatgtcggtccactcgcccttgcggtcgaactcgatcttgtcgccgtttttgaacgcgatttcatagcttttccgaaaatcggattcttctttggcaaaagccacttttcgatccccgaaatatttcttgatgaactgctgtgctgtctggggcagttgcgaaacttggatcggtttatcgttgccggccgaggctgttgtggccagtaccaacatactgacgaacaatactacgatttttttcatattttttacaattaaagttgtattgtttatccttgcaaaattgaggcctaattataaatttcgtttttgatgcagaccggcggtttcataaaaaagaggatcgctgaattttcagcaatcctcttttcttggggatgaatgcgattactccttgccggccaggggcgctgcctgcgtataagtgcgagtcgccagctccttgtcgagcatgaatacacccatcttatctcctgaaacgagcttgagcgagtcgatgattgtcgtggcgctctcttcttcctcgacctgttcgtcgatgaaccatttgagcatacttgccgttgcatggtctttctctgtaacagccatgtcgtacaggttgttgatcattgccgtaaccttcttttcatgagccagcgtatcttcgaaagcctcgagctggcttccccacgatgttctcacttcggcgatcggagccagcagaacctgtccgccgcgtgcgagcagatagttcatcagaatgcgggcgtgatcctgttcctcgcggaattggataaagaaccagttgccgaaacctttgaggcctttcgattccgcctcgaccgacatagacagatagagatatgccgaccacatttcggcattgatttgcgcattgagtgcgtcttgtagtttcttgctgatcataactattttgttaaattgttaaatttcctgtttttccgttattttccgcgaactcttccgcagctgtcgttcgtcgaaaatgtcgagcgaaacatttctctttttcggtcggagagtcccggactccggttttgtcgttgcttcgtcaatcgctttaccctgcaaaaatagtgcaagtctaaaacgaggcggaaccggccatcgcccggaggcttttactttatgcaaatataagcaaataacgtctatttcgtgcagatttttttatacgattatttgatctcgacataggggaaaacaataaacgatgcccgactaaagtcgggcatcgtttgaaagtattttgtttgaaaaattagcagttttcgccgtcgtaagcccattttacatagatggaaccccacgtatatccgccgccgaacgacgccagaatcaggttgtcccctttgcagagagccgcttcgtattcatacaggcaaagcggaatcgtcgctgcggtcgtgttaccgttgcggtcgatattgatcatacatttctcgcgtcccaatcccatacgtttggccgtcgcgtcgatgatacgcaagttggcctgatggggtaccagatagcggatgtcctgggcggtcagatggtggcgttgcatcatctcctccgatacgttggccatgttcgatacggctgccttgaaaacggctggcccgtcctgggtgatcgtgtgccagttgttgcgcacggtttcttcggaagcgggatagcgcgagccgcctgctttcatatagaggtgttgttcgcccgaaccgtccgaatggaggatcgcatcgatgacgccgtaaccttctttgttgggttccagcaatacggccgctgcgccgtcgccgaaaatcggacaagtgttgcggtccttgtaatcgacgatcgaggacatcttgtcggcgccgacgacgattacttttttggcatagcccgtttcgatgaactgggaccctgtcgtcagggcgaacaggaagccgctgcatgcagcggaaatgtcgtaggcgaaagcgtttttacaaccggcctggtcggcgatcagattgcccgtcgaggggaaaaacatatccggggtaaccgtggcgcagatcacgatgtcgatctccagcggattaaccccggttttttccagcaggtctttgatggcgcgtgcgcccatataagatgtacccaacccctctcccttgaggatatggcgggttttgatgccgatgcgtgtcatgatccactcgtcggaagtgtccaccattcggcttaattcgtcgttggtaagcagataatcaggcaggtaggcccctacacctgtaattgccgctgtaattttcttcattcggggagcggtttagtttttgaaagcattctgcaacttcgcggtcacgccggtttgggcgcaacgttcggtcgtaagaatcatatttttgattgccagcgccgaagaacatccgtgtccgatgactaccggggcgttgacaccgagtaccggcgtgccgcccacgtattcgtagttcatatccctccagaacggagtttcggggattttaagcgctttgttgatccggaaaagcccctctacggttttcagcagcgtattgccgacaaaaccgtcgcagacgatcacgtcggctacctgccccgagaagaggtgagaaccttcgacgttgccgacgaagttgaactcttcggattctttcatcagttcataggccgccttgctttgggcgttgcctttggtttcctcctctccgatattcagtaccgcgacccggggattccggatcccgagcatagcctgggcgtaaatcgaaccgataatgccgtattgagccaatacttcgggcttgcaatcgacgttcagacctacgtcgagcagcaggactttcccgcccgtgacggtcggagcgaccgtggagatcgtgggacgtatcacgccttcgatcggcttgacggcctgcatcgaacccaccatcatcgctccggtgctgccggcgctggcgaagccgttgatgagtcctttggccagataaccgaacccgacgacgatgcttgaattggtcttttgctggaaggctttggccggatggtcgcccatttcgatcacttcggtcgtatgtacgatatcgaaccggtccgccgcacagttttccgctttcaggactgcccgaatccgatcctcgtcgccgaagagtacgatccggcattcgtcgccgattgcatcgacggccattacggcgcctttgactgctgcctccggggcgaaatcgcctcccatggcatctacaccaatctttaacataatctgagatttggttagtaaaatagattacgctctttcggctgaaaatccgaaagggacccggcggcggagattattccgccgctttcttctcgatagccagcttgccgcgatagaagccgcattcggggcatacccggtggtagagtaccgatgcgccgcagttcgagcaggttacgaccgtgggaacgactgctttgtagtgagttctacgcttgtcgcggcgggttgacgagattttgtgtttaggatgtgccattttgtattatcaattattagtttaatgtttcttgtctttttcttcctgctccatctgttgtttgatggcggacagttgttcggtccattgtccggagcccgaggcctctctttcccgctgttgcgtttcgttctcgatcgtttcgaactcctgctcggaaacgatgcggaagcgtcccaacatatccggatcgcactccccgtcggggtgcacccgctgatagggcagagaaaggacgatgctttcgtaaatatattgcgtcagatccacgaaatcttccgagggtgagagccacaaggtatctccgtcgtattcgcggacttcgtcggagaatttcaccagcaattctccttcgtaatcgatcggaacggaacaatcgcccaggcagcgatcgcactccaccactacgctgccccggatcgaaatctcgaggcgaagctgacgtgccgcccgtaaaagattcaccttcacgtcgcagtgcccgcctttgatttcggtgttttcgaaaagccggaacaggtcgtcgcccgcttcgaagtcgaacgtatgttctccctccgagaggcctttccaggcgatggaatattttcgtgcggcgttcatttcgatacttccagtctgcaaagttatgaaaaaaacggaaaagtaccaaaggtttcgccggttttagcgactctccccgcagggacgtgtgccggaatgattccgagtgccgtctgccggcggtgtatccgggagagattgttgcccggatgtgtgggacatagcgataaaaaagttatatttgtcctgtgatgaaatccgttgaaaaatttacggtcgaaatccggagtggcttcgaccagtggtggcgttacaatgccgcgctgatgtgtggggcgttcgatgcctcgggtaaccggatcggctttgcctcggccgagagccgggtggctgagatggggagcaatctggaggcaccgccggaggggttggacctgcatcgcagtcttacgctcgaaaccgttccgtgcgagcgtatcgtgctctatatttatgtgatccctcatacgctgccccgcgacaacgaaatcgggggacatcctccgttcccgttgcaggtacggattcgctatggcgaccggaccgtgctcgataaggagtattccatcaaccagtggggaggggcgtcgatcgagctcaaggtgtcgcagccgtgatgcgggcctgcggccgtaggccgatgcgtctatggccccaattttccgatctccgttctgaacctgttgcgatcgtaataaaaataaaagaggttctccaaaattttggagaacctctttttatccgtgtaacgagggattatttgttgttgtatgcggccatcttaccgatcagcataatgatcttgttcgaatagccccattcgttgtcgtaccacgaaacgagtttcataaagcgatcgttcagggcgataccggccttggcatcgaagatcgacgtacgggggtcgctcgtgaaatcggtcgaaaccacgtcgtcctcggtgtaacccaggatacccttgagttcgttctccgaagcgtgtttaacggcggctttcacctcgtcgtaagtcgctgccttttccaaacgcacggtcagatcgactaccgaaacgtcgagcgtcggaacgcggaacgacataccggtcagtttgcctgccagcgcggggattaccttgcctacggccttggctgcacccgtcgaagaggggatgatgttgccgatcgacgcacggccgccgcgccagtccttcatcgaaggaccatccacggtcttctgcgtggcagtagtcgcgtgtacggtcgtcatcagaccttcgatgatgccgaacttgtcgttgatgaccttggccagcggagccaggcagttggtcgtgcacgatgcgttcgatacgatatcctggcctgcgtaggtatcggcgttcacgccgcatacgaacatcggggtatcgtctttcgagggggccgacataacgacgtatttggcgccggccttcaggtgggcctccgacttttcgcgggtcaggaacagaccggtcgattcaacgatgtattctgcgcctacttcgttccacttgaggttcgcgggatctttctctgcggttacgcggatctcgtgtccgttaaccaccagcttgtcgccctttacctcgaccgtaccgtcgaaacgaccgtgtaccgagtcgtatttgagcatgtaggccatataatcgaccggaatgaggtcgttgatgcctactacttcgatagtgtctgcgtgggtgcaggcagcccggaataccaaccggccgatgcgaccgaaaccgttgataccaactttgatctttgacatgacgtattttattttaggtaaatattcgttgtcgattttccctttcggaagaacaaaattatacactttatcctttataaacaaatatactcgcaaatatttcgccagaatacggcggaaggccggaaaactttccggccttccgatcgtcaggcgtatcagttcgttattctccgtcgggagtcatctgtttggctcgtttggccatggccgaagcgaagacgaaatcgttcagctctctgttgcgggcgtgcagaatttcctctttggttccttcccaccacttgcgtccttcgtggatatagacgatcttctcgccgatctccatgaccgaattcatatcgtgggtgttgatgatcgtggtgatgccgtattcctgggtgatctcgtggatcaggttgtcgatcacgatcgaagtctgggggtcgaggcccgagttgggttcgtcgcagaagaggtatttgggattcagcacgatggcccgggcgatggccgcacgcttgatcataccgcccgacagttctgcggggtagaggtgattggctccgttgagccgcacgcgctggaggcagaaattgacccgttccatcttctccttttcgctttgctcggtgaagaggtcgagcggaagcttgacgttctcctcgacggtcgaggagtcgagcagcgcaccgccctggaagagcatgccgatatcgcggcggatcgcctttcgctccttgaatccgagggccgtgaagtcgatgtcgtcgtaccagatactgccggaatcgacttcgtgcaggcccactagacatttgagcagcaccgtcttgcccgagccgctcttgccgatcaccaggttggtcgtgccggtgtcgaactcgacgctgacgtcgtcgagaacgacgcgtccatcgaaggatttcgagatatggtctaccttgatcatataagcaggatttgggtgagaatcaggttgaagatcatgatgacgatcgagctggccacgaccgccttggtcgaggcggcccccacttcgagcgagttgcctttggcgtagtagccgtagaaggctgaaatcgaggtgatgatgaaggcgaaaacggccattttgataagtgtgtaggtgatcgagtagggtcggaagtcgtacagcaggccctgcacgtagtcgtcgggaatcatgatgcccgtcagcgctgaaatcaggtagccgcccgcaataccgatcaggatactcaggatcgccaggaaggggaagaaaagcacggttgcgacgatcttcggcaggatcaggtacgacgccgaattgacacccatgatttccagggcgtcgatctgttcggtaatgcgcatcgtgccgatttcggaggcgatgctcgaccctaccttgccggccaggatcagggctacgaccgtcgaggagaactcgaggatcatcgtctcgcgcgtggcgtagccgatgatgtatttggggatgaacggcgattcgaggttgatcgacatctggagcgtgatgaccgcaccgatgaaaacggagatgatcgccgtcaggccgatcgagttcagtcccagcgactccatttcatagatgatgcgacggcggtagatcgcccgcttctccggccgggagaagaccttgcccatcaggataaagtaacggccgatcagttcgaagattttcagcataacgttttttactgcttgtccgggtcgtttttgtcggtttctgttgcggggacttcttcgaattcgatgtagtcgcccacgtccttgtggacgcgtttttcaccggcacctttcgttttgcggatatggatttcgccttcgcgggcattgccggcaggaccgccggatcctccgggaccgaagccctgaccgccgaattgatcttctaagtctttccgcatgcggtaaattctccagcggaaggagagaaggaggataatggccagcacgaccaggcccaggagtgcatagagaacgaacatggcgataccgcccaataccgaaggggcaaagagcgccagcaggaagatcagcagacagaaaagcggattgcgccggatgaagccgacgattccgtcgatgattgctatcagtagattcattgattcagtgtcattgatataaggtgttgcaaaggtagtgaaaacgaggacagaataaaataaacgggtttattttttatgtcgagtgtcttccggtcttcccgaaaggtagtgaaaacaccgatatccgccttctataaaggtagaaaaaatcggtcattcccggagaatcggtgtgatttctcgattaaaagtgctaattttgaagcctaaaatcaaatctgcatcggaatattatgttgttgaacaaacttactgccatttctcccgtggacggtcgctaccgaaatcaaacggagaaactggccgattatttttcggagtatgccctgattcgctaccgcattcgggtcgaggtcgaatatttcatcgccctgtgcgagttgccgctaccggaactgtccggggtcgaaaagtcgaaattcgaagcgctgcgggcgctctacctcgatttctcggaggcggatgcactgcgtgtcaaggagatcgaagccacgaccaaccacgacgtcaaggcgatcgaatatattctgaaggagaagatggaggcgctcggcctttcggcctacaaggagttcgtgcatttcggcctcacttcgcaggacatcaacaacacctccattccgctgactatcaaggatgcgctcgctgaggtttacttccccgcagcggccgaggtgcttgaccggcttcgggagatggcccgcgaatggcacgacgtaccgatgttggcccgtacgcacggccagcctgcgtcgcccacccgtttgggtaaggagatgctggtcttcgtcgagcggcttgagaagcagttggcgcaactgcgcacgctgcccgtgcctgccaagttcggcggtgcgacgggcaatttcaacgcgcatcacgtagcttatcctgcggtggattgggtggcttttgccaatggatttgtgaacgaccgcctggggctggagcgttcgcaatatacgacccagatcgagcattacgacaacctggcggcgattttcgataacctcaaacgcatcgacaccgtgctgatcgacctctgccgcgatatgtggatgtatatttcgatggagtatttcaagcagcggatcaaggccggcgaggtgggttcgagcgcgatgcctcataaagtgaatccgatcgacttcgagaatgccgaggggaacttcggcatcgccaatgcgatttacgaacatcttgcctcgaagctgcccttgtcgcgtttgcagcgcgatctgaccgattcgaccgtgttgcgcaacgtcggcgtgccgatggcccattcgctcatcggcctgcggtcgctgctcaaggggctcaataagctgctcctgaaccgcgaggcgctcgaccgcgatttggaaaacaactgggcagtcgtggccgaaggtatccagaccgtgttgcgccgggcgggttatccctcgccttacgaggcgctcaaggccctcacccgcaccaacgcacacattacccgggaatcgatcgccgagttcatcgaatcgctcgacgtggccgagagtgtgaagcaggagttgcgggcaatcactccgcaaagctatacgggagtattcgaatagccgttcagccggaaaggaaatcaaatcgccataacaaggagtcctcgttttcggggattccttttttatcttggaaactttgtatgaggtgcggttttatcccggatctgtttcgtgtgtcgagacgttgtcgggagaggcgattgtctgtcgcttgccgtggcggttatagtcatgaccttctctgaattttcttttcgaagggaatcttcggatacaatgcggattccgaattattttttggcattgtctttgtaatgatctattcaattataaaaaagactgattgtgagaactgtattgagatttttatttcctgcgaaaagttgttctgcgaaggcatcgggcattttgttggcatcccgcatgattttcggcggactgttgttttcgcatggcattgccaagtggagtaatttcgatacgatgtccacgatgttccccgatccgctcgggatcggcagcagtgcttcgctgtcgctggcaatcttcggcgaagtgatctgttctctgggatttatcgtcggtgcgttttaccggctggcattgatcccgatgatctttaccatgtgcattgcatttttcgttattcacggcgcagatccgtttgcggtgaaagagctggcactggtttatctggcgattttcgtcttgatgtatattgcgggtcccggaaattattcggtggaccgtttgatcgctaaaaaaatcggcggcgggaaatagcggccgaatcggtgcaatgatgccgaatttttatcattagttaatcaataagatctcgggcggccaggctgccgttgttgcaaatgcacgttggatgctgcatattgccgataagtgccaatatccatttgattcgatgcgggaaggcgaaaggtgccgatgcagggcgcctttcgctgtattcgtacccgttgttcgtccggggtttcgagttcgttcgatgctgttcgggcagcttgcgcccgttaaatggaaaaatatctgttcggggtcgataattgtgtgaatacccggttgtcgaattgattttttatttatatttgtaatatcaaaacacggggtatgccccggtaaggcgtaaataaacccggatattgctttgcagcctatttgccgcaggcggatttcgattcggtccggttgcgtctcggcgtgaaggtaatagaataggtttatcccggattgttaatggattgataacacaattataaaaataccgatatgaaaaaactctacttcttctgcatagcgctcgtggcgctgatgctcgcatcgtgtggcggtaaggattaccgcgagatgctgccggccgactctttcgtgatcgtttcgatcaatcccgaatccctgtcccggaaagcgcaggtcggcgattttacccaaagcgtttattataagatggccgagcaagctttggccgatgcgcccgaagaggagcgcggacgcatcctctctttgttggcgcatccttcggaaacggggctggatgtgggcagcgacgtgtttatgttcgtgacgatggagaatgcgtcgcagacaggcaatcctacggtcggcggtttgttcaaggtgggtgatcgcaagaagctcgatagtttcctgggctggctttcgcagaagagcggtttcacctcgttcgaagaggatggaatcaccttccttgccaatacgcagggcgcggatatgcctgtcgtcgcttatgacgaaacggcccttttggtctataccgctcccgttgacaatgatcaggcgaaagctgccgccaagaagctcttcgcccagaagaaaacagagagtctgatgggcaattcgcagctggcacaggccatcgagcgtcccagcgatatgaagttcgtgatggattacggttcggttatggcggtagccggagagcagatcggcacggccggattgtcgggtttcgagttcctgaacaagatgtcgatggcgatgccggtcgatttcgagaagggtaagatcgtggccgaggcgcggattctcttcagcgacaaggaggccgaaaaacagtatatggagatggtggcggctcagcgtaagatggacggcgattttctgaagatgctgcctgcggagaatgtagcgacgctcgcgggcagtatggacggcaccagaacttacgaaatgcttcagaaaattccgatgtattcgatggtcttcgccatggctccgcaggtgaagccgatcatggaggcgatcgacggcgacatcgctttgtcgttccacgggatgacggacaacggccggatgccggagctttcgctgatcgcggagctgaaggatccggcgatcatggaaacgatcaaagggatgattcccgtgccgatgcaggagatggctcccggccagtatgcgttgagcccggatgccaatacgacgatctatttcggtttgaacgacaatacgttctatgcgacgaccgattccgacgccctggtattcctgaccggagcacagacctctgcatacgaggccgaggtcggcaaactgttccgaggctcttacggtacgatgtttgtcgatttcccggccgtgcgcagcctgatcgagagcctgatcgcacagaaccggctcgatcagtcggcagccgcatcgctcatggcgctttcgttgttcgatacgctggagatcaccggccgtacggagcgtcagggcgagcttgtcctgaatatgacggataaggataagaatgccgccgaggttctttacaagaccatcgagggctttgcccagatgttcgcggcgactatgttttaagtcggaagagtccggacagtcgttttgcggattaacgggtttttcccggaatagcggcggctgtgcgaggcgatattttgatatttcgttcgacgtggacggcgagtgcggtcgagtttcgtgctgcccatgttggagaaaaaggatcgatcattcgactctgcgcggctggcatttcgcctgccgcgcagtcgtcgtaatgttcccggctcgtgggcgggttcgccttcctgcccggcggggtgaatgaagaaggagattggacgatggataaaatcggattgcggcaggtgctgccggatgtttttgcggataatccgcccgtggggtcggagatttggcggagggatgtaacgttcgacaagggacgtgtatatctggtcgaagcggcttcgggatcgggaaagtcgtcgttttgtggctatttgtacggctaccggcgcgattattcgggaacgattcttttcgatgaccgggatattcgcgagttgagcgtcggggagtggagcggcctgcgctgccgttcgcttgcgatgatgttccagggactgcgtctttttccggagttgagcgccgtggataatgtgcgtctgaagaacaacctgacgggccgccgctccgaggcggagattgcctggttgttcgaggcgctgggtattgccgagaagcgggaaacttcggtgtcgaaactctccttcgggcagcagcagcgcgtggctttcattcggatgctttgtcagccggcggatttcatgttgctggacgagccgatgagccacctcgacgagcggaatgctgcggtcatggccggaattcttctggaagaggtgcggacgaacggcacgggggtcatcgtcacctcggtaggcaagcgtttcgagatcgagtacgataaagtcttttcgctatgaaactgatctggcaattactccgtcagcacgtcagcgtgttgcagttggcgggctttctggtgaccaatctggtcggcgtggcgatcgtgcttacggccgtacagctttaccgggatgtgacgcctgcgctccaggcgcccgattcgttcctggacaacgatttcatcattcttaccaaagaggtcgaaggggccggcatcggaaagacctccttcacgcagacggagctggccgaacttgcggagcagcccttcacggaggcgctgggcgagtttacgccggcacgttacagcgtgatgggcgggatttcgttggcggggatcggcatgcggacctacctgtttttcgagagcgtacccgaccgtttcctcgatgtccggagcgacgagtggggtttcgaggaggggagcgagttcgtgccgatcattctgcctcgcaattatctgaatctttataatttcggattcgcttcgacgcgcggattgccgcaggtgagcgaagatctcgtgcggggtattaccctcgatctggatctttcgggacgggggcagttccgaaatctcaaggggcgtgtcgtggctttttccaaccgcctgaatacgatcctcgttccggaggagttcatccgctggtcgaaccgtcggttcgccgataaacctgcggccgatccttcgcggatcattctggaggtgcggaacgctgcggacgaccggatccatgaataccttgcgctccaccgctaccagatcgaaggaggtgccggcgacgaaggccgggcgagctactttctgcgcatggcgacgggagtggtggtcggcgtggggctgttgattaccgtactctccttcttcattctgttgttgagtattttcctgatgctgcaaaagaacctgaagaagctcgaagacctgttgatgctcggctatacgcctgcgcaggtggcacggccctatcagttgctggcgctggggctgaacctgtcggtgctggcgtgcgccgtgccggtggtcgtttgggtgcggtcgaaatacctcccgatggtacgaatgctcggtgaggattatgcggcgcccggtatctggggaatgcttctggccgggatcctcgtggtcggggcggtagtgttgatcgatatgctggtgatccgtcataaggtgaacggactttggacacagcggtagcgtcgtgatgcaataatgataaaatagctgtctccaatgttgggttgctattttctttctgttttacgaaaagagagtttggagataataattttcctgaaaatgttgctgttgtgtattttagcgggacgttggaatctcccgattgttttcaaattgagggtgttccactctctgtttataattggtcctttatggaagtccgtcaattcaaatagtatctacttttaaatggtgcaaatagtttccggtcatgtctgttcgaattatggtcggagaagtgcgttcgcgtagtaatactttttcccgatgggagcaaggattcggcgggagacctgctagttggaatttatgaggcagaggatagaattaacggatatggaagtattgccaattgagaaatggggtatgccgttgctggatcaacgactttcatagatattttttgtctgttgtctatgtctcggttctgcattattccttggcaggtatcgtataaaaaacacagaccagactacgttttgtggattgaatagttttttcttaactttgcctccgcgaaaaatcgtaaat

SEQ ID NO: 10395 - DNA, 7291 bp, Unknown
  gut microbiota DNA sequence
atttgttataattttaagcctatttcgcgactgtccctaaaatagcaatgaaagattatcaagagtctcaatttcaagttttagaatataagatacaagacatttcggcaaattcagaaagccctaatatcatattcgccggtttcagatattcggacagcgccaatgttgttgggactatcacagaaaagatgaagttgttatcgataatgttgcaaaaaacgaaaataaaaacatcaatcttatttcgttgaactaaataattatgtaatccccttgctgtaaataagtcacaacaaggggatttttctatctctaaattcttggtataaagttatatgtagatgcctaaattaaaaaatctatctccctcgaccttcctgttattcataggtcacttcgattcgggcaatcgtagatgctgctgatgtctcaaactcaacatatctggcaggcccctccccttgtttccaagtataactgctttcatcgtaaatgccctcgtacagatctgtgctccaagagcctatcttgatatccttgcctgtaccgggcgtcataacaatttgggtgatctgctttccattctgcccttcgatgcttattgttttgccagagccgaggaatactcccaaaccttccgattgccaagatcctctggtcagtatcataagacagccgtcttccgtcatgactccatccggagagtccggtttctccgggcttgctgccatcgttgcgaagtcaaacagggccgtatttgccacttgtcccgcattgggatcagcctcggtgcttacggtcgtcgtcgcggccaaagaactcgtattcgtttcgggatcggcaggattggcaattaccgaaacattgtattgcactgcgtattccgccatttcaaattcaacagtcgcctccaatacaccttgtttcacctccgtcccgcaagttacgtcgtacgaagccgctccgtcgaccggattccaagcgaccgtcacggttttaccagatgccgttgccgaaagcccggtcggcgtgggtagtgcggtcaagggagctgaagagcctcccatcgaacaataatagatatagacattaccaggcgaggtggtcaagttgaaataactcgtactgctactaccactgagtgcacgcgtagtcttgtctgccgaataaatacgcgcaatccctccatcacatgagattgtccaagaagcagccttagttacatcggactgcacatccatcatcaattcatcttcagtattcaccccagcattcagatacccctccgccgtttccatagaaaatgtcgtccggtcatacccttctttaagtgtaataatttgtgtatcggaagataaatccatgatttgcaaactctcatctacaacgaccagttcatccgtagacgcataccagcgaggctccaaagatgttgaaaatttattcttactcatcaatctggtttctccagagaaattattcctaccaataacgatcttatcgccaaatttcaactctgaagtccgtgtcatcaacttgtaaacgtcgcgtttaacaggtgtcaaaccggaaatgatgaattcagacacacgagctgcctcgaatttcaaggttttattggtaaaatctatttctttccgatagatattggtctcggttacaacctctaccgtcaactttttaccactaagatcggccggcataacagaaaaccacaccaaatcttcacctgaagcctcacgaccgttcatagccaaagtaagcgtctccgcagcggaatcatccgccggagcgtagttcaccgaaccgttgagcagattagccgtgcagctgccggccaatttcgtgcccggagcgacaagagtgatcgaggagatcttttcgccgggagcgaccccttgcagcctcatttttgcgaaggcaacgacacgatggaacgaaaaattgaccgtattatcaacggctgttacgacatatttgctaatcaacagatcagcctgcgggtcgaaactcgtttcggtcggcgtctgctgtgccggaatgacaagtgggacctccgtgagcgttattcccgccgaagtttccattcccggatagaacgcccagaaataacccgcatactcgctgtcagccatcagagagaatacagctgccccgttatctttcaccgtatagtcgtcggcagtggttgcataacggagaacacccgcatcagactctttagcatagaagacgcctatccgttcgcccgtttcgctccaatgaattttgttattctcatcaacataagtccgggtagtctctttttccgctgttacggtgagtgtcacggttttccctgagaagggggggggtccgtcgaagaatctttcgtacaagaacttgacagagagcacaacccccaaactacaaggccacatataataaaacgatattttttcatattagtgcatttaattaaaattctccgtagtcatcggtttccaaattttcacctggccaggtttctgtggcggaataactgctttcggcaaatccgcgttcgattcgcaattcaatgaactgcacctcgggcgggcagtagaaattcttgcatttcgacaggtcagtaatcttcatcatacattgttgcttttagaattaaacgattaattgttattccggttcggattgcgatttgcgccgaatcgtttttatttcctgcaattttaagattttttttgaaaaaattaatatttttttcaaaaaagtctatatttgtaatgaaatctctaacacttattactttttctaacttaaaaatgttaagtatgaaatttaatttcacttatttatggagtttggcggcactcctgatgtgctgcacttcctgctccgattcggatcctgctccaactcccgaggaggacgaaacggtatctctgatcgcaacattggaaaacgagaggctttgggaatccggagatgaggttctgatcaacggaatgaaatataccgttgaagaaggagtcggcagtgcagcagccaccatcaaggtacccagggccgaacactactacgccgcttacgacacaggtaccggcacagtgacggaaaacatactctcgtcggaatttacctcgacacagaatgtttcggcggatatggcccgccccatggttgcatcaagcgtcacccccgccctttcattcaaaaatctgctgggatctctccgcctaaatatttcgggtgacaacggtacaaaaatcacaaaaatagtactgaccgcaacttcaggcagcaatctcactggaaagttttccgttgatctggcttatgaggatacccctatgatcgaatggaccagtgaagcatcttcaacgctgaccgtcgatttgggtagtcagggtattgaattgaaagaagctggaacccctgtagatgtattattgcccgcagcttcctacggaggattcgcggtaacaatatacgatacgaaaaatggcgtgatgctcaatgagaaactccctgcaatcgacataccttcgggagaaaccgtttcgacagatgttacctatgaaccgggaacggagcaggtagtttatctgaaagccaaagtcgagaaagcggctgacggttccgacttcatctggaactccggctcctccatatacgttaatggagaacccattatattgtaccgtggcgaaggaacggccgacggagaattcggcccctgcctccaagccgattcatactatgcatcgacatccaatgcttcgatcgacggcataagcggaacgcagatgcgcgtgaacattccggcaaaacaggaatacggcgcatccctgacaaccctcaacccggccgcagcaacttccacgtccacagacctaaacttccgctatgtcgcaggtgttgtcaagctgaccgtttcgggtccacatgcagtgcgcacgattgaattgcaaggcaagaacaaccgacgtctggccggcgacggcatgatcaacatgacggcatcggatttcgcactctctctcaatgccgacgcctcgaaatcgatcaccgtcaattgcggaaaatcgggcgtttccatcgagtcgggacacgacttcagtttcgtactgcctgcaggcgactacagcgaaggctgaccttatactaacagacaatatcggccttgtatccacctttgaactgccaggaacgacggtcaatcgcaacgaaatcgcctctttgggtgaaatcgaatggcccggaggacagggtggagagaacgatttgagcgcttacggcgtagcaaactgctacatggtgcacacagcgggaacctactcttttcggacacgcagaatagacaacactccgattcagaatatcgcgaaagccgattggctttgggtgtcgcgcgtgggtgcttccgaaaacaacgaactcatttcagacatctcctacgccgacggtatgatctcattcacagcaactgcaaacagaggcaacgccctgatcgcagcattcgacgataagggagaaatcgtatggtcctggcacatctggatgacggatctgccggagacgttcgactacgagaacaaccccatctaccagagcggcggaaaaaccgacggattctacgttatggaccgcaacttaggtgcaacggacaccaaaggtcaggaatcctatggtcttctctaccagtggggccgtaaagacccatttatcggcggcaaagcaaacgagacggtcgctttcgaaaacagcagtgaactgaccgtatgcaaccctacctacagtcaggcaaaatgggtagcagcggaatgcacaacagagatcggctccgttaagcatgcgatttgccagccgatgcttttcatatacggcgatcaggttaacagccaggcgaactggctggatccggcaaacaccgaagaagactggaaatacgtaacggacaagtcattatggcgtcctttctcgaaaagcaattacgatccctgtcctcccggctaccagactcctcgcaagggtgtgttcagcaaggttcagaatcgtgcggatcgattccccaatgagggagtgagatatacaaccgatgcaggagaagaaacctggtttccgttccaagggcaccgaagtgcacatccttcggataaaggcgcattgcgctatgtggccgaagaggatggtctggtcaatatctggagcagtgaattatctgtcaatcaacgtgcttgggttttctttgtttcgtggcctctgttggataacgagtcgacggacgactcttggggctacggcaatcccgttcgttgcgtaaaaacctacaattaacaattataaattctgaatttatcttatttgctttcggaattcctgcaagtttgcaggaattccgaagacaaaaaacaaataaaaatattattatacacgaacatgaagaaactttttttcatttacttacatttgtttgcgccggatttactctgctgttggctccgggttgtaacgacgacgaaggagagaagacgggaccaaccggagacgaaggaaaagagatttactctttgagcgtaacacctgacaaactggaattccagagtacaaaacaaacagtggaggtaaccgtcacaacgaacggtccctattgggagtatacggataatatctcgtggctggaaatcgaacgcacggagacgggattttccgcaacagcaaaagcttattccggcaatgagacgcgtacgggtacgctgacggtctatgtcatctccgaatcgggcgatatcgccgcaagacaggatatccccgtttcacaggcttcgcccagcgagactcccgagggcatggtagtcttcgacgacagcactttcaagaattttatgctctcttactatgaccaagactatgatggtgcaatttctcctgaagaagcattgcgtgtgacggaactctatctcggatttgacgaggaggacgaagaagcagtgccgatcacgtcgttgaaaggaatcgaatactgcaaaaacctaatcaatctggaatgcgacttcaatgccatcacctccctcgatttaagtgggttggacaaactcgaatacgtagattgttcttataacctcatcaagacagcaaacctttcgggatgcatctcgctcaaacagctttacgctaatgtgaacgaaatcggagcactcaacctgaaggaatgtgccaacttgcagctggtacaggcctacaagaacaaactgacggcttgcgatgtgagcggaatgtcgaagctcgtttatcttgacgtaagtcaaaatcaacttacgactttaaatatatccaactgttctgaaatgctaattgtgaactgcggttcaaacaaattggcggcattggacctctccggattagaaaaattgacttcactgggatgttacaacaacaatcttacaacacttgatacatcgaagttgccggaaatgagtttcttagaatgttatgccaatagtcttacgacactcgatctgacaaccaattcgaaaattgcgacactgcactgccagaacaatctgcttaaaaccctaaaaatagagacctgccagaatcttacatcgatcaattgcagccaaaatagcttggaaggagaactcgacctctcgagccggacagaactccgaaagattgattgtggcaatacttttctgacgaaattgaacctgaccgattgtacaaaaattgagacattaaactgcaacaatgcgaatttttccgagctggacgtcacaggacagcccgcaatgaccgagttaaattgcagagacaacacgttgacaactctggatgtcagcaacaatttgaatctggagaccctttactgtcaaggcaatccactgaccaaactgtggctggctgaaggacaatcgatttccacactggtaatcgacaatccggatgcaatcgactataaataaaacgcatctgtctttataatacgtccatttcctttagaggaaacgtacgtattattcatgcaactaaagaaatctagaacttggataatatttaaagagaaaaagctggtacttacaaaagggtactagcttttttctctttttgtgttatagcttccaatatttttcgtacatttgtattcaaacgagttacttgaaagcaattcaaggtagaacgcagtatatagcactgttgccaagtcattacctaaaaaatgggtaattctcccaaagccctttgtataaggctctaacaagaactttccagaattacggaaaaagattgcgccgttcctccccgtttt

SEQ ID NO: 10396 - DNA, 115956 bp, Unknown
  gut microbiota DNA sequence
tatccaaattttgccgtttttttgcgagttcttgctatctttgacatagtcttagataggatgcgcctcggaaaaccgtgaacaagttcccgttttctctcggctttcactatctttgtttccgtaaaattaccatgcaggcagtgccccgacaaaacgaatgtcgttccgattcgggcgcgatctgttcgcattgaaacaaccgttcattcaggttccggcaaacgatccgtgctttacggtatttttccggcaaacatattgataaaatttactcgaccggccccgttccggcgaacacgaatatgtcccggttcgcagacggtcccgatcagttaaccctaattccgattccgcatgatgcttctattcgacggcataaccctcccgctcgaggatccgattctcaaattcctgctgattctggtcatcatcctcgccgctcccctgctgctcaacaagctgaagattccctacctgctgggacttatcatcgccggtgcggtgatcggaccgcacggcctcaacctggtgttacgcgacagcagcatcatcctctccggtacggccggactgctctacatcatgttcctctccggcctggatatggacatgtcggatttccgcaagaacggcacccgaagcctcgtattcggactctatacgttctgtgttccgctcctgctcggtattctggcgggatattacatcctgggattttcgatctactcctcgatcctgctggccggactcttcgcctcgcagaccctgatcgcctaccccatcgtcagcaaactgggcatcgcccgcgacaaggccgtcacgatcgccgtcggaggcacggtcattaccgatacgctggccctgctgctgctgacggtcatagtaggcatggtcaccggaaacacggacgacatgttctggtaccggctcggcatctcggtcgtgctctgcatcgcattcatcatgcagctcttcccgctgatcgggcactggttcttcaagcattgcagcgacaacatctcccaatacattttcgtgctggtcatggtctttctgggcgcctacctggcgcatctggccggactggagccgatcatcggcgccttcctcgcggggctggccctcaaccgcctcatcccgcgcacctcgcccctgatgaaccgcatcgaattcgtcggcaacgccatcttcatccccttcttcctgatcggcgtaggcatgctgatcgactaccgggccttcttccgcgactgggagagcatcaaggtcgccgccgtgatgatcgtcctgatcaccgccgccaaatacatcgccgcgctgctcactcaaaaaacattcaaactctccagcgaccaaaggacggtcatcttcggcctgagcagcgcccacgtagccgccacgctcgcagccgtgatggtgggctacaacgtcatcatcggccagacacccgacggagaaccgatccgtctgctgggcgaaagcgtcctgaacggcacgatcctgatgatcctggccacctgcaccatttcgaccttcgccacccagcgcggcgctcacaacatcgccatcaaaggggtccgcgaaaacgacgaaagcaccgaacatcaggacgaacacatcctgatcccggtgtcgaacgaagagagcgtcagggaactcgtaactctgggcaacgtgctcaaatcgaagaaaaaccacaacggattctacgcgctgcacgccatagacaacaaggtggaagacagcgggctggaaaaacgggcccgcaaaattctcgaaacggcggcgacggccgctgccgcatcggacatctacctccacgagttgctgcgctacgacgtcaatatctcgaacgcaatcgcaagcgtcgccaaagaacagagtatcacggacatcgtaatgggactccatcgggacaaatcccccgcgatcttcctcggcaagatcacgggcgacctgctgggcgaaagcaacgtcacgacctacatttacaaaccggtacaaccgctggcgaccataaagcgacatatcgtaatcattccctcccaagccgaaaaagaggccggatttctcatgtggctgcataaaatcggaaatctggcccgcaataccgggaccaaaatcgtcgtctatgccccggaaacaacgctcaagtacatcgaaccgctgcggcgcaagcagaccgcaaccgtagaaacggtacttttcaaagactgggaaaaactgccggccctgctgcgcgaattgcgcacggacgactgtctgtggctggtaatgagccgccgcgaacgcatctcctaccaaccggcgatgaacaagatcccggcttacctggatcaatacctcgggcgaaacagtttcgtgctgatctatcccgtacaggccggtgatccggaaagccgctatttataacccataatacgtgccgcatacctcctgtacgaaccgctcccttttaccgctgtaacggagacatccgccggatgtcggaacatggcctgtccgcagacgaagagacgctgcacccccgttgaaaaggcatcgcggctgttcggaaaaccttcggaagccgcatctcccgatcggaaaaggataagatgtgcacatccggcccccaccccttatgcaccgacaatcgggtaaaatcgacaccgggtttggttttacccgtaacttgcactatctttgaccttgttttagaccggccgcatccatcgatgtccgaataaattcggcctcgctctcggcccgcaccgcataattcgtttcgcataaacataaacgtaaaataacattatgagtcttgtagcgatcgtaggacgcccgaacgtgggcaaaagcacactgttcaaccgcctggtcgggcagcgcaaagccatcgtcgatgcgacggcaggcacgacacgcgaccgccattacggtaaaaccgactggaacggacgtgaattttcggtgatcgacaccggcggctattcggtcaattcggacgacattttcgaagacgacatccgccgtcaggtgatgctcgccatcgaagaggcggacgtcatcctgttcctggtcgaagtcaatacgggcatcacggatctcgatcagatgatggccgacatcttgaggcgcacttcgaaaaaagtgctgctggtctgcaacaaggtcgataactacgacctgatctactcctcgcacgaattttattcgctgggactgggagaaccctactgcatcagctcgatgagcggcagcggcacgggcgacctgatggacgaaatcgtgcgcgacctgcccccggaaaccaagaacgaggaagaagagctgccccgcatcaccatcgtaggccgtccgaacgtgggcaagtcgtcgctcaccaacgccctgctgggcgaagagcgcaacatcgtcacgccgatcgccggcaccacgcgcgacgccattcactcgcgctacaacaagtacggactcgatttctacctggtcgatacggccggcatgcgcaaaaaaggcaaggtgaccgaagacctcgaattctactccgtgatgcgttcgatccgcgccatcgaggagtccgacgtctgcatcctgatgctcgatgcgcagcaaggcctcgaatcccaggacctgaacatccataacctgatcgtccgcaaccgcaaaggctgcgtgatcgtggtcaataaatgggatctggtggagaaaggcaacaacacgatgaaggagtggaaggaggccctggcaaaaaaactggcgcccttcaacgacattccgatcatcttcacctcggtactcaacaaacagcgcatcctcgaagtgctccagaccgccatccgggtttacgaaaaccgcaagcggcgcgtggccacctcggcgctgaacgactacctgctgccgatcatcgagaactacccgcccccggcgaccaaaggcaaatacatcaaaatcaaatacgtgatgcagctgccgacacccacgccccagttcgcctgcttcgtcaatctgccccaatatatcaaggatccctaccgccgcttcctggagaataagattcgggaggaatgggatttctcgggagtaccgatccagatctatttccgacaaaaatagagatcaccggatatcctcgacaccatattcagggatccggcggcgcacccataaagaataatttatctcatttacaatcgataaaacctttattccaaaccgtttatcttttcgctatgaaaaaattcttactattcgctttcgcggccgtaatgctgggattcgcgggatgcaacgacgatgagaacaaggacaacatacctcccactttgagggaatacgaagctcccgtattcatgtacggcaagacacgggaggaagtgaaagcttcggtgccctacgcctacagcggagcatcggaaacctcgctgtatttcgaaggcaagggcatcgttaaagagtacatatatatattcgaagacgacaaagtatattcctgcggatcgatactttcagacctgtacatcgacgacctgcacacctacctctcgcagctgtacatctacctcgaataccgtccgggacaaagaatgtacgtatatgaaagcgaagacaaatcgctgagcatcggcctctatcccctcaacgacggtctggcggcagtagaatacctgaaaaactgaccctcgggatcagccgggaaaacttccgacggaagcgtccgaactccgcccataaaagacatactatcaaacaagaaacagccgcatgaaatcatgcggctgtttcttgtttggtggagaatacgaggctcgaactcgtgacctcttgcatgccatgcaagcgctctagccaactgagctaatcccccgttaacgggacaaatatagtgaaattttccaaatcctcgaaaaacagagtcgatttccctgaaaaattcgctccgacagtccgctcctcgcagaaaaaacatatccccaaagaggcaacgccagtctgtatggcaatgtttttgctctgaattacaacgatatgaaattcaatcataaaccggtccggcattttctgcatgccgacaaaaaacgataggatatggacaagaaaagactgacctccgaaaacgggaaacccattgccgacaaccaaaacatccaaaccgccgacgtgcgcggccccgccatgctgcaagacgtatggtatctcgaaaaactcgcccatttcgaccgggaagtgatccccgaacgccgcatgcacgccaaaggatcgggagctttcgggaccttcaccgtgacgcacgacatcaccaaatacacccgggcctcgatcttttcgcaggtgggtaaaaagaccgactgtctggtccgcttctcgaccgtagccggagagcgcggcgccgccgatgccgagcgcgacatccggggcttcgccatgaaattctacaccgacacgggcaactgggacctggtaggcaacaacacgccggtcttcttcctgcgcgatccgctgaaattccccgacctgaaccacgccatcaaacgcgatccgcgcaccggcatgcgaagtgccaacaacaactgggatttttggacgctcctcccggaagcgctccaccaggtgacgatcacgatgagtccgcgcggcattccggcctcgttccgccatatgcacggcttcggcagccacaccttcagcttctacgacaaggacaacaagcgcacatgggtcaaattccatttccgcaccctgcaaggcatcaagaacctcacggacgccgaagccgaggcggtcatcgccaaagaccgggagtcgaaccagcgcgacctgttcgaagcgatcgaacggggcgattatccccgctggctgatgcaggtgcagctgatgaccgaagaggaggcccgaaactacaaaatcaatcccttcgacctgaccaaagtgtggtatcacggcgatttcccgctgcatgacgtgggtattctcgaactgaaccgcaacccggacaacttcttcgccgaaatcgaacaggcggcgttcaaccctgcgaacgtcatcgaaggcatcggcttctcgcccgacaagatgttgcaggggcggctcttctcctacggcgacgcacagcgctaccggctgggcgtgaacaacaacctgattcccgtgaataaaccccgctgtccgttccacgactaccaccgcgacggacagatgcgcacggacggcaattacggagcgacgatcccctaccagccgaacagctacggcgaatggcaggacagcccgaacctgaaagaaccgcctttggaggtgaacggtgccatctacaattacgacgaacgggaactcgacagcgactatttcacccaaccgggcaagctctggcggctgatgtcggccgaagaccaacgggcgacgtgcgagaacacggcccgcgcgatgggcgacagcgccctcttcatcaaacagcggcacgtgcgcaactgctcctacgccgatcccgaatacggcaaaggcgtggcgaaggcattgggtatcgactatgaggaagccctgaaagcggaggacccggcacacccgacgtgggatccccgcaacaaaaagtgattcgcagcagacgcaccgaaaggaggttcctccatttcgttaagatcgctacaaaatcccggatgaatatgtattcatccgggattttacgcaatacgtcctcttcaccctgtccgaacgccccgcaaaacaaggcccgtccggcacgaacggcccgacgcgaaaagcctcatacgatgggatcgatgacgcctccgcctccgccactctttccggctccgcaggctttctcccctcgacaacgatacttcgaaaaatgccagccgacaccttgctcccggcgacaacatcgacaggccggtccgcacaagcggatcggtttccttgcaagaggcaatcaaggacggtattccagcatcgttccgggacattggacatacctttacggggtcttggccggctccgtaaaatacaatgccggactgcgatcccgcactttcgggagccgcaatccggcgctgcgaatttcaaaaggcactatgcctgcggcgtatcgtcgccgcctttattgcgattacggttgcgatttcggttacgacgacgcccccggtcccggctgccgcgattaccctcgccacgaccttctccgtggcgggactccacattcgcagccgcgacgacaccttctgcaggtaccggaccggcactcttcgcaccgtcgcgtccacggctccgaccacgtcccccgctgcgtccgtttccgccacggcccgacccactgcgtccccggcggccgccatgaccggaaaaagcggcggggttatattcagggcctgcacctacggcttccggcaaggacaatttcggaatctcccgctcgataaactcctcgatacggtggaatttaccctgctcctcctcgttcacgaacgtaacggcccgccccgtagcgctggcccgcgccgtgcggccgatgcgatggatataatcttcgggatcgtgcggcacgtcataattgatgaccatgccgatatcctcgatgtcgataccgcgtgcgacgatgtccgtcgctacgagaatcctcactttattattcttaaaatcgagcatcacctgctcgcgcttctcctgatccaagtcggaatgcatgggagccacgtcgagcttcattcgcttgagcgtatgggccagctccttgacttttagcttcgacgaggagaagatgatagtcttggactccgaaggccgggagaacatctcgcggacgatccccagcttttggccctcgtaacaaatataagcaccctgttcgatcgcctcgttgggcttcgaaatggcgatattgacctcggcgggatcgttcagaatctgcttggccatctgccggatcttgggcggcagcgtcgcggagaacatcagcgtctgtcgcgatttgggcatataggagacgatctgcataatgtcgtcgtaaaaacccatatcgagcatacggtcggcctcgtccagaatcaggtagtccacatgcgacagatccacccggctgttggtcaggtgcgaaatcaggcgtccgggcgtggcgatcaccacatcggcacccatttgcaggccgcgcttctgctggtcccagccgcggccgtcgccgccgccgtaaattacggcggtagaaacgggcatatagtaggaaaagccctggaactgcatgtcgatctgctgtgccaactcgcgcgtgggtacgataatgaccgatttcacgacgttcttctcattgccttcgagcagcagccggttcagcagcggcagcgtataggcagccgtcttgcccgtaccggtctgggcgcaggcgataatatcgcgcccgtccagaatgatcggaatggtctgctcctgcacaggagtcatctcctgaaaattcatggcgtcgatgccgtccagcacctcgtcttccagatcgagttcgtcaaatctcatactatgcgttttctttcttttccaattattacacttcaaacgggcgggttctttcgaccaactctccctgcaacgtcgccgacgaggaggcggtcacccgcacccgcacgtaatccccgatccggcactcgccgcgatcgaagaccaccaccttattctgcgacgtacgtccgaaaagctgccggtcgctgcgcttggaagtaccttccaccagaatttcgaactctttgccgacatcgcgggcgttgctttcggccgaaagcgtattctgcaaggcgatgatttcgttcaaacgggccgtcttgaccgaatccggcacatcgtcgggcatgtgacgttgagcgaacgtatcgggccgctcggaatacttgaacatataggcgaattcataccccacctcccgcatcagcgaaagcgtctgccgatgatcctcgtccgtttcgctgcagaatccggcgatcagatcggtcgtaatcgcgcaatcgggcatatagcggcggatagcggcgatgcggtcgaggtaccattcgcgcgtatatttgcggttcatcttctcgagcatccgcgacgatcccgactgggcgggcaggtggatgcagcggcagatgttgggtttcgacgccatcacttcgagcagacggtcgctcatgtccttgggatgcgacgttgcgaaccgaacgcgcaacagcggcgaaatttcggacacaaggcgcatcagctccggaaaatcgaccgctccataacgatacgaattgacgttctgtcccaacagcgtcacctcccggtaaccgttctcgaacaggctgcgggcttcgttcagaatagtctgcggatcgcggctgcgctccacgccccgcgtataaggcaccacgcagtacgaacaatagttgttgcacccgcgcatgatggcgatataactgctcacgccgttgcgatcgagccgcacgggagcgatttcggcgtaggtttcctcgcgggaaagcaggacattgacgccccggcccccttcgcccgcttcgcgcaccaggcggggcaggtcgcggtacgcatccggaccggcgacgatatccacggggttctccccttcgagcagccgttcccgcaaacgttcggccatacaaccgataataccgacgagcactcccggccggcggcggcgcagatgagccatctcccgcaaacgcccccaaatgcgctgttcggcattatctcggatcgaacaggtattgatcagaacgacatccgcctcctcgatcttgtcggtatagacatagccctcctgctgcatgatcgcaacgacgatttccgtatcgccgacgttcatctgacagccgtatgtttcgacaaaaagtttacggcccgcaccctgcagcggacgcaaagtatttatcttctcgttattcatagttgcaaaaccggactcgcccggtaaaattaggaccgaaaaacgggaatcgacgatcgcggttcccgtttccccggtatttctgaaaattactgtgcctgaattgcacccgcttccgggaagggcttgaagccctctccgtaggtatcgtaggcatccgtaaccacgaagaatgctttcgggtcgatctcctgtaccttacgctgtaccgcatgcacctccttgcgatcgaccaccaggaaaatcatatccttttcctcctcggagtacataccccgtgccttgataaaagtagcgctgcgttccagatcctccagaatgaacgtccggagtttttcgttttcatcgctgatgatgaacagcaacttgtcgtacgacgcaccgtcgatcacccgggctacgacccgcgaagcgagaaaaatcaaaatcaaagaataaaaagtaagcacccagcccgaacccgaactatcgcccgtaccgagaccgaaaccgatcaccaccaagcctgaaaggatcaccacgcaatccgccaggaagatacccgtggaaaacttgatgcccgcatacttctgaagcaacatggcgataatgtccgtaccgcccgtggtagcctgtgtccgcacgaccataccctgccccacgccgataacgaccgcaccgatgatacaggtcagcaacagatcgttcgacaagttgagcgaaccgcccagcaatagcgccggatcgagattgataccgtcggccgtaaatgccgcatcggaatagaccaaccgcgtcaggatattcataaaaccgggcgtgaacagcgcagccaccaccgtccgggcgccgaactgtccgccgaaaaccaatacggcggtaatcatcagcggcacgtcgaacatatagccgaaagtaccgacctggatcgacgggaaaatattatgcaatacgatgccggcgccatagactccgcccggaacgaaattgtaaggattgataaaaaaaacgaaaccggatcccatgatcgcacaaccgacaaacaactgaatccaggaacgccaccaggcccaagaccccatcggctccaataaagctttcgtattgatcataaaattaactattttagagcggttaataattgatttaattttgcaaatatacgaaaaactcccggatttcccgttcgcttcggactattttccccaaaagccgcagtatttaaatttttttcgtttatatttgcatatacaatcctgacaaataaagggcatgatactgacttactattgcattatcacgatgataatcatcgcctacctgctcggctcgatccccagcgccgtatggataggcaaaaaatattacggcatcgacatccgggaacacggcagcaaaaacgccggtacgaccaacatgctgcgggtactgggacgccgagcagccctgccggtctttctgctggatttcctcaagggattcgtcgcggtcacattgaccgagatcctcaaatacgacgcctacatcaacgatatgtggctgataaatatcaagatcatcgccgtattcgccgccgtgctcggacacatcttccccattttcgcgggattccggggcggcaagggcgtggcgaccctggtaggggcgattacgggtatttatccgccggtagtactgctctgcttcgccgtatgggtcgtgatcctgatgatgacgcactacgtttcactcgcctcgatcgtggccggctgctgctttccggtcttcacgatcgcttcgcccaaagtgaaccaatcggtgcctttcatcgtcttctcgttcgtcacggccgttctgctgctctacacccaccgcaaaaatatcgttcggctgaaaaacggcacggaatccaaaatatacatctggaagccccatcgaaaagcggacaaatagcacggtaaaaacgattcgcttgtttggcgaatcgttttttatcgaataaggtccgaaaccggaaccatatccgaataggcacaaaaaaatccgactgctccatctcctgccccaacggtcattcggatcgcttcatccgcccgtttcagatcggacattcaatccacggtaaatagcgagccggaaatcgccattattcaacacgcttgtattgtccgatttcgatctatttgtgtctgtttccgctgcgatccgatctgtcgaaaccggctgaaacggccttgtaaaataaaaacgaaggcatccccgaattcttccgacaaaaaacgggtattttaccgattggatagattttcatatatttgctcgcaacgaataccgatttgtacgaactgtcaaaaagcgaaacacacgaaatttgctttgttcccggcatatattatctttgccggaagaggttaagaagaataacccgaatccggccggacaccagtccccccgggacaggcgtttcgccctaaaaattgaattatccactacttgataccgaaaattctatgttacgcgaaaacctgattaatatttacgaaaccagcttccgggagaactatgcactgccggcattgaccgactatttcaagcaggagaacttcacctacctggaaatgggcgccgagatcgccaagctgcatctgctcttcgacgaggcgggcatccggcagggcgaccgaattgcgctgatcggccgcaacaatccccgctggtgcatcacctacatcgccacgatcacttacggcgcggtcatcgtgcccattctgcaggatttccatgccaacgacgtgatccacatcatcaaccattcggaaagccgactgcttttcctgggcgacacgttctgggacgcgatcgaagccgaccagatccggaaagtcgaagccgtcttctcgctcacggacctgaacgcgatctacgagcgccgggatccgaagaaactgacggatttccagaagaaccgcgaaaatcacttccgcaaagcctatccgaaagggttcggaccggagcatatccgctttcacaagattcccaacgaccggatgatcctgctcaactacacctcgggaacgaccggatattcgaaaggcgtcatgctctcggtcaataacctgacgggcaacgtgctcttcgcccgaggagccataaacacccaaaccggcacgaactatttccagcgcggcggacgcacgctctcgttcctgcctctggcacacgcctacggctgtgcattcgactttctcgcgccgctggccgtcggaggccacatcaccctgctgggcaaaattcccactccgaagatcctgatcgaagccatgcaggtcgtgcgccccacgatcatttgctgcgtacccctgattctcgagaaagtctatcgcaaacaggtactgccgctgctcgaaaaggggccgatgagtatcgctatgaagattccgctgctgaataccgccctgcgctcggtaatccgcaagaagatgatggaatcgttcggcggagaggtgaacatcttcatcgtgggcggtgcaccgatgaatatggaaaccgaagcatttctgatgagtatcaaattcccgatcacgattggatacggcatgaccgaatgcgctccgctcatcagcttcactcccgacaacgaattcaaggccggttcctgcgggcgtttcctctcggaatttatccaggtgaagatcgactcgcccgatcccgaacacgtcgcgggcgagatcctggtgcacggcgagcacgtcatgatgggttactacaagaacgaggaggaaacccggaaggtcctggacgaaaaagggtggctccatacgggcgacatcgccacgatggatccggacggcacgctttacatccgcggccgctcgaaaaccatgatactcacgggaagcggacagaacatttaccccgaagagatcgaagacaaactcaacaacatgtatatggtccaggaatcgctggttctggagcacaacggtcgtttgacggcattggtcgttcccgacttcgaacaggcggagctcgaagggatcgataaagaggaactgccccgaatcatggaaaacaacctcaaggaactcaacaaactgttggcatcctacgaacaggtcgcaagcatcacggtctatcccaccgaatttgaaaagacgcccaaacgcagcatcaagcgctacctatacaatacggctctgctggagaaataggccgattcgatgacgcacgaaaaatcgctatcgaagggttttccgccgacaatccgacaagtttcccttcgaaacagcttgccgccttttcaggcggcaagctgtttcgaaggctcctcggaaatcttcgcaatagtccgtacgattgtccttacctttcactatctttgcagaaaacaggatgcgcctcggaaaacgatgaacaagttcccgttttcttctcggctttcactatctttgtatttgtagaagataggatgcggttcggcaatctttgcgtgcaagcctgcacgattgacctcacctttcactatctctgacaccgaacatttcgcctcgacaaaatgcaaataaatttgcgtttgcctccggcttatcgctatctttgccaatatgaaattcagcagcaaacaaatgatcggagaaaacctcctgtacctgatggtatggatggtgattatcctagtaccggtcctcaactcgaaaatgctcgaagaggtacacgtcagtctggagaacatcctgatcgcctggctaaaaatcgcaccttatctgctgatcttcatcatccacaacagcctgatcgctcccagactgttactgcgaaaacatcgttatgtatggtatctggtcgtcaatctgctgaccattacggccgttttctcgctggtcgccatttatgaaaaatacgctccatacgacaccgaaccctacatcctgaacggcaaagcgtcattcaccgatctggcgatctattggaacatcctgctgggattcttcatgacgggcctgaacatgggtatcaaactgctgtatcgctccctgcgcgacgaacagcaaatggaggagctcaaacgtcagaacctgcaagcggaaatggattatctgcgataccagatcaacccccatttcttcatgaatacgctcaacaatatccacgccctgatcgacatagataccgaatacgcgaaaagcgccgtcatcgaactgtccaagatgatgcggtacgttctctacgaatcgggcagcgaaaccatatcgctcaaaaaggacatccaattcatcgagaactacatcgagttgatgcgcatccgctacgacagcagcatcgacatccgtttcgactatccggactcgatcccgaataaagtggccatcccgcccctgctgctgatcgtattcgtcgaaaacgcgttcaagcacggagtaagttataaccacgcctcgttcatccagatccgaatcggctaccgggatgatgcggtaacggccgtcatcagcaacagccgtcacgaaaaatcccggtcgggtactacgggcatcggactcgaaaacgtcaaaaaacggctggcattgatttaccaggacaactatacgctcgctatcgacgattccgatccggccgtttataccgtcaaactcataatccccatcatgccatgctgaaatgtatcgccatagacgacgagccgctggcactgcggcaattacagggttatatcgccaaaatcaattttctgaagctcgaaaaagcgttcaccaacgccatcgaagcccagcaatatctggccggaaatccgatcgacctgattttcgtggatatcaacatgcccgatttgagcggcgtagagttcgtacggtcgctcgtcagccgcccgatgattatcttcacgacggcatattcggaatacgccgtcgagggattcaaactcgatgcgatcgactacctgctcaaaccgttcagcttcgccgatttcaaccgttcggtaaccaaagcgcaatcgctgtatgaactgttggcctatcggaagacacagggggacgtcccggccccggaagccaccccgcgcgaccgggagtacatctcgatcaaagccgattataaaacgacgctggtacgcatcagcgacatcgtttatctggaaagcgaaggcgaatacgtacggctccatctggacgaccgatcgaccatcacgactcttttccggctcaagaacatggaagcggccctgccgtcggaaatgttcatgcgggtccaccgttcctacatcgtcaacctgcaacgtatcaggagctacgtgaaaggtcgggttttcataagtgacagcgaatacgttccgatcggcgaaaattaccgggaggcgttccaacgatacatcgaagctcattaccagaatctataacggagaatcgcctccgaagtcgatatcttcaggagaaatcgcaccgttccgaacggacattcgaccgcccggcaacaaataacaaaacgcgattatatgttttcggggagctattggaagccgacacgcccttcccctctttggagaggaagggcgtgtcggcattacagaagcggcacagaccgcaaataagctcgatgccgcgatcgttggccaagggtacatcggaaagacatgacccccaaatataaactctgcattcccagagcgcaggcacgcttgccaccaaccccgactatgaggggcgaatcttatttgcgatcggccaggcagctctgaatatccagactgaccggctcaccgttgagagaaaaagagagtgtgcaatcctcgaaagcggtaagtttctcgaactgcaaaataacggtggaattatcgccccaaattgcatcgacactctttgcctggaaggttttaccactgttataaagcaccacatcttcgattgaaagtccgttggtttcatcacggtcggatgcagggatttcaattttgatagttgttttgccgtgtttgttgttcaaactcaaaaatttgggagttgcatgggcgcttcctatcgccagcagagcggcagcgcacgaaagaataatttttttcatagcaaatgaatttgaagtgatgtaaaagagttgatttccaatcgttacgaaataatatccaagatacgaaataatgtcttttactatatgcagaagattccgatatttttacaataaattattgtgggggggggcttttactcttttcggtacaaaactaatataaaaatcccccccccaaatattttgattaaattaaccaaaatatatccgaatgcaaaagtatcgggaaaaatccatgcgcatcaggcccgcataaagcctatgacttacaagcggggaaaacggtccatacgggtatatcgcccctcggcatactcgtaacaatagtgcaccaggccgttggtcaggaccacgtaacgggcccccagcaccgaattgtaccggacggcctgcgccagcacctgacggtctattccgatcccggcagccttgcactcgacgagcatcagcggacaggcccgatcgtccacgaccaccacatcggcacgctgcggagatccgttcatcgctacggcatactcctggacgatccgcatgggctgtgctccgcaatgggaaatcaggaacccgatcaggtgacggcgcacccactcctcgggagtcagcaccaggtagattccccgaagcggatcccaaacggtcatctgctccccacgctgcgaaatccgcaatttgactgcaggaaaattgagccggggatagtcgggaatcatattcggaaaaaattagtaactttacagggacaaatatacgaaaaggcgacggaatccgtatcgccccgtatgcaaagtgccccaagccgcagaatacagcgcaaagcgggagcgagcgtacgggctcgcaaacaaagagtgccgatcgtatcttattacttaactaaacagcgaaaggcggacggcgggtccaactcgtccgcatccgcccgagccgcataaaaaatttatcgccttatgaagagtcttttgaccttgctccttctctcttccgcatggatgacctgcgcccaggattacgcttcgccggagccggtcgagataggcaaggagctttcccgcaccactttcgtcgtctatccgacggcggaagaggctgccgccggatcgcgcgaagcctccaaatacttcaccccgctggcagagtgggaaaaaacgacgaccgaagccggcacggagttctccacgaaattcacggtgcccttcgcctggataaaccgccaggtgctcctgcatgtggagtgggcttcgtcggcttacgaaattcgcctgaacgggaaagtcgcgggatattgccagaacgggagcaatccggcggattacaacttcaccaaacaggtccgggaaggggtcaataatctgacgatcaaggtgctgtccaatcctgcaagcgccgtactcgaaagttgggcgcatccctccgaaccggcgttaggcagttgctacgtcttttcccagccgaccatccgcatccgcgacctgttcaccaaaacgtaccgaaacggcagcgtcttcaacggcgaggtaggcatcgtggtgaaaaccgacgcgctgaatcccaagaaagcgaaaatccactacgaactgctgacgccgcaggacgaagtcgtgacatacggcagccaggagatcgaactcgacatgcgcagggaagataccctgcgtctggtcgcccagattcccgatacgatggtatggagcgcccgcaacccgacactctacaccctgcggctcaagacacagactgaaggccgttatacggagtacgtatcgctcaaggtcggcttccgcaccgtcggcaacacccgggggcagttggcgatcaacgggtatccggtagcactcaaggccgtacccgacctgggtacgaccgtatcgccgagccaactgctcgaatggaaggaacaggggtacaacctgattctgcttccggcaggcggcgtatccggtgcgctgtacgacctttgcgaccgatatggcttctatgtcgtcgaacaggctccgatcaacaccagccgcagcggtatgtcccgccgcaagggagggaatcccagcaacgatcccgcatggcaggcggcctatatcgcccgtatcgaggagagctaccacaccacgaaactgcatccgtgtgtcgtagcattctcgctcgccgaagattccgccaacggaatcaacctctacgaaggttatctccacctcaagggcctcgaaaaggagcgcccggttctctaccccgatgccggcggagagtggaacagcgacaaactccggctgtcggccgaacaataatccgctcgccgctcaaaaataaaaagggctgtctgctacatatagacagccttttttcattcgtactacactccaagaacatcttaaaacacctcgcttccgacaagttttgtcggatcgtttcgttttacgatcgaacacgcacgacagaaacctccctcggacgacgagtgctgacagcaggcaacaggtcaaaagacaggcaacggcaagcgagtgacaggcgcaaatggcgagtaacgaaagacaggcagcgaacaacaagcgacgggagcagagagcaagcgacgaagagttggtagcacgtgacgagcggcaactacagataacaaccgaccgggaaaagctggtagcaggcaatcgggcgatgagtcaggggacagaaggccggcagcgtacaaccgggcaaatggcgagcaacggcaagcgacggatagctgaaacagtcagcaggtgacgaaggtaaataacagggacacaagtaacgggcaacagataatagatgcagatgacaggagaagtaacaagcgacaagtgacggagcatccgctatcgaagggttccttccaatatctctgaaaaccgtccttgccctggttttgaaactcccaccctgtcgcacccgattcgacaccattatacggaatacaaaaccctactcagcattccgccgatatttgcaggccggtttttctatttaccactatatagatagctatagaaagacggcaatgcccattactttttactttccgttcgggagcgacgaaaaaaataccgaagaatagggacaccagcaccaatcactccgcccaaggatgaaatacccggacaaacaccaatccgactctgtcatttcctgccccaagcagccgttatcaataatcggactcttagcaccgacaaccttcctataaaaaacgattcgaacactccaaagagagggggggggcactgacgatcttccctgcaaaacagaaacctcgctcccaatcaatcccataaaacaaaagacaatcacattatcagtccccgtaaaacaggcgcaaatgccgccggactttccccgacatacaaacgaatgtcaagggactttccccaagtctatctcttccaaagatccttatacacaaaaaagaggggaagagatcgctctcttcccctccgggattccgttactcgtcgaaattcgacgaataaccgttttgtttcggattatttaacgatttcagaagcagccttgagctgtgctcttacatcaaaatccaatttatccgatacctcctttttagaagctgcattgaggatcgaagacttgccatggtctgcacgctcgcgctcgatctgcatgaacgaagcctggctgaaacgaatcggagcagaaagatccaccttcgatacggtcgatacagccgatacctcgccgcgcttatcatcgaaaccatcggtcggagcagtatcgatatcaccctggtggtcaggatcgttcagcaagatttcttcatacatcaactcaccccaagcaccggttgcatcctgacctgcatagtagaagccccaaggacctactcccggcggagtacaacgaccgtgcttagcatccttatagatggctacaaacggataattctcgaaataatcgaagatcaacatatccggcagaggcagcgtaccaccacgaggtgcatggatcaagacccacgtatgagcagtttcctcactagtcggctccgcttggtaaacgcatacatactgattaccagcatagttcccccaagctgcaggataacgagctgcaagttcatcaccgttgtaaacctgccatgttccagatacagttgctttcatattacgcggcaacggtttcgattctacgcgggcagaactcaaatcggactgagcctggccatccgcataagcaaaaccataagccacatactcggtacccggcgtacacgaagatgtcagaacctcttcaccgacatactgtgccaatgtaccgccaccgtctgcatgaatcactgcatcgatgaactgacgccaatccttatactgatcgaagttgtttgcagaagtcagacctacatggtaccaaacgtcgtcctgagacggagtaacggtacaagtaaagctacgcatttcgatcttcgagaactcgaattccaacttaaaatctgtaggagcgacatattccggagtcgtgaattcggtcaccgaaacatcggtagtacgatgtccgtatttgtcgaaaccgaaaataaagatttcgtaagtgctctccggctcgatacgccactcctgatcggcccccatcttggtcgtcatttcgcctttctgcacccattcgttggtctgccagttgggaggggtgccatcacccaggcccgaaccggaatcatacatatccagacgctggagcagacgctcgacacaaacgcttttaccgtatttctcggcactgccgccgggatacataccgatgaaatatttcgtctccagattcgagggcgtaatcttgatctcgcaatcctgagctgtcacattcaacttctcgaccgtgaacgtgcaattatcggttacaggaatctctccggtcgtaaccgtgaaatattcctcggcattttcgctgttgatattgtagttgtcatccatgccgaagcaccagaaatagtagtcgttaccgccccatacacggttttttaaagacgtgttcaacatgaacttctgctcgccctgataaagagtcggacgctgcttacgcgcactggactgcaactcctgcaaatactctttgctggtccactcgtcaaccttgtaaacataactgttcatcgtcgagaacatccacttcgcatccggattgctcggagtgatcgttacctctacgttgtaaggattgttgtcgggataagggtcggcattgacctgcttggaagtaaccgtgaacgtaaggtcggtcatctcgacattctgggtcgtgaactccgccttgaaaaggtccgtagtaggcacgccctcggacgtacaaccgtacacatacccataatatgccgtattggcaagcgacaagtcatccacggtattggtcttcgaacctttcatgagtaagatgttcaaccattcagacaacttcatcccccgactttcggcctgttctttcaccgcctccaagtcggcctgaatgaaagcctcgtcggactcgaacgaatcgacgtattctttagtcataaaagcgcacagataggtctcgctctcgttcgaaggaacgatctgcattgcacagccgtttgccgtaatcgacttcggatcgatcgtaagttcgaacgtcatggtaccaccctgatttacggtaacgactacatcggctgcccccgtataagaaagggtgatctgccccgaacgagactcgacaccctcgtcgagtgcagtgtaatcaaactggacgtatcccggctccgcatagttgaaattcttgatccaatccacgttcgtcgttgcctcgacaatagacgatttatcggccccttgaatttcatacgccaaacgacccgttccagcgtttttcgataaggaaagcgtagttttagctacgatggtgacgctgtaatccacgccatcgtcgcttcagccactgcttgcactcaccattgcgagcatcgccacaagcgccatcgcaaaagaaaaatactttttcatagaaaaaaataacaagtagtttagtgaaagagctaccggatcgaaatccggacaccctttcgggttaataaaaattaaaagttaggtattaaaaacatcataaaaaagcgaaaatccaccatgcaagtatcgtagaataatcctaatacacaatataaccaacaaaattcaattcttttgtcccgtccgttccccagcgtattcctgcgataaagcaactgcaccgaacggaatcaatattctcgccttcattcggaatcgaattcttaatccgaaattttctcaaaggtaggaaattaatctaacttaaacaactttttaagacagttttttcaataaaaaagcaaatcaaaaatcacaatatattgaatatcttacatttaaaattcaaatattcgtacctacaaaaaatcccccccccaaaaaaaatgatttttagcccacaggcggcgttttttccatcacctggacggatgtaccgaaataataaatcttgaaacataataattcggtaaccagtcgatgcacctatataacttaaataatattttatttagtatatacacaagataaaaaaaagcaaaattccgtttcgaagccctcctctgcattttttacgaagaaaaaatatttttttcttgcagaaataaaaaaaacatcctacatttgcacctgcaaacgcctctttagctcagttggtagagcacgacactcttaatgttggggtccagggttcgagcccctgagggggtacggaaaggcggaaaacttaagttttccgccttttttattgtccaaacagccccttatagctgatatatcttaccgtttcgtgtatctttgtaattggatcccaccgtaaaggatctatgtaggataaaaaaattttacaaagtcccttattcagccgaggtataaagataaattcaaacaggttatggagatcaataaagataactggaagcagatcgatctaaatgtggacagcctgtggttgatccccgaaagagagaggcaaggcaagcacaagaatatctatcacggcaatttcgttccccaactactcaaacgcttacgaatgccggaaataccgtgctggagttgttcgcaggcagcgggactaccctgttcgcatatgaaaacctgcgcaaagattacatcggattcgcccccccaaaaaaattatcgattatgtcaatagcattatgagcgaatggtcttcgatcaactacgcaatcaagagtgtcgatgtcaccgatcgacagccgttttccgaggcgatcgcagcatagctgggcgaaaggcaccgagaggaggtcgattttatgatcgctcatccgccttatctggacatcgtaaaattcaccgacgacagcagggaccagtccaatatttcggacatcgatgctttctaaaaaaaattgtcgaacgcaatagccacggcttccgatacttgagaaagaacggttattttgcgatagtcacctggggatatttctgaaaaaagcgaagtgattcctttggctttcaagataatggattccgtaaaacaacacctgaaagtcaagttaaagggcatcgtggttaaaaatatcgaagggaatcgcggtaaattaggcgcacaaaacatctggaaatacagagcgttgaaaagcgactactttttattcaaccgagcagagtttccgagtacatctggagcacatgttcgcaggcacgagatccagaaataaaaccgtaggtttcaaccgatcagcacattccaatatatcagttgctcaaacgggaaatacactggttgcaatgatggccgatttcagccgggtacgcgcgaacgattatgcgatattttacgtgcagacatcgaaaggaaaagaagggaaattttacggcatatatcagatcgccagtgaccctttccttaaacccgacggttactatttgcgcgagaaactttggataaatctgacattccgggtattgagcaaaccgtacgaagtatttgcaaaaggggcttccgaatgggaggctttggatgatataataaggtatataggcccctatcaaatgctgtgcagtttgatatacagaaagctgaaaggcaatcgcggaaataccatgcttatgccctatgaggcagagcggttgttttctttaatccgctcgaaaaaataaccataaggccctcaacgggaacagtttcaccgatgaaaacagaagacaagtcgaaaatatgttgcaaactgaagtatatgccgacgaaacacagaccgcgttcgacatcttgccccgactgatctacaagagacgcaacaggaaagcctataaagtacatttgcagatgtatttggcgcaacatatcggcagggatccgatcttgaaccgggcccttaaagtcaattgcaaaaacatagaatagttaggaaacaaggtttcatgcggcatcggcatgcagcgaatcgatgtgatgttttcgcagaaaatagatgaaaaaacaaaatagatcgtacctatcgaactgaaggccgtaactaatcccagacagatatcccgatatatagactgaatagaacagtagtatattcccaacagaccgagcgtaatacatccaatcctgatatgcccggaatcagaactcggtcaaaaaaacatcaacgcattcagagcgttcgacacaaaatccaatagacgttacctcctatccttggaatattatagaatttacagacgacgaagaaatgctgaagtttaataatatcatgtacgagtgatgaattacataggatcgaaatattcgctgcgggattttatcgacaatacgatcaaaaaggtcgtcggcgataatccatcggatatggtattctgcgatctctttgcaggtacgtgtatcgtagggctcatttcaaaacacgagttagcaaagtaatagccaataattggaagtattacagttatgtcctcaatcgcaactatataggcaactgctacgaacttgcgaacaaagccgattatatagaaatactgaactcgctgtcagggacagagaatggtctcatatactctcaatattgtcgagggggggggtaatgaccgtcagtatttctccgatgacaacgatcaaaaatagatgccatcagatcgactatcgagcattggcagaaaccggagaaatatccgacgatttatactatttccggctgtgctgtctgctcgaaaacgcagccaaatgcgccaatacggcatccgtatacggagcatttttcaaacatctcaaacagtcagcacagaaaacgctcgttatcgctcccgcagattaccaaataaacaacggcgaacacgaagtgtacaatgaagatgcgaatagtctgattaagcggatcgagggcgatattttatacctcgacccaccgtacaactcccgacaatacagcgcaaactaccatctgctgaacacgattgccgactataaatcatttactccgaagggaaaaacggagctaagagaatacaacaaatcgaattattgcagtaaggcgaaagtacagcatacattcaaagatttgatccggaacgcccggttcagatacatcgtattgtcgtacaataacgaaggcataatgccaatgcagaccatcgaacagataatgaccaaatatggcaattatcagatgtttcaaaaggagcatcagagattcaaagcagacaagactgaaaataaaaaccacttggccgataccaccacagagtacctacaggcgaaacagaatccgcaatagtcgcccgactcataaaatgcgacgcgacaaaatatggaaaaatacagtatctttcgggaaacaggaaaacaaatcggatccgcacggctaaccggcagagctgaaatcgtccaaatgctgaatcagggaaaaagtatcgcggcaatctgcaaggaatacgggatcgcgagaaacaccttcgatcggttcagaagacaatacacctatactattataaaaggagagaaaaaacgctggagggtaaacggaaatgctgcggagttaaaagagaaaatacatgcaacgctataaactgatgactttcctcccaacacaggataagaaggggagagggaaaaagcctgtcgccactccgaaagcggccctccactgttgctgcacaaggtcagaaggacagctgcggcaaaagcagaatcaaacctcgtagcccacacgcccccaactgcattcgatattcacaaggaaagggaaccttttttcccgcaatcttttatatccggagtgaaagatcagaaacggattccggcgaaatccgtctttcaacggatcgtcgatacggcatcgaactcttcgggagcgtaagtccgcaaggcgagttttttaacccaaacgacgaagatccccgtgagtaccaagttcagcacgagggtcagcaccgaaataaccagtgccggaccgcccaagctatatcccagcgcaatgaagataacgcccgcccctacctcgccgcgggtaaacataccgatcgaaagggccagacgttcgctcaacttccgatcacgataaaaaaacatcgggaaaagtttgcccaggttggacagcaacgagacgatcaccacatggaatgcgatcacgccccacgacatcatgggctgcgaaccggtcacggaagaagcagcttccccagtcgcagcagtcataccgataaacaacggcatgctcaatccaaccaaaaacatgaacaagaacgaaatgccggaagcggccatccgctccccgcgagattcgacatgcctggttttcatcaccatacccaatacgaaagcgggaagcagcacctcgatatgaatactgccctcctcgccgaaataatatttggaaagcaggtaaaccagttgggtaacaccgaaaaccacgaccgaataggtcagaatcgcccaccaatcctgcctcaactcatacgtactgagtttcttccaccccagccacaacagcagaaagacgatcaccacgacgacgaaaagctgccagcgcagaccgatcatcaggatttgcagaggtatcatcagcaggatggtatccagatcgtcgaaaatcgccagcacctgaattttccgatacatccagcttcgcttgagccgcagggccgcgagcatcgtgaacaggatgccggccgaagtcggagcggcaaaacggctcaacaacagattctctttccaggcgtcgccattgccccaaaactcgggcggcaacaacacgaaaacatagtacagagcgatgagcagccaaggtacggctgccgtagccatagcgatgaaatagtcctcggcataggagcgccaacgttttttatcgatctcgaattcccggccgacattgatcatgatgaacgacagacagacataaagaaaggtcgtcgccccggcccgaaatgcaggatagctctctccgagcatccccggaagaatctgggaagccacgaggccaaggatgagaagcagggaaaatgagaaaatctttttcatcggaggttttcaatagaatgttcgcgcagtcggcacaaggatttatgtcggctaaatcgcgggtaccgcccggaattttggtacaaagaaaatcaaaatcccggaatttccccgcatcgtccgccaaaaaagcaccgactgcgcacctcaacgccactttttcgtgcggaagaacaaataggtcacgaatccgatgacgatcatcacgccccaggccaggatataaccgtgctcccactccagttcgggcatgttacggaaattcatcccccatactccgaccagaaaagtcagcggaatgaagatggtcgatacgacagtcagccgtttcataatatcgttcatccgcaaatcgttgttcgagatatacaaatccatcagcgacgaaagggtttcacggcagatgtcgatattttgcgccacgttgagcaggtgatcgttcacatcgttgaagaagggccgattgacccggtgcaacaaactcgaatcggaacgaaatagccgcgaatattgttccttgagcggcagaaccgtccgcttgagctgcatgtaatcccgccggagctcctgcatctgtactccgatgtcccggtctccggtatcggccagcaatgcagattccagctcctccaacccgtcgctgatcgccgctgcaaccgacatataaccggttatcaagccattgagcaacaccgaaaacaggtagtccgactgtcggagcacccttgaaaaaatgcaacagtctgagaaattgggctgttgcattttttatgttgggacaaggtaacgaaaagggaacggttctcttttccgttgcttgcgttagtaatcacaacctcaaataacaattgtaaaggtaataaaaaaacgacagaaacaatcgataagatccttttcttgtgttgaccatcttatttttgacgttcatataaacctttccatcctttactcaatccgcacactgccccattccatccggtagcgaccagcccatgggatcggagggacaagctgcaaggtcgacccgtgaggggcgctttgtatagccttgcagcttattcattcgatccatacctttgcattcgggtggaatggggatttcgttcccagcctcccgttatagcttcgggcctttagagttcttgggggatggcacgatccttccttgttttgtatcgtgtcggagcgttcggggttttcttggatcgtcccaactttcttgatacgtttcgtccaaaggattccctttccagaggtagggccttgcagtctgcccgtgtcctccccaccattgaacgagagcacggacgacaaaaccgccctttaacaagtcccggtccatgcgccgcatggtgtatttgccgtattcgacccactcgcgtggatcgtgtctgatgtaggcccgtcctcgcgtcaggttatcatccatgaccagataaccgttgaacgttttcccttcatactgcatctcttcgatataaaccggttgcccgtcctttatttgttctacctgttcatctgtaagccgtacaccaaatattatcggatttcgggtggaatgttcctgtttatgccgttctatttcctgcctttcccgttctgctcggttcgcttcgatggctttacagaggttggcgtagctgaatttccgatctacctgcgaggccttgaaagttaaattctctttagtaaaggttatgccttgtattcctttggccggatcaccacctcggtgaataaacgtcgtttcaatacctatgtcctgcaaccgttccgcgagttccggcaaggagacacaatacggcagtatcgcttttaccgcttcgtaaacggcgtattttactttgtcgggattatgtagccgctcgatctttacgttctcttttccctcggagaaggtaaggccgtatttctgtttcatggccttgcagaccgctacgctccggatcctttcgttatggctccgcaccaacttcgtatcgtactttacccggttgtaaaggatatgcagatggggatgctccgtgtcggtatgccgcaccacgatgtactgcgtatcggtgattcccatacgctgcatatattcgcgtgcaaggcctgccataaatccgtccgtgagcctcggcttgtcgtctttgtggaacgaaagggatatatgacccacgacctcggtcttctccggccgggccttgcgctggaaattgaaactgccgattagggaacggatgtcggataactccactccgtcgctgtctatcatacgggcgtgaccgcttttttcgagcaggtagcgcacggctccgccgaacgacttacctgttacgatctttgctatcatagaaatatccctttatatgtcgtgccaaccgttcgtaaaactcgatcagtccgataagacgtataacaatgccgtccatccccttttgtgtgttggcaatccgtgccaactggttcaggttgttcccctgtcgggccagttcggctactgcggcaagtatcgcgggcggaatatgccgtggggattgccccgtaagtaccttttcccggcagtaggtggcaagatccgtcccggcgatgatcgcttcgttttgcagccttcgttttacgtcgggcgtaacatggaatttgacctctgcggtgcgtttctcggaggtgactttaggtggtctgccaccttggttgcggtgatccattttgttatctgccatagcccttacctcctttctttccgcttatgagattaggctttggggccgggcgaccgagagggagccggttggcggcatccgagatgccgagagtcccgaatcccctgcgaccgacgggagcgggagatggttcggtgtgcgaccacagggagtctgccgaacgggactgccccgcagggcaaggttgccggagagtccgagaagccccgcatgggggtttcgagggcctccggatacaaccttgttccttaaggcttcgagaaagtcagataccaaagccaaggtcccgaacgcggcactccggacctcactccgaatccccgttgcacggaatcggcaggggagaagaacgataaatacgggaaggccgctcctgatatatacgccaggatcttgataagtggactgtgaagttaagttgtcgggcagggatggattaatcgtaacagttacccgaacggatcgggttgtaacgctccagactacggacgttaccagattgcaacgctgcagcgttgcagttcagtggggacggtatccgacattcggatgtgctgtgaaatggatgttcatggctgtgcgatttacgtctgtttactcaaacaacgttgcccgctgcgggttgttgcgtccatgtcggatcttgcgttccattgccatctgttgctacccgagtataaatcgtgcaagacaccggagccaaccgctgccatggcgaagccaaccactgccacttccgtacgatcgtacaacttgccgtatatcgtaggcgttaagaattggcagaccgtcctgtaacggcagctgaaacacacaaaaacgcactatgatgaaaaaccgggcgcaccgaatccgcgatgagtgaaaattacccgatcgcacatacagacaaaccgattgttgaaccgaaaaacaatgaaacgatggaaaagataatatgcatcggggagaaaacatgaacggttcttctcgaccggctgaaagagttgtccgcccttgccttgcaggtacgccgccggttcgatccgcagacctcagacgggtatatggacagtgcagacgtatgccgggtattgaacattaccaaacgcactctgcaaagctatcgggataaaggtattttgccctatacccgtatcggcggcaagttcttttaccgggagtgtgacctggccgactatctcgaacgtagaaccgtcaaaaaacaatagccatgctcgactacctgaacagcgagagcgaggaggtgaaaaccgcgcttgcacaactatccgaggcgaaacaggcgttgcaacaggccagggacaactattgtccttcgatcttggatgaacgttacctcacgggcgaggaggtctgccgctatctgcacgtctcgccgcgcacactccaaaccctgcgtgatacacgacagattccctttaccgttatcagcggacgggtatttctctatcccgagagcggaatacgggaaatccttcacagaaatttacagtctgtcgaagaaccgttttaacccttacaaatgggccaagcacaacaaacccgggacgcataggatattcagccctatgtgtcccgggtttattactgctcctactattataacttaggtacaaatgccgctcaaagaatgtattatatatcggcaatactccaccaatgagtgtttgtttgttcgcgaattatttcctatctttacaacgtcttgtgcagcaatgtacttggcagacatattgaaagtgttttcgcactgtcctgagtggaaaatgtggaagtttttcaataacaacggaacaacgaacagcactcatttcttgtttagattatggcagggacgcgttctgcgtatctataccccatatctattcaagtgtggggtattgcgtcgtttattgttgttatcggtctttccacaaccatccactcgataaacgaaatcagctccacacttttctttttgtagttatagcaaacaccatttaggagttgaatggtgactaagaattggaattattaacccaattaaaatagttactatgaaacgattactattagttttcaccttgttcaatattggagtcgcttcggctcaattaaaaacatacaatggttcttttgaagatggttctgcaaattatacttataaagaagatggattgactcgaattttcgaagggaatttttcatataaatcagcagacggaaaaaagtctatgtccggcagatatactgatgatatgaaaaccggattatggaaaactgattggtatgggtttcatgaagaaacaagctataagcaaggtctaaagcatggaatttaccgagtacgatataaagattcctataaagaattaaaattaaatgctcattttacacagggagagttggattctcttgatttttggatgcgaacccctgacgggcgcataatagctggaaatcaacatggctctccttctgttatcgatacgtggcttcacggaatagataacaaatatattcgtacgcaatatttttataaaggtatttatgtcggatatacggattatgattattctaccggagattggggtgaacgcacgatagatgatatcagggaggttgctaaattttccgattcactagcccaacataactatcaatatgcaggccgatactattgtcttcaaccccaaaaagaaaataaattttacagtcaactcactcagaacggcgatattttttccaatgagccatactggttcaatgaaatcgcatactttttcatttacgattttcataccgcatgtttcggctcatccttatggaggggcgaagtttttgaacccgattatactctctgttttgtaataaaagaggatgaagtccgaatgaatgctgagaaaaagcaaatcgaacaagaaaaggctgaaaaagcgagaaaagaaaaggaatatgaagaaactattgcgaaaaaggcaggcgagtttgctcaaacagaatatggccagtttataaactatctcaaaccctttgcggtgaaatctgatagtttgtttaatcaggcaaaacagaattacatggataatgttttgagtaaatatcgcttagcaacaagcccagtccgtcttgcagacagatttcaagaatccagcactttatcgttaaactttagatattcagagggagataaggatggttatcaatgtaaattcatttcacaattataccaaataaatgttcccaaaggattaaaggatttttctgtacttatttttcctactgcacttgtattggacaaagaacaatggcgtgtttctgatgccatcatagtatattatcataacggatcggacaatggtctttcgacggcattacagctcaatttgcataaaagaaccgatttacaccaagctgatttatacttgcaacatttctataatgaaatgaaattggggataaacggctttattgcccaaggaacacaagtttcaattagtgataattatgtttttcaaggatatacagaaagccgtataatgcagcctattacatcagatacgaaatataaaaagactcaaatttattatgacagatggcataatccccaactatctaaggatgattttattcaatccattaccaaagaagaggttacaaaacccatagaagtacgttttaacataaaaaaagaagaatgattatggctattgtcgaacgtaacagaattttgaggccatcaacaagattagcttcttctatatcgtataaaattaatacagaaaaagtttcgggactggatgaactgatcgtacgtgtatattccgaacaaaaaagactgatagcggagtttcatttcgccggtcgcgatatcgcaggtaaaagatctatccatttccgatatatcaatgagcgaattgactggggaaaatatgaaaatttgatatcgaaaaagcataaattaatagctgtaatttaagacattatttcaatgaccacctgaaattgcaaaccaaaggacggcaaattcaaagtcgtcctttggttttgtttatgtagaagtgagactttcccttcccgtaacatttcgcctctgaagcccgcccgcagattgtttcgcaccgtggcctcatacacgccaaacaaccgtgcgatttggctctgtgtcatccagacattgccatcgatcagtcggaccgagaccgtacaaggcccctagtcgttatcggttatctcaatagaaccgagatcttctatctgttttttcattgtcagttctctttatcgggttattctatcggaaacttttcagcgattttttggctcagggcatccatgtcacgaccgatcttgtcgttggtgatcttggcgtaaatctgtgtggtggtgatgtgtttgtgtccgagcatcttgctgaccgtctccaggggaacaccctgcgagagggtgaccgtggtcgaaaaggtgtgccttgccacatgcatcgtcggattgaacgacaacccggcatggcgtgccacatgtcgcagggacatattcatcgaatcacggtctttgaccgggaatactttatttccggggagcctcagtcggctgtaacgttctacaagccgtttggccaccggcagcagcttgacccgaaactgcgttcctgtcttttgtcgatggtccacgatccacagatcaccccgttcatccgtgtgaatatcgtcatgggtgagtttctttacatcggcataggcaagccccgtgaagcagcaaaatacgaatatgtcccggacgatggctgtcttgtaattggggacatagaccctcatcacggcctgcagttccgattcgaaaaggaaacgtcggtcgcggtaggttacgttgatgtggaatccggcaaacggatcggaggtgatccagccgttcttgaaagcggtgtaggtcatcagcttcaacttcttgaccggagtatgaatgctgccgggaagcatatgacgaacagccgagagataaatcacatacttctcaataaattcacgcttcaactcccggaacgggatatcctccagcttgtattcgtattgcaggaatgcggtcagataacggcgggaacgggtgtagttcacgagggttccctctgcacggtctttgccgacgcgcttctcggcgaactctttcaggtagtcgtcgaaggtttgcagcaggagttgatatccgtctccgaatcccagccaggcattcctgaccttctcggccgtgacgtaagaatcccggtcgcagatacgctggtactgcttgccgatgttggtcttgatgttctccagtttctcgttgatccgctgggctacgatgctcttacccgatgctttgttggctttggtgtcccacaatttgggagggacagacattttgcaactgaactgcgagatggttccgttgatggtgatgcgtcccatgatgggtgctttgccgttctgttcggcctgtcgtttcagatagaacagaaccttgaaagtgcttcttgccataactctaaaaactttattgttaatacgttcgttagagttatttgttgttgtgaaatccgacgcaagaaactgaaaaacaatccattaaaaactaagtccggaaaaagctgcggtaacgatctggtaacgcaactctttccgaactttgccttttcatgcggctgaaccgctcatttacctccggaacaatctcgttaaaacactatctccgtgcgttttatacgttattgctcctgttctatttttttaaggccgcccctttgttgggtacggattttcagtacattgttacggatggcacgcatcacatcgtcgaaaaaatcgttgtcccgctcctgaaacgtcagcacgaaatcagcgccctgcaccagactgacctgcatcgcttcgccacccataatctgcttggcaataatcacattgtactgatcgtgctcctcgaccttgctggcatggtcggtattgagaatgtcctgcatgaccagaaaatcgatcccgaaatgcgtacaaaccgtctgcacggcatccgtatcttccagtccgtgaatctgcagccaagtgatgccatcgggctgaaagcgggacttcatctcctcgaaatcatctcccgaagcctcttcgacccgatccacagtataactgcacagatgcagatgagtccgtgttttcgtatccccgttgtaggcgagcttgtcgctgagcaggttgtttttcatggctgtacgattaaaattcgaccgtgacgcccaacgtcggcaccaacgtaccgctcgcctggcggatatacttcatcttataacgctgctccgaaggcggagccgaaggattctcgatcacgccggtactcatcagcacgtcgggctgacggagcttgctgaaggtcacgttctgcaaatcgacatagatacccagcatgcatttacggaaataaaacaccttatcgacgcgcacgtccaactgggcgaaggcatccaaacgtccggtattgtatttcgaatagtcgtaataaggacgtcccgaagcgttccacgcctcgacgagcgacgatttctcgacgtcgtacggcgtataaggcgttccgccgatagcgctcagcttcgcaccgacgctccacccgcgagagaaatcatacgtaccgctgatgttcgccacgaaacgattgtcccaggcagaaggaatatatttcgcatcgtgccggctgcggtactcgctgctgaaaacggtcagggcgccgaccagattgaaacggtcgggaagctgccaacgcaccatcagctccagaccgtaggcacgtccctgagccgaagaaacgagcagttcgtcgcccgaggtgccgtagtcgttgcctttgcaggtcagcggcacgtcgtccgccaccgaaagcgggatatccgtataatatttgtagaaaccttcgagcgaaaccaccaaccggtcacgcagacgccaattgacgccgacggcgctttgcaggacccgcatatactccaagccccgattgaccaactcgcccgtattgtccttatagccgagtgccgtatagggcggcaactggtagaaaagccctgcgctaccgctcaccgaccaactgtcgctcaaggcataggaagccgacacacggggcgaaagctgcttccagaaacgctccatctccgtcgaatagtcgcatccgtcggcccgcacgcccatcgaaaccgtcagccgcttgtctgcggaggcatagtcggcccccacgaaaaagccccagccgacaatccccaaataagtgcgatagtcgagcagctcggcttcctgctgataagtccgctgcaaagtcttgttatgataggtagaatagttcaattcagcaccttcgcgcagcgtccaccggcccaggtaggagcgattttcgaaccgcagggtcgtcttctgctccacgccccgcaaacgcagggtcagattatccggagtcgattcgtcgttgttgcggtatttggtattgcggttattcaggtagttgtgactcaacgccaccgactgcacgtgccggccggcgaaatggcggtacacggcacccacagtaaaggtttcctgttggatacgaggcaggtaactgagcagatattcgttctcctcgcccttctcgtcgagattgagcttcatgttgtcgatgcccaccagtccgaggaaagtcagctcgtcccgctccgagaaacgggtcttgaccttcagttgcccgtcgatgtaattgggcaggaaaggaagccccagcaatttgaagaggaactggagataggattgccgcacggaaaagaggtaagtcgtctttttgcccacgtgtccgctgccgctgagcgacacttcggaggcaccgagcgtcgccttgaaggtctgccgttcgagatcgccgtcccgcagccggaaatccaacaccgaactgagcgccccggcacggtcggcgggaaacgaacccgtatagaaattgatctcgcgcaccagatcggaattcacgatgcttacgggaccgcccgtggcaccctgcgtggcgaaatggttgatattgggaatttcgatcccgtccatgaagaagcggttttcggacggtccgccgccccgcacgatcaggtcgttgcgataaccgatgggcgaaaacgacacgcccggataggaacgtacgatacgcgacacgtcgcgattggagccgggactcttctcgatctcccgcatcccgatcacctgcatactgaccgggctctcgatcgtacggcggaaaggcgagggacgaacgacgacttcattcagatgctccggctcctcctccatctcgatttcgatgaaaggcgtccgggccgacacctggtattcgggggtcacgaccgttcggtaaccgatgaacgacgccgtcaagctgtaaatgccgggcttcacctgcaggatctcgaatcgcccgagcgaatcggtcatggcgcccttaccgggctggccggtgatcgtaacggctgcataggcgaccggttcccgggaaagacggtcgataaccctgccccgcacaggataccccgctgcggcccaaacagaaggaatgtacaataccagcaaaacgattgctgccagtaagttctttctcataattcacaaaatcaaccgtccgcaaagctaataattttagcggcgtttcgatcttccggccgtaaagaatcgaccgaggcggactgattcgaggcgaatcggacgatttacggcatcgacacgataccccgaatcgcccgccggcataacctaataatcgaaagagatacaaaaatcatgaaatccaccccggaaggaatcgaaatttacactatttttgtttccggtcaatctcacctaataagtatatgcgcacactgatctcgattctctggatttcgttctttccgcttgccgcagcagcgcagggcgacgacctgtcgtatcggctgaaaaaggtgataaaggataaaaaagccgaaatcggtattgcggtcatcctcgacgcacaagatacggtaacggtcaataacgacgaccgctaccccctgatgagcgtattcaaattccaccaggccctcgccgtcgcagattacctggaccgaaacggactgacgcccgacacggaaatattcattccggaagaagagctcgtccccgacacgtacagtccccttcggaaggaatttcccgaaggcgaaatctcgctttcagtcagccgtctgttggagtacagcctgcagctgagcgacaacaacgcctgcgacatcctcttcgagcacacgggcggtccggcagcgacagaccgctacgtccggtcgctcggactgcgcaatttcgcaatcgcagcaacggaacagcagatgcacgacgatccgcaaacgtgctacgaaaactggagtacgccgctcgaagcggccgctctgctggagctgctcgtaacagaacagattctcactcctacactgcgggaaatgatccggcaaaacctgataaactgtaaaacaggtgccgaccgtcttccgaaaccactgtcgggaaccggcgccgtcatcggacacaaaaccggcacgagcgaccgcgacgaacgaggcatcttcgccgggaccaacgatccgggattcgtcatcctgccggacggcacccgctataccatcgccgtcttcatcaaagattcggcggaaaacccggaaacaaatgcccgaatcatagcggatatctccgaaaccgtttatcgatacgttcacgacgaataccgggaaaacgacatccgccctggaaaaaaacacgtcgatcaaggagccggaattggattcgaatccgattatttttattaaatttggaaagaaaacagcgtaatttgcactgttcttgcacggaatcagaaaaacttcaataccccaagcatgaaaaaaatagcggcttacctcattcccgtcctcgcctgctttgcagtaggtatctcggcaagttttttccaggcttcgtccatcgccgaatggtatccgacgctgaccaagccgacactcacgccgcccaatatcgtatttccgatcgcctggagcgtcctgtacctctgcatgggactttcgctcgggcgtctcatcgtgcgtcggcagcacaaaggaatcatccggctgtgggtcttgcagcttatcgccaacttcctgtggagcatcctgttcttcacgctgcgcaatccgctggccggattcatcgacatcgtactgctgaatatcctcgtgggactctacatcttcgccgcgagccgcagggaccgcgctgccgcctggctcttcgtaccttacctgctctggacgctcttcgccgcctacctcaacggatatatcctgctgcacggcaccccggcggcggctccgacgacaattcaaaccgaatctttaacaatatcaaaacctaaaacagaaagaattatggttcacaaaatgcccgaacttccgtattcgacggaagcgctcgctccgaaaatgagcaaagaaacttttgaataccactacggcaaacacctccagacctacgtggacaatctcaaccgcctgattcccggcacgccttacgagtcgatgtccctgcaggaaatcgtcaagaaagccgacggtccgatcttcaacaatgcggcccaggcctggaaccacacgttcttcttcctgatgctgacccccgatcagaagccgatgccccaaaaactagcggatcgcatcgcccgcgacttcggatcggtcgaagccttcaaggaagagttctccaaagccgctaccggacttttcggctcgggctggacgtggctcgcagccgacaaggacggcaaattgcagatcatctcggaatccaatgccggcaaccccatgaccaaaggcctcaagcccgtcatgacgatcgacgtatgggaacacgcctactatatcgactaccgcaaccgccgcgcggatttcatcaaatcgtactgggagctgatcgactgggacaaggtggccgaccgcatattcccccgcaaataccactgcaccgcctgcgactacgtatatgatccggccaagggcgatcccgaaagcggcatcgcacccggcacggcattcgaagacatcccggacgactgggtatgccccgtttgcggactctacaaggattccttcaagatcgtggaagagaaataggcgatcaggaaaattgaaaaaagcagcgcataaagcgctgcttttttgtatcgggagaatccgtcgcagacacccgacagccgtttttccgcgcccgagggaagaagccgggcagcccattccgtccgacaccagaaataaagagatcgacccggcaacagatcgacctctttgtttcagtccatactaatctctactttattgcgactgaaacctttatcggcaagacactcttcttctgcacaaactccgcacttcggcgtatgccgtacaacggtttcgaaaaatatttcatcagggaaacagagagccgcctcgcttcaggttatcaatccaccgaaaagatgcctcgcaggtcttttccgaaagctccgttctccgcagacgcatatcatccgaactgtccgttcatcgggcaggcaaaggctggtcttctgactcgtccccgccgcaacgccttcccgaccccgcaggaccagtggcaaaagagtgtcgcggcaatacacccgggcatccgaaacaccgcccgcaagcgggccgatcacctcggatcgtcgggcaggactcacagcagcgggaactgtcgcagactttcactgcgttcccatttaatctgacggggcgtaacccctcgtgaaccgttgcagtgcaaatgtaagaaaatatttgctatctttgcccggtaaccaaaaaatattttgacagaaactatgaaacacgcatacgtatttccgggtcagggcgctcaagccgtcggcatgggcaaagacctctacgacaatgtccccgaagccaaggctctcttcgagcaggccaacgaaatcctcggtttccgcatcaccgacatcatgttcgccggtacggacgaagagctcaaacagactaaagtcacccagccggccgtattcctccactcggtcatcatggccaaggcgctgggcgtgaagcccgacgcggtagccggacactcgctcggcgaattttcagccctggtggtggccggcgctctttcgttcgaagacggtctgcggctcgtttccaaacgtgcgatggccatgcagaaagcctgcgaagccgtacccggtacgatggcggcgatcctgggactcgacgacgccaaagtagaggaagcctgcgcctcgatcgacggcgtggtcgtggcggcgaactacaactgccccggccaactggttatctcgggcagcgtcgaagcggtcgatgccgcctgtgccaaactcaaggaagcgggcgccaaacgcgcactgcgtctgcccgtaggcggtgcattccactcgcccctgatggagccggccaaggtcgaactcgaaaaagcgatcaacgaagcacccttccaggctcctgtctgccccatctaccagaacgtcgatgccaaaccccaaaccgatccggcgacgatcaaggccaacctgatcgcacagctcaccgcaccggtacgctggacctacatcgtcaagaacatgcttgcggacggcgtgaccgaatttacggaactcggtcccggcaatgtcctgcagggtcttatcaaaaaagtgaatcccgaagcggtcgtagagtcgaaatcgacgttgtaacccgcctccgaaaacaaaatagaatcgattgacaagcaatcgattctattttgtttataattttttttcatatcacaagatcaaatacgccaaattcgattgaattctttctatatttgcacaaaaattacagaagacatcaaacgacatcaataactatgacatcgttaaccgaatttttcagccgacaggaagatgacaatctgaaaggtatttcgcacaagaacaacctcttcaagcgaaatatcatcgcacatatggcggtgaacggggagtgtacgctctcggagcttaccaaagagctgcacatcagcataccgaccatcaccaagctcgttcaggaactcgttcaggagaacatcgtcaccgatctgggcaaggtcgaaactccgggcggacgacgtcccaacgtcttcggactggccagctcggccatctatttcgcaggcgtcaatatcggccgggacaacatgtcgttcctcatcacggacctgcacaacaatatcgtcaaagaggaactcctgaccgacttcgaactgcaggatcgccctcaatgcctcgaaaaaatctgctcgaacatcgcacatttcatcgatacgtgcggtgtggaacgcgcgaaaatcctcggagtgggtgtcagcgtcagcggacgcgtcaatcccacgacgggacgcagttaccgctatttcacttcgagcgaacagtccctgcgcgatatgatcgaacaacgcatcggtatccgcgtactgctcgaaaacgacacccgggcccgatgctatgccgaatacaccaacagcaaatccaaagacgagatggacgtactctacctccacctcggacgcggcctggccatcggtatcgtcatgaacggcaaactctactacggcaagagcggctttgccggagagttcgggcacattcccttcttcgacaacgaaatcatctgctcctgcggtaagaaaggttgcctcgaaaccgaagtttcgggaatcgcgatcgaacagaagttcggtcggcttatcagccagggagtcaataccatcctgcgcgaaaaatacaacaagcacgaagccatccacgtcgatgagatcatcgacgcagccaagcacgacgacaatctctcgatcgaactgatcgaggaggtcggagaaaaggcgggcaaggcagtcgccttcctgattaacaccttcaatccggaaacggtcatcgtaggcggcgagctggccgaagcgggcgactacctgatgctgcccctcaagtcggcaaccaacaaatactcgctcaatctggtctataaggacaccaaattccgcctgtcgaaaatgggcaagacagccagtgcctggggtgctgccatgttgattcgcaatcaggtgctcggactttgctaatgatgctccgaggacatatttgcagcctgcgggccgtcgaacctgaagatctcgaactgctttgccggtgggaaaacgacccttcgttgtggacagtcagcggcacgatcgaaccgttctcgcactattcgatcgaacaattcatccaggagcagcaggctggtatttaccgatgcggacaactgcggttgatgatcgacgacacagcggggaaaacgatcggagccatcgacttgttcgatttcgagccgcagcacgaacgggcaggcgtcggcattctggtttacgatccggcacagcgcgggaaaggatacggggcagaggcattggctttgctcgaagagtatgcccgcacggtactccggctgcggcaactgtggtgcaacgtactcgcggataacgtccccagtctgactctcttcgaaagagccggattccgccgggtcggggttaaaaaggagtggatccgcacccccgaagggtataaggacgaagtattgctccaaaagctgctttagacaatttgaaatacaaatctgccggaattttcctgcccgataagtgatcggcgacggagcatcccggtagattttttttatcgtatctcgggaggaaactcgcatctcctcctcccgacatccggctttttcaagcacccctcgcaccggttacgcaccgctgtcgtgccggggcaatcccgaccctgccgaagttactcttcgtccggtaaatcggccgcctgcaaagtccgggcagactgttgtttcttggtcggaattcccagtttgcgaagccgctccccgcagcggacgatgttgtcgttaccggtgcaaagccgcttgtaggcatcgttatacttgtcccgggcggcgtcgagcgactgtcccaccccttcgagcgaagcggtgaaagccaccaactgctcgtagagtttcgtaccgtaagtaacgatgtcggccgtattcttgttctgtgcgttccgcttccaaagatcgtccaccaacttcagtaaggcgaaaagattggtcggcgaagagatgatgactttcttgtcgtaggcatcggcccagatggagctgtcgttttgcagcgccgccagaaacgccggttcgttgggaatgaacataatgacgaaatcgggcgaatcgagcaatcgctggtactccttgcgacccagttcgacgacgtgctgccgcaccgacgcgacgtgcgacgcaagatactggcgccgggtcgcctcgtcctcggccccgacatatccgacgaatgccgtgagcgacaccttcgagtcgatgacgatccgtttgccttcgggcagataaagcaccacgtcgggccgcaggttgtttcccgcctcgtccttgatattgagctgcgtatcgtaatgtacgccccggatcagattcgaattgtcgaggatcgtttcgaggatcatctcgccccagtcgccctgcactttggaattgcccttgagcgcgttggtcaggttggtcgtttcggtggtgatgcggcgattgagttccatcaggcgttcaagctcgttgcgcaacgccccccgctgttcgttctcggaggagtagatcttctcgacccgctcgcggaactccacgatgttatcccggaaaggtttcaacaacacgtcgagcgcttcgcggttggtctccttgaaagtgcgcgactgttcgcccagaatgtcattggcgaggttcttgaattgggtccggaaagtctcctccatcttttcgcgttcggcacgtgcctcggccattcgctgttcggccgcctccagacgggcctgcgccagcgtactccgctcgaccagggtgcggatttcgatttcggcggcagcggatttctcttcggacacccggcgcgactcctcggccaggcggcgagcttcgtccgcagcagcccgttcgtccgacaaacgggcgttatcccgacgcagggagagcaaaagcaaacccagcacggcgcaaacgacgccgagcgacaataaaacgacaacgattccggtattcatgacagcaacaaaaataacaaaagatgcaagcaatcgtacgggcatgcacacaaagattgccgaaccgcatccaatctttaacaaagataagaataagtcaaatgcaaaagcaaatttatttacattttataatagaggcaaagaacctaaaaaatataatctaatttattttcgaaacaacattgtaaaatcattttttatccatatatttattctgaaattattctttaaccaaaaaaatgctctatgatgaactttgcttccatgaagtttttcctggtaggattgactttgacagccatgctctctgcatgtagtgatgacgaaacatcagaccttatccccgaaccgagcatctcaatttctgctttagaaagtgaaatcggggcactgaacttctcgatcaacgtggaaaatgccgagcaatgcgcttacgtctgcatgaacgcgaacgaatcgctccccacgactgctgatgaaattttcgcaaccggaacgagcattaaactcacggacaagaacaaactttcgatccgagttcccgtcgacaagcagattacatatgccgttatcgctgcagctgcgaaccagacgggcaagacaatttccaacaaattacaacttaccccgctcaaagacgaagacccagggacggaagatcccgaaccgaaaccggagcaaatcgatatcactttttcaacaggagaattactttatctgcctaacggcatgctactaattaacctgttcgaaacggacaacacaagtgtttatcagacccaaatcaaacttgaaggtatcgaaaacaacggcgcctagagaaacggcagccgcctgcttgcagaagacctttataaaacagtatcctcctcttatctgatagacatcgaagggaatagcgacattgacgacaaccttcctgcagggacattggtcaaaattgaacgaggcacggcaaacactgtaattctgaccattacaggcacattatccaaaagcgaaaccaagtttaccggtcgattctccggcatactctcgcacgagatggagttaaagaactattctctcaacaatgtggtattcgacgaaaccggaggggccaaatggaatgccgaaaagaagacaatcgcccttccgctacgcagttctgctcaccccgacctgaaacagttctcgctggtattccattccgaaaccgaaacgctcgcaacgggtaactacccaatcagcgaaaatggagaagcaggaaccgtatcgttggccaaagcctatttcgccaacgctcccgtttacatcaacggtacactcggcccgtcggaaatcggctacaaaaccggctcgataaaagttgaagtgagtccggaaaccaacgaatacacgctcacaatcgacgcccgtgattcatacgatattatctatcaggaaaacgcgtcggcacaagtcgtttacggaagcacgctgactgggtcgttccaaggttctataggggaacaaggaggaggcgaagatcccgaggagcctcaatataatgtatggcaagacacctattcaaatactccagccgtagtttcatacggacttacgtcagatttggaaggttacgagcgttcctatattggacgtattgaccttcaacccgacaccgaaggagaagccaacatgcgcctcttctttattaatcgtgctccggatgcatcggccgcaggcttcgatcccacacagatcgagttcattcccggctactcatacgccacgctcggacaggatttggacgatcccatatttccgtatgtactcatggaaggcgacctgaatctgtcttatgacagcggaagccaaaaatggacgctccactacgaaggcttcttcgtagctccactcggacacaaaatcaaagtaatagctgactatgtcggtccgatggacggcttcactgctttgtaaacagacacaagtaatctatattttcagccgtcttctttaatgacggctgaaaatatttccaacaaaaaaacaccaagccatgaaacatatatcaaaaaacataaagcacagacttctttatatcaacatgctattcttgtgcggaatcctgtcaggcgcttgcaacaaggaaaatgagccggacataactcctccatccgaaggagagcaatccaatcccgtcgaaatgactttcacattcgatgtccaaaccttgagtccgaatgcagccgagatttccatcacaccatcagacaatacacaaacatggtattggactcgtgctaccgacaaggaatttacagacgcaaataaaaataaagacgctttattcaaagatatgctcgaaagcgacattgagtacggcattcaggaagaaggattcgaccgagccggtgccgtagccgacatcacccacacaggaccattcaacaacacgctccaaagtcttttcggatcgacgacctaccatctgttggccgctgcgatcgacaaggagggtaacccgctttcggaagtctcccaatacacattcgaaagccagaagactccggtatccctaaatacattctcaatcaagattcccgacgaagacgtctcttatgcatcagccaaaatctcgattactcccaccaatcaggatccctacacttggtttatagccgtttcatcacaagggactccagaggaactcgccgacgcctatatcgatgcgaacggaattctgatgaacacaggactttacgatatttacacgggatcgcaaatccgcacaataaacgcactggatccaaacacgtcttattccgtcgtggtattcggttaccaagccggtcgtacaaccagtgttgagtcggcttcgttccagactattccggctggcgacccctccgaaacagtttttgaattcagcatcgatcccgctaaattgacggcccgtagcgcggaagtttccgtcacacccagcgacccgagcgtattatactggtatgagctcttacctgccgaaaaatacgcacaatacggatcgaatgaagagaccgtacgcgcttatcagcaacagatattcacgacttacgaggaacagggctacacgatcggagagatcgttcgcggattctgtgctcgtggtgcggtcaccatgtctttcggcccggaaagccctgccggactcctctctccggaaacggaatatatcccgttcgctgtctgtatgaacttcgatggcacgctggcaggtgaagtctttgtcggcgagaaattaacgacaccaaaagcaaccgtttcgtccgcttgggccaaagcttggatgcgggcttattacgactgcgaccaactggctctactcgatcccgaattaagttcattagccggcaagaacctgctagccatagacatcgaaatcagccatagctccgacgcggcccactggtatttcctaggtttgtcggccgactacaccgacaaaaccaaatatcccgaagaagagatgttatcagctattttgacaaacgtcagcacggaagcgacactcaaagacgaaacgtccacactgattctcttcccggccgaccagcaaggcacattcctctcgatggccgaagatgcctctggtaactatagcgaaatagagagagtattgattgggccgctctccaaggaaggtgcatcacctattcctatgtccagttcgatgtcgctttcgaacatgcagaccaacattcctttaacaaatgcatatttccgcacgggtaccaacgtacagacggaatggccggattacatatatcgtcttcagaataccgtcgagccgatatcggttcgttaaaaccggcgacaagcattgcaacagaaaaaagtatttttcggaacgagaagagagaggcaatgcctctctcttctcgttcctgttcaacagaatccctgtaaaaccagcataacaactaaaataattacaacaagactgtccgtaatacaaagcataaacagaccggaaatattacaacgccaaacaactacaaataaattcccctgcccgacatcctcattctatttcgaatttactatctttgccaaaaataacaaggtattttgggtaaactctactccaaaattgtctttgtttctattattcagttttaagaatctaaaaccatgcaacgaatcatatccccctcgatgctgtcggccgatttcggccacctggaacgcgatacgcagatgatcgaccgaagcgccgccgaatgggtgcatatcgacgtcatggacggcgtattcgtccctaatatctcgttcggattcccggtgatgaaagccatccgcaaggccacgtccaaactgctggacgtacatctgatgatcgtcgaacccgaaaaatacgtcacccgcttcgccgaggcaggcgccggaatcgtcaccttccactacgaagccacgctcaatcccaaagggtgcatcgacctgatccaccgcgctggcgccaaagcgggcgtttcgatcaagcccgccacgtcggtcgaagtgctgcgcgacatcgtacccctgatcgacctggtgctcgtcatgagcgtcgagccgggtttcggcggacagtctttcatgcccgactcgctggagaaaatccgggaactgcgtgccatgatcgacgaaacggaatctaccgcagtgatcgaagtcgatggcggcatctctgcccataactcgcgcctgctcttcgacgccggagccgacgctctggtcgccggcagcgccgtcttcggcgccccggacccgcaggcggagatcgagagaatgttgcagagctaacctccgactcctttcacccaagcacctacttccggcaagccgggcgttccgcacgcacggaaaatcgcagaaaacgaaaccatgatctctttagacaacctcaccgtcagctatggcggctggacgcttttcgacaacatatccctgctcatcaaccccaaggaccgcatcggcctggtcggtaagaacggcgccggtaaaacgactctgctgcgtctgatcgtgggcgaacagcagcccacctcgggttcgatctcctacaacggcgaatgcacgatcggctacctcccgcagcagatgcgcgtagcggacactacgacactcgtcgaagagacggccaaagccttcgacgaagtgctgaagctcgaagccgaaatcgcccgcctcacccgcgaaatcgccgagcgcaccgactacgaatcgtccgactacgaatcgctgctccaccggctgaacgaagcgaccgaccattatcacatcctgggcggcgatacccgcgaagcggacatcgagaagacgctgctcggtctgggattcaagcgtagcgacttccagcgtgccacgagcgaattttcgggcggctggcgcatgcgcatcgagctggcgaaactgctgctgcgccggccctcgattttcctgctggacgagccgaccaaccacctggacatcgagtcgatccagtggctcgaggattacctgaaaaactacaacggcgcggtgctgctcatctcgcacgaccgcgcctttctggataacgtgaccacccgtacggtggagatctcgctgggcaaagcctacgactacaaagtcccctactcccgatacgtcgtgctgcgtgccgaacggtgggcgcagcagatggccgcttacgaaaaccagcagcggatgatcgaaaagaccgaagagttcatcgagaaattccgctacaagcctaccaaatcgaaccaggtgcagtcgcgcatcaagcaactcgaccgtctggagcgtatcgaggtcgaggaggaggatctcgccacgctcaacatcaagttcccgcccgccccgcgttcgggacagatcgtcgcagagatcaaggaggccgggatgtcgttcggctccaaacatgtcttcagcggcgcgaacttcaccatcgaacggggcgacaagatcgccctggtaggccgcaacggagaaggcaagaccacgctggcccggatgatcgtgggacaactcacgcctaccgaaggctcgatccgcgtgggagccaacgtaaacatcggctattacgcccagaatcaggaagacctgatgaacggcgatttcacggtttacgacacgctcgaccgcgtagccgtcggcgacgtgcgcacacgtctgcgggacattctcggcgccttcctgttccggggcgaggacatcgacaagaaggtcaaggtactctccggcggcgaacgcgcacgactggcgatggcccgtctgatgctggagccttacaacctgttgatcctcgacgagccgaccaaccacatggatatgcgctcgaaagatattctcaagaacgccatcatgaaatacgacggtacggtgatcgtcgtctcccacgaccgcgagtttctcgacggcatggtttccaaagtctatgagttccggaacggcggcgtacgcgaatacctcggcggcatctactattttctcgaaaaacgcaagctggaatccttgcaggaggtggagcgtaaggacgctcccgcgaaagaggcggcgccgaaagccagctcttcgggcaaactgacctacgaacagaagaaagagcaggaaaaactcctgcgcaagctccgcaaggcggtcgaaacgatcgaagcgtcgctggccgatctggagaagaagatcgcggattacgaccgcaaattcgccgaagcgacccaatacaacgaagccgactacaaggcttacaacgagttgaaagccgaatacgaccaccagatgcacgaatgggagaaggcatcgtacgaactggaaatcaccgaaggagagtaacgatcggagccggaagaaagccaacagcaccatgaaagcacttatcctcaacggatcgccccgtccgcagggagttgtcgtccaggcgctccgcaccgccgccgacaccttgcggcaggccggagccaacatcgaatggatcgacgctcaccggatggaattccgtccctgcacgggctgtatgcagtgccgcacgacgaacatctgtccgctgccccgcgatgcggcccatgccgtcggcgaacagatccggcaggccgatctgctcgtggtggggactccgacctactggggcggtatgtcggcccggctgaagatgctcttcgaacggctcgttccggttttcatgggcgaatcggctctcggccttccgcagccccggcaaaaaggcaaacgtgcactcgtcatcgctgcctgtacgacgccctggcctttcaacatcctcgcacggcagagccggggtgccgtccgttcgatccgtgaaatattgggtacgggagggatgaaagtccggacctgcgaaatccccggcacccggaaaatgaacggcaaactttccgaaaaggaggcccggcgaatcaccgcacgcacccgcagaatcgttcgaaaaatagaataaaacttttggcgacatccgattcgactgtccggataaagaacaccgaaaaacataattccagacccgatccgaaaagccgcgcgacacaaagacaaaaaaaatcaactaacgaaccaaccaataccatgacggaaaaccttgtattcggcatccgccccgtagtcgaagcgatcgaagcgggcaaacagatcgaaaaactctacatccgcaaaggcgccgaagggcagctgatgaccgaactgcgcgacctctgcctgcggtatcgcatccgcacacaggaggtgcccgtcgagaagctcaaccgcctcacgcgcggcaaccatcagggcgtcgtcgcccaaatctcccccatcggctacgtcgaactgaacgacattctggaacgagtgcccgaagacgagacgccgctgatcgttctcttcgatggcgtgacggacgtgcgtaatttcggagccatcgcccgctcggccgaatgtgccggagcacacgggctgatcgtaccgctgaagaatgccgctcccgtcaattcggaggcgattcgttcgtcggcgggtgcgctgaccgccattcccgtctgccgcgtcggttcgatccgcaacacgctcaaagcgctccaggcggaaggctaccaggtggtaggtgctacggaaaaaagccgcaagctgctctacgacgcggatttccgcaagcctacggcactcgttatgggcgccgaggataccggcatctcgaaagaggtgctgaagctctgcgacgaacagctggcgatcccgatgatcggtaagatcgaatcgctcaatgtttcggccgctgccgccgtgctgctgttcgaaatcgtacgtcagcgaatcggttaatcctgccctccaacctctcgacacgatgtccctgctgcgcgacttattcgacctgttccgctccgagccggatcatccggcaacccggaatccaaaatcgaagcccacgaccagaaaacccgcccgcaggcaaaagacgatcgtccatccgatagtcggagaggtgaccctctcgcaaagccgccaggcacggcggatctcactctgcgtaaggccttccggccccgtccggctctcctacccttacggcgtctcgaccgcccgggctttggaatttctggaaagccgtatcgaatggattcagacagccagggatcgaatagccgaacggctcgcccagcaacctccacatcccaccctttcgcccgaagaagaacgccgccggcgagaacagttgcggcgcgaagcggtggctgtactaccgtcccgcgtagcggaactcgcagtgcgaaccggtctgcaataccgttcggtaacgatccgggccacccgctccaaatggggctcctgcaacgggcgcaacgacctgtcgctgagcctgtacctgatgacgctgcccgaacatctgcgcgacttcgtcatcctccacgaactctgccacaccgtccaccacgaccattccccccgcttccatgcgctgctcgaccggctggtcgggggtaaagaaaaactcctcaacaaggagctgaggagttacagggcctattgagtaaaaattcacgatcgaatcttcaaccgctctttttctcttctcatccgaagcagaaattcgatataaagccactcgcacacaaatacaaaagaaataagaggaaccgcaggcagctcctcataatgacgggtaaaaagctgacagatcatccaaccgacaaggtaatctccgaaaagaaacagtcctatccaaaatatcagatcaaaaatcgaagggctattctcccgaatatactcccgtttcagccgcagacacttcgcgtaatcgatcttcagtatttttactttcaatatctcgccgaagtgcagatagtcgagttctctcaattcataatattttccggcctttgcccggctaaatttatatggatgacccgataggcaaacgaaagccctttcccacagaattttacaaaaacctcgatacagccgatctcttcggccgcgatccgctttcggacaaaaagcaacggataagatacggtaaaacccgcctcatcgaacgtgaacgtacgaatacgaagaaatgcgaagataatagcggcccagagaacgacaggcattaaaccaaaacaccagtctgcccccgaaagcagatcctcaccttgcgcgagatccgaataacaaagagcgaatataacgatcaggctccaaagcagagtgatataggccataaaaatataagacccgatcgttattctacgcaaccgggtacgcattcccttctataattcagaataacttctttttcgaccgggtgacgacgaaatccttcaggtagaaaggctcgaagtacgcgatatcctccgtgcggcccgcatcgagcgcctcctgtgccagccgcgcaagccctcgggcagaaggcgccacctggatcagcgtcgcatcgggcagcaatccggcacatttggccgcaccgtttccgaaaatcacgaaaggacgtccgtctccgcgccatgccgcgaaactctccgccgtaacgacctcggcggatacgtccgaaagaggagttcccgcagcatcgaatacccgggtataaacctccatgcggcgggcgtccaccatcgggcagaggcacgcctcctcccagcgatcgaccgagagaatccccgcttcgtaatcctctttcgcaacttcggtcagggcatccagggaaccgatcgccaccagcgggatccgcaacccgtagcacagtcccttagcgaacgaaacgccgatacgcagccccgtataggagccgggccccttgccgacagcgacggcatccagctcttcgggagcgatcccggtctgcgacagcaattcatcgacgaaaactccgacctggcgggcgtggtcgcgcccctgatcgctctcccggagcgagatcaactccccgtcccgggccaaaccgaccgaacagatgtccgtgccggtttcgatacatagaataagtgacatatcttttttctttcgtttttcaatccaaacacctccggcagaccttcgcaccgacattgtcgccccctccctgaagcgaacgggaagcggaatgatcgccgaagtccgcccctcgggatgcgaaccgtttctccgatccgaaaagccgccgcagggaaaccgctccctgcaaagcgtttcgaatagccgtacgatccgattccacccgacagcaggcagcggcaggacgatcggccccgggatgctctccgaggttacgcccgatatttcttcatcgccttgtccatctcgcgcttggcgtcgttctccttgaggtactcgcgcttatcgtaggccttgcgcccccgggccagacctacgacgaccttggccagcccccgctcgttgagaaagagccgcaagcccaccacggtcaatcccctgtcctgcaatgcccgctgaatcttgttcaactccttgcggttgagcagcagtttgcggtcgcggcggggaacatgattgttgcaggtcccccaaccgtactcggcgatattcacgccccgaatccagagttcgcccttgtcgaaataacagtagctgtccgtgatcgacgccttgcccagccgtacggacttgatctccgtacccacaagcacgatgcccgcgatccactcctcgataatttcgtaatcgaaggtcgcgcgtttgttccgtatgttaatattcttataatcggccatatccaatttctctgtttttccgccggaacctctgttcgggaaccgacgatccggcaccatatttgattaatcaaccgcagagggtgtccgggaaagataactaattcttttatctttgtagaagataggatgcggctcggcaatctttgcgtgcaaacgcgcatgactgctctcgcctttgactatctttgatatgttttacacatctttctgtttattttctgtttgcacacggtatgcatagtgatacgtgtacgcccggacccctctttttacagaatcaaccgatgcaatttccgggcaatcgaaacctttcccctgttcaggttcgacagccgctgcataatgtcctgcatctcgtcgtccgtaagattctcgtcctgaagtttttcacgaagctcccgcgacatccgctcgatcaccttcgacttgtagagcgtcacggccttcggcactccgacagccagcatctcggcatcgctctcgacatggacctccttgcgccgccacaattcgctcggaacgtaatgatcctccgaagtaaggatatccaccgacacgttacacacctccggatcggagtgattgataaagtggtggatcggcacctcgacccccaatcccaaagcgcaccactgttcgcggtaaacccgcagaatctcattgaagacccggttctggaactccaaaccgtcggcgtccaactccccgaaaattacctcggcgacattatattgaacgacattccggccctccttgaaatcgaacgaacaatgaccgtacttgagcagataacgcgtcagctcccgttcgagcgcttcggcactgctgcccccggtcacctgtcccgcaaaaaccgtttcagggcgctgcgcagtctgctcggcacgaaaacgggcgctctgacgccgcacgaactcctcggcttcgcggtcgcccgtggaagccatacgcttgcgccccacttcggcaatcagcaggttctcgtcgatgtccatgatccgtgcgcactccttgatatagaccgagcgctggatcgggtcgggaatctgcacaatggattgcaccatgtcgttaatcaacgccgccttcttgatcgggtcgccggcagcatccttcaacagtagcttggccttgaacgtcaggaaatcctcctcgttggcccggatatactcctgcacctccgcagccgtatgggttcgggcgaacgaatcgggatcgtcttccggcggaagcagcaccacacggacattcatcccctcgcgcagaatcatgtcgattccccgcagcgaagcgtgaatacccgccgaatcaccgtcgtagatcaccgtgatattcctggtaaaacgtccgagcaggcgaatctgttcggtcgtaagggatgtaccggacgaagccaccacattctccacccccgcctggtgcatcgaaatcacgtcggtatatccctcgaccatgatcgcgaaatcatactgctggatcgctttcttggcgaaaaacaggccgtacagctcgcgtttcttgctgtaaatctcgctttcgggcgaattttggtacttcgcaaccgacttgtctgtacgcagcgtgcgacctccgaaagccaccacgcggccggaaatgttatgcacggggaacatcacccgctcccggaaacggtcgaagagcgaaccgtcgtcgcgcttgatcgaaagtccggtcgaaaccagaaactcctccttataaccggcagccaaagccgcccagctcattcggtcgcccctggcgggacagaatccgagcccgaacttcttgatcgtcgcatcggaaaatcccctcttctgccggaaataggtcatgccgacactcatcccttcggtttcatggagcaggtaattcgaaaaatactccgccgcccaactgttcacgacgaacatactctcgcggttgtcgttgcgggcgacctcctcgggcgtcatctccttctcccgcacttcgataccgtaacgcttggccacggctttcaacgcctcgggataagtcatattctcgtgctccatcaggaaagtgacggcattgccgcccttgccgcagccgaaacacttgtaaacccccttcgaaggcgatacgacgaacgacggggtcttctcgttgtggaacggacaacacgcctgataattgacaccctttcgtttgagcgtcacgtattcgccgataatatccacgatattcgcagcggcgtaaatcctatctattgtttcccggtcgatcatctttgcaaaggtacgaataattcaattattacggattacatcaagtacttattcgcctcttcgaggcgatactcaggagaacattcgaatagatagttcagtaaattcagatgccccgctccgaaaataacgaggatcctgtcggacggccccgtttcgatccgttgaatattccggaatatccgcaaattccggttaaaccaccttcccgtttcaaaatctacaccgatataatcgttcgagaagaattcatatttgaaatgaccgatcaagtaattacccagactacgccgaatatgctccgggtcgttcagctcgataagttcggcaataattccctgctccttgaaaacagcttcgggcacaaaccttttaatagaatccggatggtcgtaaaaactggtttcgaaacggatatactccttactgttttcatcgcgtaataactcatcgatttcgtcatagtgctttccccattcatctacgcagtaaatccggtctatccccagccgttttgccagccggaatccgatctgctcgtcttctcctcgctgcaaatcataacagtccgccaaatatcgacggaacagagagtccgtctcgaactgcattttaaccggccgttcgataacgataatcgttggggcaaacttctccaacaaaccgaccaatgtttcgatctcattctggtaaaccgggttcaggacatctatttgctcgctttcggcatactgcacctgatccagattgggaaaatcgaaatgaaaggtacctaaagtgagtaccggaacaggctcttgtgcagcggcaaaacaagccgacaaaacacaaacgatcaaaataattatttttttcatgtcgtatattttttccgccgcaggaaagattgttcgcaaaactgaatttatacaaaaatacatgttttacataaaacatattctattacactcctgaaaaaacagaggcaaaatatattctgtttttgaacgttaattttcaattatcgttatctttgccttatggacttcaaattggtatccgactatgccccgacgggcgatcagcccgaagcgatcgcacagctattggcctcgatccggcacggctcgaagcacaatacgctgctgggcgtgaccggttcgggcaaaactttcacggtggccaacgtcatcagccagctcaaccggccgaccctcgtattgagtcacaacaagaccctcgcggcacagctctacggggagttcaagaactttttcccggaaaatgcggtcgaatacttcgtttcctactacgactattatcagcccgaagcctacctaccttcgacggatacctatatcgaaaaggacctttcgatcaacgacgaaatcgaaaagatgcgtttgagtacgaccgccaccctgctctcggggcggcgggacgtcatcgtcgtttccagcgtatcgtgtctgtacggctgcggcaatccgagcgatttccactcgatggccattcatatcgaagtcggcgaaatcctcaactacaagcagttcctctacaaactggtcgaagcgctctatacccggaccgaacgggaactgacccccgcgacattccgcgtgacgggcgacacgatcgacatcatggcggctttcggcgaattcggcaaccagtgtttccgcgtcacctttttcgacaacgaagtcgagagcatccagagcatcgaccccgtaaccggccagcggatccaaacgctcgacgcactcaccctttacccagtgagcctgttcgtcacgaccaaggagcgcatacacacggccgtgcagcagatctacctcgacctgggcaagcaaatcgccttcttcgagcaagcgggacgtccggccgaagcgcagcggatcaagcagcgggtggagtacgacctggagatgatcaaggagttgggttactgtcccggcatcgagaactactcccgctatttcgacggacgtgcagaagggacgcgacccttctgcctgctggactattttccgcaggattacctgatggtgatcgacgagagccacgtcacgctcccccaggtgcacgccatgttcggcggcgaccgcgcccgcaaggagaacctcgtggagtacgggttccgtcttcccgcagccaaagacaaccggccgctccgcttcgaggagttcgaacaactggtcggcaccacgatctacgtgagcgccacaccggccgactacgaactgatgaagagcgaaggagtgatcgtcgaacagttgatccggccgacaggactggttgatcctccactcgaagtgcggatcacggacaaccagatcgatgacctgctggaggagatcgacaagcgggtacgcaacgacgacaagatactcgtcacgaccatcaccaaacgcatggccgaggagctctccaaatatttcgaccgagtgggggtccgcaaccgctacatccattcggacatcgacacgctggaacgggtgcagatcctcgaagacctgcgggccggcatgttcgacgtgctgatcggcgtcaatctgctgcgcgaaggactcgacctgccggaagtggccctcgtggcgatcctcgatgccgacaaggagggattcctgcgcaacgtgcgttcgatcacccagatcgcgggccgtgcggcgcggcattcgaacggcaacgtcatcctctatgccgaccactgcaccgactcgatgcgctacgccatcgaacagagcaaccgccgccgcgaaaaacagatgcgctacaacatggagcacgaaatgctcccccgacaggcgcagaaaagcggctcgggacagagcaccctgctggcaaatacggttcagacacccgtcacggatggaattctctaccctctgcccgacaaccggcagacgctggccgcagacgttacgtcggcctactcgaccgagagcatcgacacgcagatcgcccgggcccgggaagagatggagcgtgcggccaagtcgttggactttctggccgccgcgaaattccgcgaccgcatgtacgaactgcaaaaattgaaaaacgaaaaatgaacatatcagcatacatctcggaactgaacagacaatacgcctctggaaatgcaacggaacacagttatcgtcccgcattgaagtcgctgtcggaaacactgctgcccgacctcacgatcatcaatgaacccaagcgcacggcctgtggtgcaccggactatatcctactgcgaaacgatattcccgtagctttcatcgaggcaaaagatttcactcagacacaagaccttgcgggacaaaaggagaacaaggagcaattcgaccgttataaacattcgctcgataacattattttcaccgattatctcgatttctggctttacgagaagggcgaatttgtggacagcgttcgtttggccgaaatcaaaggaggcaaaatcgtcgccgtggaaggcgccgaaacgaaattcgttctcatcatcgaacgcttgggcaaagccgtcccgcaaagaatcacgtctgcgaaacaattggcccgaatcatggcggcaaaagcgagactgatggccgacgtcatcgaaaaggcgctgctgcaagacgatagcgacagcaatctcaaagggcagatggaggccttcaaagacatcctgattcacgacatcacgccgaaagaattcgccgacgtctatgcccaaactattgtttacggtatgttcgccgcgcgtctgcacgacacgacccccgatactttcagtcggcacgaggcggcgacgctcatcccgaaaacgaacccgttccttcgccaactgtttcagaatgtcgccggatatgacctggacgatcggatcagttggatcgtggatgattcggccgaaatatttcgagccgcagatatgcgtcaggtaatggccggattcggacaccgcacccagcaaaccgatccgatgatacatttctacgaggatttccttgcggcgtacgacccgaaacaacgcaaaaaccggggcgtatggtacacaccgcaggccgtggtgagttgcatcgtaaagaccgtggacgaaattctgcaagccgaattcaacctgccgatgggtttggccgacacatcgaaaataaccgtcgaacgcagcatcgaccaaagcaaagacaaacggttctccgacggcaaaaagaaagagaccgtcaaaatccacaaggtacagctcctcgatccggcaaccggaacaggcacgttcctcgcggaagccgtcagccgaatccatgacaagttcaacggacaggccggaatgtggcaaggctatgtcggggaacatctgctgccgcgtctgaacggattcgaacttctgatgacctcctatacaatggcccatctgaaactcgactggattctcacagagacaggttacaaggccgacgataacgaacgcctgcgggtgtttctcaccaattcgctggaagaacaccacaaggatacaggcacactgttcgcccagttcctcgcccgcgaggccaacggcgcaaacgaaatcaagcgcaatactccggtcatggtcgtgctgggcaatccgccgtacagcggagaaagcaaaaacaaaggcgaatggattatgcgcctgatggaggattacaagaaagaacccgatacgaaccagcctctgaaggaacggaatccgaaatggatcaacgatgactattgcaaattcatacgcttgggacagttcttcgtggatcgcaacaacgaagggatactggcttatgtcaataaccatagttttatcgacaacccctctttcagagggatgcggtggaatctgctgcggagtttcgacaaaatctacatcatcgatctgcacggcaacagcaagaaaaaagaggttgcacccgacggcggcaaagacgaaaacgtattcgacatacaacagggcgtctcaatcaatatcttcgtaaaaacgggacgcaaggcaaagaatgcccttgccgaagtatatcatcacgacctatacggccgaagagagacgaaatacgattacttgtcgtcgcatacggtggcgaacatcccgttcgtgaaacttcagccgtccgcaccggaatatttcttcgtgccgaaaaattacggagcaaaggctgcgtacgacaggggcttctccgttacagagctgttccccgtcaattccgtgggcatcgtgacaacacgggacgaactgctgataaaagacagtccggaagaagtagaaacgctcatccgcgatttcataacaatggaagatgccgaactcagaacaaggtacaacataggcaaggactcacgggattggtctgttgcaagagcaaaagcggatatagggaatgtcgtcgatacggctaaaatcacacccatcaagtaccggccgttcgatcgcaaatatctgtattacaccggcaaaacgactggaatcgtggccaggccacgattccaggttatgcggcattttgccgccgaaaaaaattttggtttggcggcatgccgccaaaccaaaaaagaaaattggacacacatattcctcacaaaaaatataatccccgctattttcgtagaagtaaaagataattgcaatacctttcctctctacacctatcccgatcagaccgacctgctgaacaccggacgcaccccgaacctcgacccgaagatcgttgcaaaaatagccgaaagcatcggattggagttcgagccggagaaaagcggagaaccggataaattcgccccgatcgacctgctcgattatatctatgccgtgctgcactgtccggcgtatcgggaaaaatacagggagtttctgaaggccgactttccgcgtgtaccatatcctgaaaataccggacagttccaccgccttacacaaacaggtgccgaattgcgtcggctgcatctgatggaaaattccgactgctgggaattgtcggtcacctatccggaatgcggaacggacgaaatcacggaagtccgctatgaaaatgaaaaagtattcatcaatgatcggcaatatttcggcaatgtaagtcccgttgcctggaatctcttcataggcggctatcaacctgcccggaaatggctgaaagaccgcatagggaagaaactcacattctcggacattcgccactatcaaaaaatcatctttgcactctgccgcacagatgccctgatgcgtacggaactgaatatcgaaaaattctaaatccttatcaatatgaacaacttcactttccaaaatccggtcaagttgatcttcggcaaaggctccatcgccaagctggcgaaagagattccggccgacaagaagatcatggttactttcggcggcggctccgtcaagaaaaacggcgtgtacgaccaggtggtcgcagcgctcaaaggccgcgacttcgtagagttctggggcatcgagcctaatcccaaaatcgaaaccctgcgcaaagccattgcccagggcaaagccgaaaaggtcgattttctgctctcggtgggcggcggctcggtactcgacggtaccaagctcatcgctgcgggcattccctacgacggcgatgcctgggagctggtgctcgatgaagacaaaatcggcgaagtcgttccgttcggcgacgtgatgaccctgccggccaccggctccgaaatgaacgccggggcggtgatctccaacctcgccacgcaggagaagttcgcgttccaccactcgttcccgcaattctcgatcctcgatcccgaagccaccttctcgctgccgccgttccaggtagcctgcggtatcgcagacactttcgtacacgtcatggagcaatacctgaccgtcacgggcgtttcgccgctgatggaccgctgggcggaaggtattctgcaaacgctgatcgaaatcgcccccaaaatccgagcgaatcagcacgattacgaccagatggccaacttcatgctctgcgcgacgatgggactgaacggcttcatcgccatgggcgtgccgcaggactgggcgacccacatgatcggacacgaactgacggccctgcacggcgttacgcacggacagaccctcgtggtcgtactcccggccctgatgagcgtaatgcgagaacagaagaagggaaaaatcctgcaatacggcgagcgggtgttcggtatccgtgaaggctcggaggacgagcgcatcgaccggacgatccgcgccaccgaagagttcttccgctcgctgggactggctactcgcctgcacgaattgcagatcgggcaagatacgatcgacgagatcgtccgtcgcttcaacgagcgcggctcccggctgggcgaagcgggcaacatcacgggcgacgtgacccgccgtatcctcgaactctgcaaataagggtaggaaccgaaacaggcgaagcgggttttcaaacccgcttcgcctgtttacttcgtaatcatccccaatccatgccatctgcaccgaattatgctcacacctgattcacgaacagcacaaaagtatttccggaaaaatccggactgcaaacacccgaaaactgcgagcaacgacaactccgagccaaatgtcgaagagcaaggcctataaatcgagtacagatcccttctattttaccgaagaaattcccttgaacgtataataacgggccgccaggtagctgtaaagagctacggcgagcgatgtgatacacttggaaggagtcggccacagaccgcacacctcgaccaaaaatttcatacaggcgtaattgagcaaaatagatcctacgactgtcaatagatagcgccccaactgtttgcccgccgcaacaggcagcgtgcggaacgcgacatagcggttcagccagaagccggtgaagaacgtaatgggaaaaaccagtaccaaagaggcgatatgcggcgacataaccacgaatcccaggtcgaaataacggcctgcaaccagaaaatgatagatcagggcatagctgaccgcatccacggacagcgtgatcgcaccgcaggccccgtaacggaaaaccgtttcggatatcacacgagaaaaagggcgccgataaaaccagtcgatcgcacgccgcaggatcagtgcaaaagtcatcgttttttcgtatagggccacacttccttcagaccggcccccgcatttctcataaagtcacggcactccgcagcagaatcgctttcgaaaacggaaaccatccacttcttcccgaaaaagtaaatccggaagtttgtgtccgacaggcgggcccgggcttcggcgacggctcgccgggcattctcctcggtgctgtaaacgccccaaaccacatacgttctgccgggaatcatcctggcgacctcgggaaccggcgcttcgtagtcggcgtcaagatcggcgcggcccgcacccgtcgcgccctcggaaagggtttcgacgccagccgcctcatcatcctgcgacgtttcgacgggacggctctcagcaaccggctcggagtctatcgcaccggattcggcatcacctccggtggcttcgggagtttcgctcccggttcttgccgggacggatgaaacgacctcggcaacgggaaggacctcctgcttttcagaatcgcccacgaacggcagccgcatccactctccgtactgccagattccgtaaccgacagccgccgtacaaaacaaggcgatccccagataaaggggtagccgggaatatcggcgtttcagcggcagcggatcgtgtccgagaggattgagaacggcatcgagctgcgaatcgagccgaaagtagcggtgattgagctccccgactcccggaatggagattccgtcctccacccgggctttgtcgagccaccgggaatagatatcttcggccgcagcaacatcgcaagcccccgcccgagcaatcaggtctatcacggaaacgccccgctgctcggagaggagaaaggcaatgcgccgggaaggacgttccaactgccgagccgatgcacgccaggcactccgaaattcgggaacgagcgagccgactcccggaaaccaaatttcccgtccgtcggccagcgcattgaaaacaatcttatttacctcgtcctgcatcatttcatacgacgatgtttacgtggcttggaactgccgccctgctgccggacagtctgctgtcgaaccacccgcaccgtatcgggatctaccggagagcggtgcatgccccggtaaatcatataaatccccaccagaatgaacggaatactcaacaactgtcccatattcaacagcataccctgctcgaaagcctcctgatccaacttgatgaactcgataaaaaaacgagtcaggaaaatcccgatcagccccacgccgaacatcacgcccggacgacgccggcccaggtcacgtccgtaatagagccagcaaaggattccgaaaatcaccaggtagcataacgcttcgtaaagctgggtcgggtgttgcacggggatggagtcgatgggaacattcggataaagccgaacgaacttgaacccccaggaaacatcggtcaccgcccccacgatctccgaattgaacagattacccagacggacgatggcgccgccgatagcgaccggtagcataatccgatcgagcgaccagatataaggaagtttattcttgcgcgaaaaaagccaaagaccgatcagcaggccgacggcagcgccgtgactggccatgccgccgttgcggaaatccgtaatgatagcccagggatgggcaagaaaataccccggttcataaaaaaaacagtgtcccagacgggcaccgaggatcgtggccagcgtgccatagacgaaaatcgactccgaaaccttctggggcagcccttcgcgtttacagacctggtcgaagaaaagcatgccgccgagaatcgccagcacccacatcagtccgtaataacggatatcgaacgatccgatcgaaaaaaagacgggattgaaatcccagacaacggttattggaaggatcatacgttatgcaaaattagtgagaatgtcctgtttgagcctttttgagcgtaaacgagaaggtcgttcccactcccaactcgctgcggacgttgattcgctcgccgtgagcttcgataatatgcttgacgatcgccagtccgagccccgtaccgccctgctcgcgtgaacggcccttgtccgtacggtaaaaccgctcgaaaatacggggcacgtcctccttggcgataccgacgccgttgtcctcgacttcgacgaggatcttatccagcatatctcggaatttgatccgcgttacacccccctccttgccataacggatcgagttgataatcagattgaccaacacctgtccgacgaaatgcttgtcggcacagacccagaaaggcgaaggcaggctgtcggccccccttacctgaatcttaattcccttcttatcggcttcgatttcggcctgttcagcaatctcgcgcgtcatggcagcgatgtcgaaagactccattttcaggcgcgtcatattgctctcgagcttggaaatggtatccaaatcattgacgatgtcgatcaaacggtcgatgctcttctcggcccgttcgaggtatttacggttgatcaggtcgtcctccagaccaccgtcgagcaatgtcgaaatatacccctgaatattgaaaatcggggttttcaactcatgggccacattacccagatactgcttgcggaacgattccgtttccttgagccgcgcgatctccttgtcgttggtatccgcccaggcggtcagctcctcggaaatgttttcgacgtgcttgtccttgagctcatccagaatctcctgcgtatgcacgttacgcgaaagtacgatcgagtagatcggcttcagcttataagccacgtacttgcgaataataaacaacgtcagtaacgtcataccgacaaacacggcgcaagccacgcagagggtctgccaccacaccgcttcgagcagccacatggccgccgcgacgacgatcgcagccaccgccgcaaccagcagcgaagcgaactccttggttttgataggcatcatttcaggtaatttttcatgagccgggcaatgtacttgccgataatgtcgaactccagattgaccaacgtaccgggtttgatccggttgaagttggtgtgttcataggtgtagggaatgatcgccacctggaactgtccctcctgcgaattgcagaccgtcaggctgacaccgttgaccgtaatcgaccctttctccaccgtacaattatcccccgcaggttcgtatttgaacgtaaaataccagctgccttcggcatcatcgacggccgtacaaacggccgtctgatccacatggccctggacgatatggccgtcgagcagcgcatcgggccgcatcgaacgctccacattgacgatatcgccgacctgcaactggcccagattgctgcgcagcagcgtctctttcattgccgttacggagtaggtatcctccgtaatatccaccacggtcaggcatacgccgttgtgggcaatgctctgatcgatcttcaactccccgcaaaaatccgcacgaaaagtgaaggtcttattttgttgttcgatacggatatcggtgagcgtcaccgttctttccacgattcctgaaaacataattcgattttagattttaatttccaacttgcccacgacctgatatacctgctcgatatcggaagccttgacgaaaatatcgtcgaaattttcccggtccgcagcaaccaaccgccattcggaatcccgctccgaagtgcgaactattcgcaaagttatgattttttgacagacaatcacgtattcgagtccgggaataatctcctcgggcgtcatttttttcaggaacacgatcgatccggacggaatagaacaccccatagcctttccattatacagcatagccaggtcgcagccggtcagttggggaatcaccatctcccgatcgggggccaactcgtcaagacgggtgatatgggattcgacatccacctgataaaacggaatttgcaccccgcataatttctcgtccacaaacatctgcccctcgccggtaagcaaccacgccaggctgacttccgggaatttggtcacgatcttgtaggccaggttccgggaaataccattatttcccttttttatctgatagaggttttcaccccgcggcaatccaatatagagtgcaaagtagttgatagtcatattcgcccagcgaataacgctgtcgattctttgccaattatccattttttgtcgcataattcaattttttttatacctttgtgccaccggtcccgtagttcaatggatagaatttaagattccggttcttacgatatgggttcgaatcccgtcgggatcacttccaaggcgccttcttcaaggcgccttttttattgcatacccccattacgacatactaatataataattttggacaaatataatgataaattacggttatataataatctaattcatctaaaatcgttcccacctatattattagaaaagcattatcggcccacgaccggtaattctatctgctcgacacacccttgcaattatcggaattgatccatccttaaaaagaacaggatacggttgtccaaacgacgctcgcagcgaaaacaacgtacttttacgtaccatggctccgcagggaggggaaaaaggaactcaaacaaattcggccctgtcctctcctcgcatcatctttgcagaagacaggacgctcccggaaatttttgaaagcaaacattcataattacgtccgccttttcgtatctttgacttcttcttagatacttcgcctcggcaaaacgcaaataaatttgcttttgcacgcggcttattcgtatctttgcagaggataggaggcggttcggcaatctttgcgtgcaagcccgcacgattgcctatacacctttcattatagcagcggtaatggggaacaaattccacccgctgcattatctttgcccgaaacagaatggactatgagcaccgaaaaaaacatccggaacatcgaaagcgacctggagttcgaaaatcagatccgcccccgcgaactggacaacttcgccgggcaggagaagatcgtggataacctccggattttcatccaggcggctctgatgcgaggcgattcgctcgaccacgtgctgctgcacggtcctccgggactgggtaaaaccacgttggcgaacatcatcgccaatgaaatgcatgcacagttgaaagtcacttccggaccggtgctcgataaaccgggcgacctggcgggacttctgaccaacctcaaccccggcgacgtacttttcatcgacgaaatacaccgtttaagtcccctcgtcgaggagtacctttactccgcgatggaagactacaagatcgacatcgtactggacaaggggccttccgcacgttcgatacagatcgaactggctccctttactctgatcggcgcgacgacgcgcagcggcctgctgacctcgccgctgcgggcccggttcggcatccaatgccacttggaatactacgattcttcggttctgaaaggtatcgtaaaccgctcggcccgcattctcgacgtttcgatcgacagcgatgcggcgttggaaatagccctccgttcacgcggaacgccgcgcatcgccaatgccctgctgcgccgtgtgcgtgacttcgccatggtcaaaggcgaaggtcatatcgacctcgacatcacgcggttcgccctgacagccctgaatatcgactcccggggactcgaccagatggataacaaaatactctcgacgattattgaaaaattcggcggcggccccgtcggactgaacaccatcgctacggcagtcagcgaagatgccgggactatcgaagaggtttacgaaccgttcctgatcaaagaagggttcctcaaacgaacgccacgcggccgggaagcgaccgaaatggcctatgcacatctcggattctcccggacggaccatggcgaacagtccctgttctgacgccaaagacactataatcgaatatgttaaatgaggtcataaacaacgagtgaagatgagaaatttagtaatatgcttttgcacactgataatagcgatatgtacgtgtgcttgtgaaagcaataacgatgtgatcgaacaccaaactggtgtttgggttagcgacaaggcagagttgttgctgaccgataagattatgatgtattttgaaaagcagtcggatgatgccgttttggtgatgcttaaagtagatagcattacagaagattgcacgcttttcagtaaagatacaatcatcagacaatctattcccgaagactttgcaatgaagcacatttcttccaacgaaataatagtcaatggacagaaaatggtcaaagctgaaactatcgaaatgtgcgaaccctacgacatgacagcagccaatgattcaaatgcacttgccgacagattaacagagtggcgattgggtgcttgggttaaagttgataaaacaacaaatgacatcgatgcagcagtgaacaccccgaggaatatgttcgtatataatattgaaaacggcatgtattatttgcgtgctgcgagaattgagaatgtgaacgaaggtactttattctatcagaatatccgtttgatgaagaatccaaatacgaaagaacggacggtttatttttctccgaacaaccaaaatgaagtattgggagcacttgaaattaacttggatggattcaagccaggaacctgttatttcgacccgaacgggggcatatattggtcttatatgtcacatactccggaccaaattattttgaacggatgtggaggagatacttattacatcaatagaaaactggccggggataaaaatatgttcgaatggataaaatatacaaataagtaacctaacaaacacacaatacgcagacaaaatagatgaacgtacaaatcaatatcgacaccgccagctgcatccgatgcggaaaatgcgtcaaggtttgccctgcctggatcatgactcaggccaaacccggcgacccgatcggtctgcgcaatatcgactcctgcatcgtctgcggacattgcgcggccgtttgcccgaccggctcggtccgccacagttcatttcctcccgataaaatccatccgatcgaccgcaacgggctgccctcgcccgaacaggtgctgctcctctgcaaggcacgtcgttcgaaccgagcgctctccgaccgtcccgtcccgcaggaagcgatcgaccgaatcctcgaagccgcccaccgggctccgacggccagcaaccgccaggaagtgagcttcaccgtcatcaccgatcccgcaattctggacaagatcatccgcttcacgctggatactttcgcgggaatcgcccgcaaattggaaaacccgttcgtcaagccgttgctcaaacgcctgcgtccggagctatatgcctacctgccgggattccggcgtctgatcgccgaatacggcaaaggcaacgacctcatcctgcgcgaagccaaaaccctgattctcattcacactccatacgcaaaccgtttcggagccgcagatgccaacctggcctatcagaacggttcgctgatggccgaaagcctcggtgtcagccagatctacacgggcttcgtcctttcggcgctggcacaggacaaaaaatgcaaatttttgaaatccatcggcatacaaggaaaggtacatgcaggaatggcgctcggaatgccgctgttcctctatcccaattacatagacaaaaaaccgatcgcaataaacaggatctgatcccgaaggatctttcccgatttttctcaacgaaataccggctcgggcgcgatccttgcggaaaaataagttcatcaaacccataaaacaatgcaaaacaaaaatatgagagaagaggcccttcgttaccatgcagaagggcaacccggcaaaatagcggtagtacccaccaagcccctcacttcgcaacacgacttttcgctggcctactcgcccggcgtggcggagccctgcctcgaaatcgtgaaaaatccgctcgacgcctataaatatacgggcaaaggcaacctggtcgccgtcgtcaccaacggcacggcagtcttgggcctgggcaacatcggagccttggccggcaagccggttatggagggtaaaagcatgcttttcaaggtattcgcagacatcgacgccttcgatatcgaagtaaatgcgaccgacacggaccgtttcgtggaaaccgtcaaggccatcgctccgaccttcggcggcatcaacctcgaggacatcaaggctcccgaatgtttcgaaatcgaagcccggcttcgtgaagcgctcgacattcccgtcatgcacgacgaccagcacggcacggccatcatctcgggtgcggccctgctgaacggcctcgaaatcgcgggcaagtccatcgccaacgcccgtgtggtcatcaacggcgcaggcgctgcggcggtttctatcgcccgccttttcctgaagctcggcctgaattgcgaaaatctcgttctctgcgacagcaaaggcgtggtttcgacccgccgcgaagacctgaaccctgtcaaggaacaactcgctacggaccgggaagacgtcgatacgctggccgacgccctccaaggggccgacgtcttcctcggcgtctcggccccggggatcctgacacccgaaatggtccgcacgatggcccacgatccgctggtgctggccttggccaaccccacgccggagatcacctacgaagaggcgatggcatcccgtccggacatcatcttcgcaacgggccgttcggactatcccaatcaggtaaacaacgtgctcgctttcccataccttttccggggtgcgctcgatgtatatgccagtacgatcaacgacgaaatgaagctggccgtcacctacgccctggcacgcctggccaaggaaccggttccgcaggaggtcctgaaaacatacggtctgaagtcgctctcgttcggacgcgaatacctgattccgaaaccgagcgacccgcgtctgctcgcggtcgtcgccacggccgtggcgcgtgcagccatcgaatcgggcgtagcacggcgcgagatcgaggattgggacgcctacgccgcgtcgctcacccgacgtgtaaaaaacacaaagtaaacccgaatccctgcccatcaggaccggcatcaaaaaagcgccccgagatttattcggggcgcttttttgtttgaaatggcatttaatcccgactttgacaaaccggctccagccggaagaggggggcaagaccgctatcggaaaagaacccgggtaaacctatcgacggctggattactttacccgacaaaataaaggaccgacctccacaaaactgtatcgggcgataatcatatttacccttttatcgaccaacacattgacaaaacaatccgataaatccgtttatttcgacgaatgaacgatacgaaaaaggaagtcatgaggaggtatacggagcgataatttatcgagaaacgataaggatgcaaaaaaattatatccaaaccgtcattttatttcgtaaatatttggatatatatatatgagcaataaccgacgtcgtttatgtcaaactttcttaaattacacccaaaaccatgaaaagattagctctgttattgctcgcatttacaggcctgatgtctgcctgttcaaaagacgatcccgttccgcaggatggatcgcttacccccgacagcccggaagggcgcgaagccgtaacgatccccgacgaatttctccgcacttacctactcaagtatttcgatttcgaccgcaacggagaactctcccgctacgaagcatcgttagtggtacgaatcgactgccccggaaatataaatgcaggagaaggggcctatatgtgcgatgcgaccggcatagaagcctgcacgaaccttcgctacctgaatctgtcgggaaacgacctgaccaaactcgatgtaagcaacaacaaactgctcgatacgctcgattgttcaatcaatactcatctgaaaaatttacgtgtcgcaaaacaagaatctcttgcaactgcattgttatgcctgttctcttgaaattgagagatgggacttatctgcgaatccggaattgaaagatttgagaatcggaggagacggatacgttgctttcgataaagtatccattctcgattgcagcaacaaccataagctggaagtcctaatggcaaatttaagtcaaatgtctgaactctatctcgattgtccggaattgcaacatctttccttagaaggcaacagcctttctgcgctcgatcttagtaattgtacaaaacttgtaatgctcaatttcagtgggaacaacatctctcatatgaatttacagtgtccggacttggaccttttgaaatgccaaagcaataatctcaccaccctcgacgtaagtgcatgcccaaaactaacagtactttattgtgacgagaaccaactgcaagaattggatttgacgaacaacaagaaaatcgaatatttacgcgtaccggataataaattacaaaatctggatgcaagcaatctttccaaattgaaagaattttactgcaacaacaacgaattgacggacttgatgctaaacagtctagaattaacctgggtcgaatgtcaaaacaacgatctccaaagtttggatttgtcgaatcttcccgccctgtatcttctcagatgttatgagaaccagttcgaaacgatagacgtaagtaacaatccggaacttcggggctttttctgcaacccgatggaatcgctcaaaaccatttatatgagtgaaggacaggaccagcttttgcaagctttcgaaaagcccgaagcggcggaagtcgtgtataaataaatcgcaacgtcagacacagcgaacccgaacgcatctgcgttcgggttcgctgtgtctgacacgctcccgaccggctgtcgctcggaccgaaaggcgggaaaccgcatttcgagttccggaacgaacgtacgaaacagacctgccacgcctcccgcatcgaaacaggatggaatcgatatgcccgcccctgcaaacagaagcgaccgggagacataatccgcagcatgacaccccgatacatccactccttttgcagaaaatcgagaggaattctataaaaaacgaacacggccatcacactctgttctcattttcattacctttgtaacctaaaattccctttatgcaaaaacttcgcaatatagccattatcgcccacgtcgatcacggcaaaaccacactggtcgataagatgatcatgcagagccacgtgctgcgcgacaatgccaaaaattccggagaactcatcctcgacaacaacgatctggaacgcgaacgcggcatcacgatcctctcgaagaatgtatccgtcatctacaaagactgtaaaatcaacattatagacaccccgggccacgccgacttcggcggcgaggtggagcgtgtgctcaacatgtgcgacggcgtactgctgctcgtcgatgctttcgaaggaacgatgccccagacccgtttcgtcctccagaaagccctctcgctcggcaagaaacccatcgtggtaatcaataaggtcgataagcccaactgccgtcccgaagtggtcaacgaacaggttttcgacctgatgttttcgctcggagcaacggaggagcagcttgactacaaaaccatctacggctcggccaaacagggctggatgtcccatgtctggaatcagccgacggactcgatctctccgctgctggacaccatcctcgacgaaattccggaacccgccgtcgtggagggcacgccccaaatgcttatcacctcgctcgaatactcctcctacatcggccgtatcgccgtgggtaaagtgacgcgcggagagctgaagaccggacagaacgtcaccctggccaaacgcgacggagtgacgatgcaaaagagccgcatcaaggagttgatggttttcgaaggtttaggcaagaaaaaggtcgatgcagtgccctgcggtgaaatctgcgccctgatcggcatcgacggattcgaaatcggcgatacgatctgcgactacgagaatccggaaccgctgcccccgatcgccatcgacgaacctacgatgtcgatgcttttcacgatcaacaattcgccgttcttcggcaaggacggcaaatacgtcacctcccgccatatcaaggagcgcctcgaccgcgagttggagaaaaacctcgccctgcgcgtcgaaccgggagccaacgccgacagcttcatcgtcttcgggcggggcgtgctgcacctctcggtgctgatcgaaaccatgcgccgcgaaggttacgaactccaggtaggacagcccaaggtcatcgtcaaggagatcgacggcaagaagtgcgaaccgatcgaagagatgaccgtcgattgtccccaggagtactcggggacagtgatcgaactggccaccaaacgcaaggggaccctgaccaacatggaaaccaacggcgaccgtacgcggctcgaattctcgattccctcgcgcggcatcatcggcctgagatccaatatgctcacagcaacggccggagaagcgatcatgacacatcgcctgaaaggattcgaaccttggacgggcgaaatcgaaatgcgggtcaacggctcgatcatctcgggcgaaacgggtacggcctacgcctactcgatcgacaaactgcaggaccgcggacgcttcttcatctctccgatggaacaggtgtacgaaggccaggtgatcggcgaacacacccgccagaacgacatcacggtaaacgtcaccaaggccaagcagctcacgaacatgcgcgcttcgggatcggacgaaaaaacctcgatcgccccgcccaaggtattctcgctcgaagaggccctcgaatacatcaaggaggacgaatacgtggaagtcactccgcacgccatgcgcctgcgcaagatcctgctgaacgaaacagaccgcaaacgcgcatcgaaatagtccatggatcacttcacgctggctcttatgacgggtgccgtggcaggcgctctggacatcatcccgatgatcgcccaaaaactctcgttccgctcctgcctgtcggccttcctccaatatttttttgccggaccgatcgtcttttacagcaacctgccttacctgccctggtgggcggacggtatggccgtgactctcatgatggctctgccggtcgtactgatcctcacgggcaaagaccgtaaggcggctccggtcatcctgctcaatgccctgctgctgggattcctcatcagcgtcgcagaacgatatctggcataaaatgaagaatttcaagggtatcgtctatgcggcattgtcgtcctcgaccttcggactagctccgttgttctcgattctcctgctctcggacgggttctcgtcgttcgaagtgctctcctaccgttggggagtagcttccctgacgttgggaatcatcggactcgccggcggctgccggttccgcatctcccggcaggagctatgcacggtattcttcttgagcctgtttcgggccgcgacatcattgagtctggtgatcgcctatcaaaatatctcgagcggggtcgcttcgatcatccatttcatgtacccgctggccgtcgccctggccatggcactctttttccgcgaacgtatctcgtggcgaacggcagcggccatcggcgtttcgctggccggtgtcgccctcctctctaccggaggaatcggcagccggggcggagataccacggcggggaccattgctgccgccgtttcggtattcgcctatgccggctatatcatcggcgtacgcaagagccgcgcggcgcaggtcgaatcgaccaccctgaccttttacgtcatggccttcggagctctgctgtttctctgcggaggtatgttcacgggcggtgtccggctcgtgaccgacggaaaagagaggctcgccattctcggactggcgctcccggccacggcgatctccaacatcacgctggtcagggcgatcaaattcatcgggccgacgctcacgtcgattttcggggcactggaacctctgacggcagtagccatcggtgcaacggtcttcggagagcggttcggctggacaagcgccctgggcgtgggactggtcgttgcggccgtcagcatcgtcgtactcgacacgcaacgcaaaacgtggaagactactccttcttcctcaacgtagcgaacgaaaggatgtgccaactggttccgactgcgagcagaaacagcccgagctgcgcccaccaccatgcatcgacgacccgaaagatgcaataccccatcgtcagccaaatcaacgacacggaaacgatcttcgcctgcaaaggtattgctcggttttcacgaaagttacggatataaggtcccagatgcttctggttcagaagccacgcatagaggcgtggcgaagaacgaacgtaaagggctgcggcgagaagcaggaaaggcgtcgtcggcagcaacggcacgaagacaccgacgatacccagtcccagaaagaagcttccgagtatggctcccaaagttttcacgcagtaaaattagcggtttttgcgaaaacacgtccgcccgacaagtttttttcatattcgggtggaccttaaacgcttcgttccggtcatttgcaaaaaattcgcttttacattcagtttttcgtatctttgacttcgcgttagatacttcgcttcggcaaaatgcaaaaaaatttgcttttgctcgcggcttattcgtatctttgcggacgttaaagagaacaacgagtagtgtctgaacacgtaaatccagttgcgatttatctgttcagacactttttttttgccataactcaaccgaaaaaaatatgaaaggaacaacgacacaggatcgattgtggacaggttctttcttaagaatctgcctggtgaatctctttattttcgtaaattttcatgcgctgctgcctactttccccttcttcgtcacctacttgggcggcgatgcggtaactatcggactggcaacggcactgttcagcatcgcttccatcgtatcgcgaccgttcgtgggatggctcatcgacacgcggggacgatacgcgatattggtactgggacttatcggcatgacactcatcccgatgggttatttcgtatcggcaggcatcgcgacggccgttatactgcgcacggcgcacggcgtgttccatgcagcttcgagcaatgcctcttccacttgggtgacggacatcatcccgcacaaacgcatgggcgaaggattgggaatgtacggactttcgatggccatatccaccgccgtagctcctgcattagggctggcggtaatgaacgcctggggattccgaccgttgttcgccatcgctgcgctgacggctttggcggccctgctgacaggcatggggattcggtcccgcaactacgcggtatccgacgccccgctgcgcattcgggagctgttcgagccgatgtccctgcccgccgccgtcacgcagttctttttcatgatggcgtatggcgtagtggaggtatatgtggcgatttacgccgcctcctgccgcttgcccggaggcggaatctactttatcttcatcgcactggctaccgtagccacgcgtattctgctggggcgtgccgtcgatcggtacggcgaagcgaggctggtttacaccggcaatgcagccatcgtgatcggtattctgctgctggtgttcgcgcacaacgtaccgtgctacctgttgtcggctcttctgctgggttacagtttcggcgccatccagccctccttacagacgatggcgatgcacgccgtagcacccgaacggcgcggggcggcaagctccacgtttttcgtggctttcgacttcggtattgcgtcgggcggcttcctggcaggcatactggtgaagcaactgggttatgacgccatgttcctctgcatgatcgtaccgtgtctgctgtcgtcaggctactactacgccttcggacgccgtcacgcctcgtcgttcaatccgcagaaccgcagaacgggcctgaactccgatgacgaccgtcccggcctgtcggcccgtaaatctttgccgttcgtcatcactatttcgcgtgaatacggcagcggaggacatcgcatcggagaacggttggcgcaacggctgggcgtgaaattctacgacagagaactcatctcgctgaccgcgcagcaaagcggattaggcgaaagtaccgtacaagagagcgaacaaaccgtgagcggacgactgatgtacgacgacccggtacagaccgccgtatttcgcgcacagagccaggtgatacgcaacatcgcctgccaagaaccgtgcgttatcgtcggtcggctcgccaacttcgtactgaaagaccgccccgcctgtttacatcttttcatctacgccgacgaagcgacccgccggaaacgcatagcgtccgaatacggcgtggctgacaaccggactcaaagtctgctcaaacgtatcgaccaggagcggcgggaacactgcctgcactataccggctgcgaatggggcgaacgtcactactatcacatgatgctcgacagttcgatctccggcgatgaacagatcgtagaaacgatttgcaacgtcattcgcaccatatcgggccgcaaacacccgaatgaacggaaaaagtaacgacaggtctctcaacatgccttgcaccgaacgggctccgtcgaaaaaggagtccgtcggccgtactttaccgtcgccgttttatcccgatacgaaagtctgcgaaagacagccgatttcgaattattttccgtaactttgtaaaatatggagaaaatcattcggaatggcacacaagtccgaacggtttttcagaaaacgcccggaacacgggcagcgatcgcggcagaaatattgccgtacacgaggtatcaactaaaaacaaatacgttatggaaaagaaaatcggtatcgccagcgaccacgcgggctatgaaatgaaagaatttctggtaggctatctggctgcgaagggttgggatgtcctcgacttcggccccgaatccgaggagagcgtcgattaccccgatttcgcacacccgctggccaatgccatcgaaagcggggagctggagcgcgggatcggactctgcggttcgggcgaaggcatggccattaccctcaacaagcaccagggcatccgtgcgggactcgtatgggacaagcagatcgcccacctgatccgccagcacaacaacgcgaacgtgatcgtgctgcccgcccgtttcatcaccaacgaccaggcagtggaattcgtcgaagagttcctcgccaccgatttcgaaggcggccgtcaccagcgacgcatcgagaagattcccgtcaaggcgtgcaaccgtcaataaaccggcagcggaacggcaacgttttatttattgtaagggaaagacaaaaggcgtgaggcttcggctccgcgccttttcttcatcatcgaaaagcccgaaaacggccgatccggaacccgacatggcggcataaacggctccggcatccagaagcgcggctttggctgcggcaatctccggatgggcggcaaaaatatggggttcgaaatcgtttttcaggaatgtctgccattcggtcacaggtcgggcgatccgctccgcaagcgggacggcaggaacgccaggccgaatcccggcataagcctcgcgcgtggaaacaccgcaatcaggctttaccacagcgatccacagcccccgcagatcgagtttcacgggagtcatcacctcgccgcgtcccgtacaaagttggggcgtattgcgcacgaaaaaggccgtatcgcttcccagtgctgcggcacagtcgatcaactcccgctccggaagcttcaacctgaataattcatcgagcgccaagattacggcggtcgcgtcggacgatccgccccccagcccggcaccgaaaggtatccgcttgtcgagcgcaaccgaaacatcgcccgcaccgtaacatgcctgcatcagccgtacggccttcatacagagattatcggcatccgaacaatcgactgtaaggccgctcgaccggaaggaagtttgcgctgcatgttccacttcgacgacatcgtacagtccatacacaggaatcattacggtcgccaattcatgatacccgtcctcacgacggcacagcacgtccagcccgatgttgatcttacaatttgccttgcgaatcatatgacaaagatagtgaaagccgggagaaaacgggaacttgttcgcagttttctctcggcgcatcccatctaaaactatgtcaaagacagggaaaggcgagagcgatcgaaaatttattttctgtttcccgccccctcctctgttttccgctcgaaaaaactccctgtcgggaatttccgttttacgccgtttccgtctatctttacggcatgaaattctgcactgaaatacgaatcgcgccgctctccgtccggatcggctatgaaaaccgtctgctggcgttgggatcctgcttcgccgaacacatctcgggccggctgtccggagcccggtttcggatcacgagcaatccctccggcatcctgttcaaccccctttcgctcgctgcaaccctcgaatcctacgccgcgccgcaagaggtcgtccccgaagaactcggctgccgcaacgggctctggttccactacggttttcacggagctttttcggacggttcgcagaaaatggctctctcgaaaatgaatctggcccgcagggcaggagccagcgccctgcgcgaagccgaccgcgtgattcttaccttcgggacggcgtgggtgtacgagctccgctcgaccggagagatcgtggccaactgccacaagcaacctgcagaactctttcggcgccggcgtctgaccgtcgaagagatcgtcgcccgttacgacgatctgcaggcaggcccgctcgccggaaagcaagtgatcctcacggtcagtcccgtccggcacctcggggacggtctgcccgacaactttttgagcaaagcgacccttcgcctggccatcgacgaaatctgccgccgacatgcagactcggcctacttccccgcctacgaaatcctcacggacgacctgcgcgactaccgtttttatgccgacgatctggtacacccctcgcaacaggcacagcaatacatctgggaactcttcaccgcagcgaccctcaccgaggaggcccgcagaaaactcccgcaagtcgaagccttgacgaccgccgccggccaccggccgctacaccccgaaagcgacgaataccgtcgattctgccgcaaacaactggaaatcatcgaatcgcttccagaaatagacctcagccgggaaaaagaatttttcaaccagtttctataaaaacgatatgaagtacaaaatcgacacgacgacctggaaaagacgcgaacattatgaatttttcaacggaatggacgatcccttctggggaacggtcgttccggtcgattttacggagtgctacctcgaagccaagaagaggcgtacttcgttcttcctctgttccctgcaccgtattctaacggccgtaaaccggatcgaggcattccgataccggatcgaaaacggggaagtggtctgttacgaccgaatccacgcgagcccgactatcggacgcgaggacggcagcttcggctacgggttcttcgagtacttttccgacctgcacgaattcatccgggcggccgagcgggaaacggaacgcgtaaaggcagcggacggtctttgtctgggagcgggagccgggcgcacggatctgatctatttttcggctgttccctggttcgcctttacggaaatgaaacatgcccggtcggccaatcgaggcgactccataccccgcatctccaccgggaaactgacccggtccggcgatcggcttacgatgcccgtatcgctcgacgtacaccacggattcatcgacggacggcaggccggcgaatttttcgcactgctggaaaaccgagaatgaaatccggctccggcattcgatttctttttttgaaggacggcacaaaacaaatgaagaaaatactaaataaattcataaatttgccgttcgatagtcacacgcgaaaaaatgaagaaaatcctgctcgtcctgctcctgctgccgggtgttctgccgatcctcgcaaacactccgccccgtctggtcatcaatttagtcgtaagctccatgcgtccggacgacatcgaccgttaccggagccagttcggcacgggcggatttctgcgtctgacagagggcggcgcccgcttcacggaaggttcctacgactatcagcaaacttcgacccccgtatcgctggccacgctcaccacgggagcgatgccctcgacgcatggcgtgatttcgacccgttggcgggactacatcgtcaataaaacggtcgggctcatcgacgaccccagcgtccgcgatcccgaatactaccacggcaacggcgcctactcgccccgcaacctgatcgccccgaccgtcggggaggccctgctccggcaatctcccgacagtcggtcggtaaccgtagctctcgacccgatttcggccgtggtgatgggcggacgcgaaggcatgaccttctggatggacagcgtttcctgcaactggaccacctccacctactacctgcccgttttaccggcctgggtcaaaagattcaatgcggacaaactctacctttcttacatcggcgaaccgtggcactccctgctgaacgacgacaaataccgcaacaaacgctgttcggacatcgtcttgatgagttccatggccaagaaaaagcgttcggccgacacctcggccgacgccgtcaaacggatctcgtcgaaagccccttccgaaagccgctacgacaacatcctgtattcgccggcaggcaactgcctgacgcttcaattcgccaaaacggccctgacacaactcgacctcggcaaacgggaccggaccgacctgctgaacatctgcctcgacgccccgcgtgcgatccgcgaggcctacggccccgaatcgatcgaagccgaagacatgtactaccggctcgatcaagatctggaagagttcctgacatacgtttatacgctgttcaagcctcatgaagtactcgtcatactcacgtcggatcacggcagcagcccctcctacgatttcggccgcgaagcgtgcgacaggttcaatacgcgccagttcgaagtgatcgtaaacggatttctcagcgcccgctacggaccgggcaactgggtgttggagtacgaagacaaatgcctgtacctgaatcacaacctcgtgtatgagaaagacctcagcctggcagatattcagaacgaagtggccacgttcgccatgcagttccggggcgtttcgcacgctctctcggctacggccatgcggaccagctacttcggcagcggctatgcccgcaagatgcagaacagcttctatccccgccgctcgggcgacgtcatcatcaacctgatgccgggatggatcgaagagcacgaccacaaacgctcctcgtcgggttcgatgtacggctacgacacccgcgttcccctgatcttctacggcgcaggcatccttccccggcagatagaccgccccgtcgatatgacggcggtcgccccgacgctctgccgtctgctcggtatcgaggctccggcggcttcggagggaacggtactcgaagaagttatttcaagcaatatttaaccatggcaaacgacaaacgacaagacgagatcatcgaagaattttcggtattcgatgaatggctcgacaaatacgaatacctgatcggattgagcgacacgctcccggccatcgcacccgagcaccgcacggatcagtacctgatccagggctgccagtcgcgggtttggatcgacgcccgttacgaagacggcaaagtctggttcacggccgacagcgacgcgatcatcaccaaaggaatcatcgcactgcttatccgggtgctgggcggtcggacgccgcaggagatactcgacacggacctctatttcatcgacgccatcggcctgagcgccaacctctcccctacgcggagcaacggtttgctggccatgatcaagcagatgcggctctatgcgctcgctttttcaaaaaaataactcttacgcaacatgacaccagaagagattttacaggtagaaaaagatatcgtcgccacgctcaagaatatctacgaccccgaaatcccggtcaatatctacgacttggggctgatctacgaaatagactacgaaccggacggtgtggcgaatatccgcatgaccctcaccgcccccaactgtccgatggcggacatgctggtcgaagacgtcaatcaacaggtcgccaaagtcaagggcgtgaagagcgtcaatgtcatcctcacgttcgatcccgtatgggacaagagcatgatgtccgaagaggcgctgctcgaactcaacatgttgtaaccggtggaaccccgcgcggaccaaacggcagagatcctggaacggctccgaaccggagccgccggccatgcctgcgccggattcctcacgacgctcgatccgctgcacctcgcagacctgctgaccgggctggtgtacgaccggctccggcgcaaatacgatgcagccgcagaaatctaccgtatttcggggcagaactggaaccagaccttctacacgctgctgttccgctacatcggcgacctctccaatcaggacacctatacggagctcgcccggcgtgctacttatacgatggtgcttcgggaaagacattcgctgcctcggatcgaagccctgctgttcggcacctcgggactgctcgacacctttcggccggacgattacatccgtcgcctgcgcgatgacttcgcctacttccgtgcacgatacgacatcgaaccgatagacccttcggcatggaaaacggccaatatccgaccgggcaaccttccgcggctgcgcatcgcgcaactggcctcgtttctctcgcagcatgatttcgttttcgagcaactgctggcctgccgtacccgccaggaggtgaaccgcctgttccgtaccgaagcgtcgccctactggtccggagccagacataccccggaaggaccggaggagaaccccaagcgggtcggacagcacaaaacggatgtcttcggtatcaacgtggtcagcatcctgcaatacgtttacggctcctacatccagaacgaagaactccgcgaccgggctatcgccctgctggaatgtattcccgccgaagagaacaaatacacgaggccgtggatcgcagccggagtcaatccccgcaacgcattcgacacgcaggggttgatccagctgtcgagggaatattgcgccgcacaacgttgcgaatgttgtcccgtcgcgcggcggatcatcgataaaatcacccgatcgcaataatcgggaggatacgcttcccaccggcagccatttgttccgcttttgccggcagtcctgatttttcaaaggaaatcatttgggaaaaagcccggcctgcggataacgacggtcggatttcaaaatccgaaaagctgacggcggggataaaaaaacaactgtcaaaaaaatccgattcgcaacggtcccgggaccggcgaattaccgtaaaaatcatgcagacgatcaactggaaaggacacggcgccatgttcggcgccaacgctatttgggggctgatgtcccccgtcgccaaattcgtaatgctcggcggtatcgttacaccgctggctgtcaccgacctgcggatcgtgggcgccatgatcctgttctggatcctttcattcttccgaaagtccgaacacgtaccgccgaaagacctggccaaactcttcggtgcatcgctgctgggcgtggtcctcaaccagggcagcttcatcctgggcgtgggcatgacttcgcccgtaaacgcctcgatcatcaccacgagcatgccgttgtgggcgatgattctcgccgcaattttcctcaaggaaccgatcaccgcgaaaaaggtactcggcatcgccgccggagcctcgggagccttgctgttggtcctcggcagcggaaatacggacagtgccggagggcactccgtcgcgggcgacctgctggtcctgttcgcgcagttgagttacgcactctacttcgtgttgtacaagaatttcgtcacccgttactcgctcacgaccatcatgaaatggatgttcaccttcgccacgctctgcatcctgcccttcaccggccgcgacctgctttcgaccgattggcaggccctttccgcagcagcgatcggctccctggcattcatcgtcgtcggcagcacgtttctgagttacatgctgatcatcgtcggacaaaaaaacctgcgtccgaccgtcgccggcatgtacaactacatccagccgctggtcgctacattagtggccgtatgttggggtatggaaacattcgatccgaccaaaatctgctccgtattgctgattttcagcggtgtctatctggtgacaacaagccgcagccgggccgatgcggagaagtcccgcttacagccggaaagcccccggaaacgacagtagaatcccgcacgccgcatacgcagcgccccggaaacggcgaagatccccggaaatatcgggccttccgtccggaatatgccgaggaagccctcccggacaccgatagcgaatgaaaaatcccccttattcgaggcaaattcgtattgtattttccgaaataatgaatatctttgacagatttaatttccacacgaaataacaacatcgaaaatatggacatagccgccagtttaatcaagctttttttcggatccaaagccgacaaagatcgcaaagaagtagaaccttatctcgtaaaaatcaaagccgtttatccgacgatcgaggcgctttcgaacgacgaactgcgtgcccgcagcagtaacctgaaaaaacagatcgccgacttcatcgctgcggacgaagcccgtatcgtcgagttgaaagcccgtctcgagctgcctgacacgtcgctttccgacaaggagaaaatctccaaggagatcgacgaaacggtaaaacgcatcgacgagaagatcgaacagaaactcgacgaactcctgcccgaagctttcgccatcatgaaggatacggcccgccgcttcgcccagaacgaaacggtcgaagtcacggccaacgatttcgaccgggagctggccgccaccaaggacttcgtcaaaatcgagggcgacaaggcgatctatgcgacgcactggctcgccggcggcaacgacgtccgctgggatatgatccattacgatgtgcagctcttcggcggcgtggtgctccacaaaggcaagatcgccgagatggcgacgggcgaaggcaaaaccctggtggctaccctccccgtgttcctgaacgcactcgccggcaaaggcgtccacatggtgaccgtgaacgactatctggcacgccgcgactccgaatggatggggccgatgtaccagttccacggtctgacggtcgattgcatcgaccgccatcagcccaactcggacgcccgacgcaaggcttacatggccgacatcaccttcggcaccaacaacgaatacggcttcgactacctgcgcgacaacatggcttcgtcgcccaaggacctggtgcagcgcaagcaccactacgccatcgtcgatgaggtcgattccgtgctaatcgacgacgcccgcaccccgctgatcatttcgggtcccgtccccaaaggcgacgaccagctcttcgaacagtatcgcccggccatcgagcacctctacaacctccagaaaaacctggtgaccaacctgctcgcggaatcccgccagctgctcggcgaaggcaagaacgaagagggcggcatcaagctctaccgcagccacaaaggtcttcccaagtacaaaccgctgatcaagttcctctccgaacagggtatcaaggcccagatgcaaaagaccgaaaatatctacatgcaggacaacaaccgccgcatgccggagattaccgacgacctctacttcgtcatcgacgagaagatgaactcggtggaactcaccgacaaaggccacgaagccctgtcgaaatatttcaacgaggagggcttcttcgtcctgcccgacatcggggcccgcatcgccgagatcgagaaggaggagattactccggaggaaaaggcccagaagcgcgatgccgtaatcaacgactacgccgtcaaagccgagcgcgtgcatacggtcatccagttgctgaaagcatacgcgatgttcgagaaagatgtcgaatacgtggtgatggacaacaaggtgaagatcgtcgatgagcagacgggccgtattctggacggccggcgctattcggacgggctgcatcaggccatcgaagccaaggagcgcgtcaaggtcgaagccgcgacgcagaccttcgctaccatcacgctgcagaactacttccgcatgtaccacaagctggccggtatgaccggtacggccgaaaccgaggcatcggagttctggagtatctacaagttggatgtcgtggtcatcccgaccaaccgcaaggtcatccgcgacgaccgtcaggacctggtttacaagaccaagcgcgagaaatacaacgccgtgatcgaggagatcgtcaaactcgtcgaacagggccgtccggtgctcgtgggtaccacctcggtcgaaatatcggaacttttgagccgcatgctcaagctgcgcggcatcaaacataacgtactgaacgccaaacagcaccagttggaagcgcagatcgtcgccgaagccggacgttcgggccaggtgaccatcgccaccaacatggccggccgcggtaccgacatcaagctgacacccgaagtgaaacaggcgggcggtcttgccatcatcggcaccgagcggcacgaaagccgccgtgtggaccgtcagttgcgcggacgtgccgggcgtcagggcgaccccggatcgtcgcaattcttcgtatcgctcgaagacgacctgatgcgtctgttcggctcgggccgtatcgcctcgatgatggaccgcatgggcctcaaggagggcgaagtgatccaggcaggcctgatgaccaaagccatcgaacgcgcacagaagaaggtcgaggagaacaacttcggcatccgcaaacgcctgctggaatacgacgacgtgatgaactcgcaacgcgaggtgatctacacgcgccgccgccatgccctctacggcgaacggatcgagatcgacctgaacaacatcatgtacgacttcgccacgacgttcgtggagaatcacgaaggcgtcgaattcgacgatttccgtatcgaaatgatccgcgaagcggccatccagccttcgttcgacgaggcggcgtacgaaaaagccaagccccgcgagctgatcgaactgatcgttgccgacctgcagggcgcctatactcgccggatgaaggcgatcgccgatatggtacgccccgttatggagcgtgtttatgaagaccgcaaaggccagctggacaccaatatctacttccccatcacggacggacacctgggctacaacgtcccggtgaacctgcagcgctgcaaggattcggacggggaggagatcttcaaggtattctccaaggtggtgatgttcaccacgatcgacgacgcatggcgcgagcacctgcgcgaaatggacgacctgcgccagagcgtgcagaacgccacctatgaacagaaagacccgctgctgatctacaaactcgagtcgttccagctcttctcgaaaatgctcaacaaagtcaatgccgacgtattgagcaccctcaacaaggcctacatcccggtacgggagaatacggccgagaacgtacagcgcgaacgccaggagcgagccaaagtcgatgtcaataagttgcaggcttcgcgcatgcaggctgcggcacaggcgggacaggccgaaaaacagaagccgatgcccgtgcatgtcgagaaaaaagccggccgcaacgatccctgtccctgcggcagcggcaagaaatacaagaactgtcacggcaagggtttataaccgcaaaaacggaccgacgatgggttacaaggaagagaaacaacaccagctcgacatgcgctacctgcgcatggcacgcatctgggcggaaaactcctactgcgtgcgccgcaaggtcggggcgctgatcgtcaaagacaagatgatcatctcggacggctacaacggcacgccggccggcttcgagaatatctgcgaggacgaaacgggtaagaccaaatcctatgtcctgcacgccgaagccaacgccattaccaaggtggccaaaagcgccaacaactgcgacggctcgacgctctacatcaccgccgccccttgtatcgaatgttcgaaactgattattcaggccggtatccgacgggtggtttacagcgacgattaccgctccgaagagggactcgacctgctgcgccgggtcggcatcgaatgcgtacagatcgaattcgaagcataggtccgaatcgttacgaaaaaaggagcgcaataatcattgcgctcctttttcatagacactttcacatcatgggaatcgtatcttcgagaatctcccgaagcgccgctcggccaatcgactatttccaaaacaagcgggtcgccgttccgtcggcatcggccaacatcccaggaacgaacgccgtgcatctaccctacagcaccccgaacaaaaatgggatgtgtccgatgaaataacaggacacctcccatttaagatacagaacgattcagagtaagaagagcgaatccgaaacaaacgcccgaaccacaataccgggaataacaaggcggcttacctgttcgaatatcccgttccgccccttactccatgcagactactccgcataaagaacttcgtaacggctacgataggaggtagtacgcaccagggtacgttcgcccgtcactttgtgttccttataaacccgcagctcataggtggcatcggcccgaacgggataaccctcgccgtcgcaggtccagaccatcggcagcgcactgccttcggaaacataacggtactcgctttggggatcatccggcatccccggtacgtcgtactcatcggccgaggaggtggtcaaaaacgcactccgctcccccatcagtcccgcgagcgccaagataccgcagacaccgtcgtcctcgggatcggtaggcacggctccgaagaacgcattgaggtctatgctcaaccgctccggatcgttcgagaggtcggagtaggcgaaatcgtacacatagtcctccatcccgctcccagcaacggccggtacgaccgtctgcatcagattaccgccgctccaggtgaaatcggcccgggggcggaaatcgtaggaggttttcgtcgggtcctctatcacgcacgattgggcataacccgccgcatcgtaagaagtagtccagactaccgactcgccctcgctcaccacctttacggcccgacccgccgcatcgagcgtaacggtataaacctcttcgaaatcgtcgtcacgggccacgaccttcatcgtcgtcgcatccaggtaagtaaactcgatcggcgtttccatctcgccggcaccggtttccggcgaatcgtcgatcacgacacgggcaacacgcccctcggtgtcgtactcgatattacagcggaaatcatgatgcagctccccgccgggttcgtccccattatcggagaacgaatcgaacgccacgatccgtcgccccggtttcggttcaggcgacggatcgggttcgggcgacgggtcctccccgcctgccgcctgctgccggaccgaaacctcgacacgattctctccacagcggatgacgatcgaagccgagcgctcctcacccgtatcgttaggggtcaatgcaatctcgacagtcacgcgtcccgccccgccgtgatcgggcgaaagacttacccacccggtcgtctcgtcagcacgcgaatcgccgtacacaacctccgaggtccacgcctccgccacttcgaaagtcagcctgctactcgtctgatcggccttaaaagtctgatccaactccccggtatcgggaaatttcaaatttccgaaatcgccgctaccgtcctcatcgttacacccggccgacagaaaagccgccgctgcacagaacaaaaatttcagtttcatcttcgactaaattaaaaaataccccatttccaaaattcacacaaagatagcattttttttaaatttcaaggagggtaatttttcaaaaaaaacttgtataaaagaaaaaatagatgtatttttactttataaagattgtactattagtgaaaatgtgctgcggaaaattttcaggaggtgtggaaaatacgatacaacacctaatcattagaaccttatttacaaaccttaaccaaaacacgtatgaaaaaatttaatttgttgatggcgcttatgatggtattcgcactatcgtttgccgcttgtaatgatgaagagcgaatttcccccccccacgatggtggtaatttgactttcgaggtaacggttggcgagattacctcatcctccattgcctacactgtaactccctccgaccttaaggccgagtacctgtgcatattggccgatgccaaaacagtcgagtcgtttactcgcgatgaatttctcgtggaggccatcttggaggagcttaaggctgaagccggcgcacagggcaagactttagcagagtatatgccggaaatcgttgataagggggctatcaccgatggcaagttctcgaatctgtccccggcgtccaaatactacatcatcctgttcggagtagatccggccaacggatataaggctaactctgacgtagttaagaaagacgttacgactgaagagttccaggatctcaacataacattcgaggttaagacgactgtggacggcaactctgcaacattcaaaatcatcccttcgaacaacgatgacgtgtggtacttcaccactcttcccaaagccacttacgacacatacaccgatcctgccggtcaatacaagatggaaacacggcaattcatgctcttctgtctccagcaggaaatcgaagcccggcgtcagcaaggcatgtcggatactgaaattatgaatgcgatcttccacaagggggctttggaactcgaaggcaagggacttaccgccaacacggagtatatcaaccaaatcgcaggctttatcataactccggaaggtcaggtgaccatcgctaccgatgttactacaaccacctataccaccggtaatgcccaggcccaagattttactttcgaaattaccgttggtgaggtcgaggctatgaatgccgctatcaagatcgttccgacagatgaaaccgctaccttctgctggatggtggctccgtgggatgggaagaagacagctacggaggttatgaacgacatcgtagcacagtatggcaactttatgaacaacggagccatgctatataaaggcgttcaggattacacgggcggccccggcagcccgtataaatacaaactcgatgctgccgacacctactactacgtcattgccttcggctatgccggcggtgtaactacagagcctgtgatggagactttccgctcccttgcggctccggatccggaatcgaccaccttccagataactgcttccgacatttccccttatggtttctctgcagaggtaacaccatccgagactaccacatactatacggtgaaattcatgccaacagaagagtttaagactcttgattttgaccaacttaccgcagatataaacgcaggtttcgatgagatgttcgcaacgtcacagatgtttgatcctaacactactgttgctcaagttcttagtacatattactataaaggtgttttccttgccgatgcttcaggattgactcctgaaactgcttgctccggctttgtagcagcgctctctgttgaaacaggccatgttgtcaaaattcacaagttcgaaaacatcacaactaccggcaaactcggcaacatcaatccttccgtcgagcttatcggctactggtcaggtgacgacgaggccggtcaaatcttcggacaaccagacgcaacgagaggtaaggctatcactgtcgtcaagtatagcggtttcgatggtgcacggaaactatctgctgtaatgtggtggggcgaaatgacagatgtcgatcaataccccgatgcatccctttggagtcagttgaaagcaagttggctggagatcgatcagtcacagccgtactcattctatgttgttaattgggaggagccgcagacagcatttgtctatgcagaagacaacgatggcaacccgggtacttttggtcgtctctccactctcgcaaccgcagagaacaagggtgacattcaggatttgatcgatcttgttgagcagatcaacgcaacatcaaagagttctttcgcactccccaagtccgatgtgatcggcaagaatacgggtcttacactcaatgccaagagttttgaagcaaaggttcctgtcgcaaagactgtcaaggccgaagtgaaggttgccgaacccaagccatacgcaccgtcttacaatgtatcatacgttcggcctttctatatgtaattgttgtatagaacataatattggacagttcgtctggcgggttcgccagacgaactgttttattttctgtattaacgatcaatacatatacaatatatatttatataaaatcgcaaaatccgacgaatcgtactatctttgtaaaggataagaacacgcccctgaaaactgcaaatcccccgttttcttctcggctcacactgtctttaattgtaaaaattcatcgattatccccatgaatcgaatcgtcatcctcggggccacttccggcatcggactggagatcgccaaactgtatatcgccgccggctggcaagtcggggccgcaggtcgccgcacggaaaacctcgaagcacttcgggctgcggcgccggaccgggtaaaaatacgttcgatcgacatcacggccccggaagcggaagagcggctgctgcggttgattgccgatctgggcggctgcgacctgctgctgcattgcgcgggcatcggctacaacaacccgcagctcgacgccgcacgggaaatcgcaacggcggaaaccaataccgtagggttcacgcgcatcatggacacggctttcgactatttccgcaggcagggcggaggacatctggcagcgatcagttcgatcgccgggaccaaaggcctcggcgcagcggcggcttactccgccagcaaacgctaccagaacacctatctcgacgcattggcacaactctcacggatgcaacggctcgacatccgcatcaccgacatccggcccggattcgtggacacacccctgctgcgcgaagggaaatacccgatgctgatgcgccccgaaaaagtcgccgcacgaatcgtccgggcgctggaacaacggaaacggcgcatcgtcatcgaccgccgttacgccgtgctggtatttttctggaggctgattcccgaatggctctgggagcggctgccgatccgcacgaaataaggcccgtcagcaagatttctcccgacaccccatgctcccgccacagctatccacctctaaaatttccccaatgacatcccaacaaatcgctgccatcgccgcccgcaacacagagaaagcccgacggatcatccgagataccggcatcatcgacatctgggaatccgccggagccgaaataaacctggtcggctcgctcagcaccggtcttttcatgaagcaccgggacatcgacttccatatctattcggctgtcctccggccagaagatgattttaccgctttagcgaagcttgccgccaatcctgccgtcaaacgaatcgaatacggcaacttgctggcgacggaagagcggtgcctcgaatggcacgcttggtacgaagaccaggaaggcgaactctggcagttggatatgatccatatcgagaaaggctcccgctacgacggctacttcgaagaggtggcccgacgcatttcggcggccctgaccgatgaaacgcgcgaggcgatcctgcggctcaagtgggaaacgcccgatacggaaaaaatcgcaggcatcgaatactacatggccgtcctgcgggacggcatccgcagctaccccgatttcgttcgctggcgcgaagcacatcccctgacgggtgtagcggagtggatgccctgaaagccggaatccatgccggaggtcaggtcttgcaccggatataaaagaattttcctcgttcgatttcgaccaactctacgctatcgaatcccgcgcgacgatctatttcgacaagttcgccgcatgtatatttggcaaatccgtaacgggtatatctcagcttgtcgagccactgttcgaaaacccggagtaacgggttgcataccgtacgatttccattcgaaaaaacggttaagactgcatcagcacaagggttatcataaacaccgcaggcacattgttcagggcatgcgccccgaccgcccacaagaaacccaggttgacccgcaggtaaaccatgacgctaccggcgaagaaaagcatcagacatatcagtaacgcatagggcaccaggaaccaggtaagaccctgcatggcgaaaagatgcaccaaggcaaagagtccggccgagcaccacatcatcggacgcagccaccccttcttagcctgccagaaagcatctgtagtaaatccatatagcagccccgctacaacgatacctgccggaagcccccaccagaaagaatgctgcgccccggctatcgctaaaaaccgcgagacgaaaaagagcgtcagtgcccccaatccaaccgctacctgccaccgccggaacgaaagtcccagccgaaaacaacactcttcgaaaaaaggtgctacgagcagcacgtacggcaatgcccaccatcccatgccggcagccgctacggacggatttccgaaaaatgaaagcccctgcatcgggttgattcccgtattggccatgtaaatcgccgtacaccccgtaagcatcaacatcacggcgatacgggttacgataaagaacaacagcgcgtacagcaaaatgcggccgacactcttggtctgccgttcattcgtacgattcaaaataaaaagctgcatatattcactttttaagtttacactcaataaaaatccgccggacagaacgatacgattttcgcagggactgtctcggcggatattcaattgtaatagtatggaaaatcagaacgggagatcgtccggatcgtccgcagcaggcgtaacgggagtctgggccgcaggctgctggtacgaaggctgcgccggctgctgataggacggctgtccctgcggctgggcatacccgcctgccggagctcccgccgactggttatccccacggcgtcccaacaacttcatatcgtcggccagaatttcggtcgtataacgcttattgttatccttgtccgtccactcgcgggtacgcaggcgcccctcgatgtaaatctgcgatcctttattgacgtagcgatccactacgtcggccaaaccgcgccacaaagtgatcgtatgccactcggtatgttccttggtttcgttggcctggcggtcgaacagccgttcggtcgtcgccagacgaacccgggcgactttcgctccgctttcgagcgtgcggacctcgggatccacacctacgttgccgatcaaaatcactttatttaccatatcgcctcgttataagttttttatcatctccataaagagctcggccatcttcacgccggctttggccccctgacgctgcacatcctcgtggtcgccgacctcatcgctcaacccgcagttcgtaatgaccgataccccgaaaacgggaatcgacatgtgccgggccacgatcacttcgggtacggtggacataccggcggcatcgccgccgatcgccttgaaatagcggtattcggcctgcgtttcgaacgtcggacccgtaccgcccacgtaaacgccgtactgcaacttgattcccttctcctcggcgatacgggtcgcacggataatcaagtgctgatcgtaacagttgtgcatatccgggaaacgggggccgaactcggccatgttggggccgatcagcggattgggcatcaggttgatgtggtcggtgatgaccatcagatcgcctacccgaaacgaaggattcacgccgccgctggcgttcgatacgaacaggtagcggatcccgagcagcttgagcacccgcacggggaacgtcacctgctgcatggtgtaaccttcgtaatagtggaaccgcccctgcatggccactacgcggcgcccttcgagcaaaccgaaaatcaattttcccttatgtccctcgaccgtcgaaacgggaaaattgggaatctccttatagtcgatcgaatatttctcatcgatacggtcggcgaaatcgcccaatccggtaccgagaataatgcctacttccggttggaagttttcgatgcgtgcctgaatgaaggccgcagtctctttaattctctctaacatcgcactctaatttttggagaaaatccgtttccgaatcatctatgaatgaaatattgatgggcaggaaatacattctcttgcgtacttccgccggtatcttttcgggatggctcatcttgaccgcgtccttttcggtcatgatgatcgccgctttcgggtgttttgccagcaaattcgctaccaatttcatatctttcacccggtaaacatggtggtcgtcgaaacgaacgtcctcgatcaccttgtaattattcctcaatccctccacgaaaggtcccggattgccgatacccgacatggcgatcacctgctgtccgtaattcagttcctcatccacgaactcagggaagagcggccgaggccggaaactttcgaaacgggtaaagtaaacacgctgataggcgacctgaaccagaaccttgcgcagaatgcgccggtctatcggagccatattctcagggcatttggtcacgatgaaataatgcgcccggtgcaactgttcgggcaaatcccgcagattgcccgcaggcaacatccgatcatgctgcacgggccgtgtcgcatcgatcatgacgatattgactttaggctctacgtaacggtgctggaagccgtcgtccatcacgacgagatcgacctccggatgctcctgccgaagacggcggatcccctctgcccgtttctcgcacacgaccacgaccgtatcgggaaatttgcgcttgatctgcaacggctcgtcccccacttcgcggtagtgcgattcgggagtgacctcaatatatcctttcgttcgccgcccgtatcctctggaaatcaacgctacgtgatgcctttgagccatgtaggcgatcaccatctcggccatcggggttttgcccgtaccgcctacggtgatattgccgatgcagacaaccggaatatcgaacttctcctgtttcagaattccccaatcgaaaagccggtggcgcaacaagacccccaacttataaaggaaagaaacaggcatcaaaaaaaaattcgacattctcaatactggtttatagcaatcaaagatagcaacaattcaatgaattacaaaagaaacaccccaaaacttggataatccgaccgcagagcagcggaaattttgttttttttcttatctttaccggaagaaaacttccgttaaaaatcaggatacatcccgaccggactccaaaaaatttgacccggttcgcagttttataccttaattattaacatgatcaaacaactgaaaccagctgtcgcattgttagcaggcctgctctttttcgcaggatgcggccgcacggcaacggatgccgaagaaaattccgatgaaatcatagaacccaaccttttatacggcattcccgccgacaactaccggctcgaacagcagatcatcgaccgtggcgaaaccctcggtcagattctgaaccgatacggtgtttccgccgcccagatcgatcagctcgacaaagcgtccaaagacgtattcccgctccgcaacatccgggccgggcgcagctacacggctttcatccacgaagattcgctcaacgcgccccatctggactatctggtgtacgaacagagcatttcccagtatgtcgttttcggactggccgacgactcgatcagtgtcaccaaaggcgaaaaagagtatgaaatacgtcgccagaaaaagactgccacgatcgattcctcgctctgggaggcgatcgtaggcgccggcatgccagcctctctcgccgcagaaatggaggacatctatcaatcgacgatcagtttcttcagcatccagaaaggagataacttcacggtcatctacgacgagcgttacatcgacaccctaccggccggcatcgggcgtatatggggtgccaaattcaactacggcggcaagacctattacgccattccgttccgccagggcaataaaatcgcctactgggaccaggacggcaacagcctgcgcaagttgatgcttatcacgccgctcaaatatacgcgcatcagctcccggttcacctattcgcggctccaccccatctacaaaacctaccgagcccatacgggcgtcgatttcgcagctccgaaaggtactccggtacacgccgtagcggatggcacggtcatcttcaaaggctggggcggcggaggcggcaataccctcaagatcaaacacaacaacggttttatgaccggttatctgcacttgagcggctatgccaaagggattcgtcagggcagccgcgtatcgcaggggcagttgatcggttatgtcggcagcaccggagcatcgacgggcccgcatctggactatcgcgtctggcgtaacggcaaaccgatcgatccgctgaagattccgcaggaaccgggcgaaccgattcacaaagccaaccgtgccgcttacgaatatgtccgcgaccgaattatggctgagctggacggcaaggtaaaggaagaagacaagatcaaacaactcgactcgatcgtactcactccgtcgaaaacgacagacagcctggttttcagcagtaaattatgatcgacccgcgcattgtccgcttcatcggccgacaccacgtcctgacactggcgaccgtcgccggagaacagccctattgctcgcacgcgttttacgcctacgacccagagcgcaatctgctcgtattcgcggccgataagacgacgcgccatgcggaggagatgcaggcgaaccggcaggtagcgctgggcatcgcgctcgaaagcaaggcagtgggcaaacttcaggggctccagctttgcggaacggtgcgggaagcggacgaagaggcacgaaaaacatatatccgccgcttcccgttcgcagcactcgccgagctgacgttgtgggttgtggagatttcctacatgaaattcacggacaataccctcggattcggaaagaaactgatatggaacagcaaggaacaggagtaatcatcgtcgccggcgggagcggcagccgcctgggaggtccgcttcccaaacaattccgcatgctgggatcgctgccggtattgggccatgcgataaacgcctttgcaagaacgctgcacagcacgcagatcgtcgtcgtccttcccgaaggacagatcgatttctggaagaatctggcagcccgtttcgacatagccaagcacacctgcacggcgggcgggccgcaacggttccactcggtacgcaacggcctgtccgctctgccccgaaccgtcgcactgatcgcggtccacgacggcgtacgtcctttggtatcgtccgacctgattttgaaagccgtggagtgtgcggcggcccatggtactgctattccggtcgtcgaagccgtcgattccctgcggcagctcacgcccgacggatcgcacccgatcgaccgcaatacgctgcgaatcgtacaaacgcctcaggtcttcgacgcggaattgctccgtcgtgcctatgaactcgactactcccccgacttcaccgacgacgcctcggtcgtcgaacgggcgggacatgcggtcacgctctgccacggagagcgcggcaacctgaaaatcacgacagcggacgatcttccgatcgccgaagcaattcttttatccagagcatcccgtgaagaaaatctataaatacagcttcagccgccacacgctttcgctcacgacgatctacctcacgatcttcctcgcactggggatcgggctctactttctatatgaaggaggctatctttcggcctggttcttttcgttcatcgtggcgctcgtcgccctgatgtcactctccattccgcgtcgcatcctcgtggacgacgaaggactgcatatcctctgtctgctcgacatcacggagcttcatcccgaagagatcgcctccgtacggcaagtcgagaagcaggaactccgaggctacgtgccctatttcggcggttacggatttttcgggttctacggacactatttcgacctgaaaaatctcgaaagggtcaaaatctacgcttccgaatggcggaatttcgtcgaaatcaccgatatctatgaaaatcggatctatgtctcctgtacccagggagaagaactcgtaaacgacctacgggaactcatctcgcacgcccgagaacgacgagcacaggagctacagtcccaggaaacgacggaaacacgatagtttccaccttccgacgtcaaaacaaaagacaccggcctctacacttctccccccctctcccaaattctcttcccgaaggggatctcgattcattaccttccccaaaaggatgctatgttgtgtatatcagtatctgcatgttaagggatgataaacgcacgaattccgaattcgaaatacgatacacgacaatccggcctacattaacgcatcttacgattttccattcgccgcagaaaaacaatcaggggaaactgtgtaccagtttcccctgatttcaatgtatcgttcaatcttaattcagattcggcaggaaggagtaatcccggctgtattcgagcatctgcttcacgtagtcgttcggataagaaaccttcacatccacgaccttgccgttcttctccaccagctcgtactgcggattcacaaaaccgctgtaaggctcgatatcgagggctttgtaacgggtcagcacttcggcgtgcagcttcggatcgaccgtcacggcatatttctcgaccagtgctttgccggcctcgaaatcgccttcggacttgatacgctgcacctcgcggagcatacgacccaacagctcgcgcagcttcgtataatcattcaccacgacatacgttttaccatcctgctcgatccactcgatcacgttgtcggccttcccctgctcgtagcaccattcggcgatcagcttgcggttgcgcatgtgcgcctcctcgacattcttgcccggctcgatacgtgcgagctgcgtcatcataccgttcatgatataccgggcatattccgcatacgccacatccagcgacggaatcagccccaattcgaccattttcggatcgcccaggtagtagagcccgaaaagatcggcacgggcctcctcgagcgtcgaggtatagttcttcaactcaccgcccttcacacccggagccaactgcccggaaccgtgtcccaaacattcatgcaggtcggtatgcagatcgtcggccaacttgccgtacttgtcgatacgttcacggtcttcgggacgcagcatgaactcctcgaggaatccgtcgccatgcgccgcctgagcataagcgtaggtaatgttgtcgatggtcaccgacttcgaaccgtgctccttgcggatccaatccgcattgggcagattgataccgatcggtgtcgcaggataacagtcgccgcccagcatcgctgccgtaatcactttggccgaaacccctttgaccacctttttccggtaggcggaatctacaggcgaatgatcctcgaaccactgcgcattctcggagataacctccgtacgatgacaggcctccttgtccatgaaattgaccagcgactcccacgacgccttgcgtcccagcgggtcgccgtaatcttcgataaacccgttcacgaaatcgacgttggatacggtatcccgcacccacaggatgttataacggtcgaaatcgtgcaggtcgccggttttgtaatagtcgatgagggctgcgatggtcgccttctgcggctcctgggcaacgccttgcgccttctccagccagtaaacaatcttctcgatcgccggcgaatacataccgcctactttccacacccgctcgcggatcgttccgtcctcatccttcacgagcttcgaattcaatccgtaggagaccggttcgggatcggccggatcggccatgctacggtagaactcttccacttcggcctgtgtcacgccttcgtaatagttgttggcggaagtcgtcaccaaatcctgaccttcggcctgattgagttgggtcttatagagttcgggattgaaaatcgcctcgcaaacgacagcccgcagcgcattgagctcatcgccgaacttctcgacggggatcgactcggcaaccgcgaggaaatactccttcggaaattcgggtacgaacttgtcgttggaatagtggtgatgaattccgttggcgaaccacacttttttgaggtacttctccagcgctttccattcgggcgtcgtacggtcaccgtcgtaattctcataaatcacctccaacgtgcggcgcacgggaaggttgtatttgaaattctggtcgaacatgatgtcgcggccgcatttggcggcttcggccaggtagtagatcaactctttctcccgaagaggcagctcggcaaagcccggcacctcgtagcggagaattttaatatcgtcgaagcggtccaggatccagggagcatcctccgtcttcttttcatggcaggaaatcatcgtcgttgcggttaaagtcaaacaaattgcactcaatcgggtcttcataggcaccaggtcgtcggtttaacgggattttacaaaacagcacgaacgaaacacacggcctcgattcgcgcatctttgcaaagatacgaataagccgggtacaaaagcaaatttatttgcattttgtcgcaatgaaatatccaattatccgatccaaatcgaagacagagaaaaatgagaacaatcgtacagacttatacacaaaaatcgcccaaccgcttcctatcttcgacaaggataaacaaatattcatccccggcaaacacggaacatcggtcccccaacagtccgaccagctccgataaaaccgaccgcaactggttcaatccgacacacaaccctttcgggttatttcgtttttcagacaaaatacgttccacaccacatatcgtccacaaccgaacaaaaaagtcccggtcggtattttccgaccgggactccaattagcgttccgcatatctggacatcgatgcccgacacggcttcaattatctaacgaccgatgcggacggcatttcatcgttactatgccaagtaccggtccacttgtaatttgtctcaaaatacttctggaatgcttcgatctgcgccgaagtagcccaaatatcgaccagattagccgcaggaatgaaattagcaggatctgtcaactttgtattggtatagatatttatcgaaggatagatccatttaccactattaggttcactctcccacttctccaaataagagccggaaagattcagagaagtcaattccgtacaaccagttacggtcacagcaacaatcgcccgacaatcctttaccgtcacggattcgatcttcggacatttatccagttcgacacgcttcggcccaacctccgtaccggccgcacctgtcaccaccaaggagaaagtcgtcaggctctgaagaccgttgcaatcgattgccgtcaaacctttcaccaacgaaatatcaaccgaagtcaaattgatattaccaacagccaaattcgtatcatccaaagactccaacccagacaccttcagcgtcttcaaattccgaaaatattcgataccagccaaagacttcacttccgccgcattgtcggcattaagctccaaatccgtaacccgatcagcttcctcctgcgtaatacccccattggaaccataggtctcaatcaggaactcacggaatgcattatctttgatcgcatcgacaatcgtactcgtttcgataatcgtatagctctccttctcgatattgatagcttccacgtcgagagttccggcaaatatcttggtcagcgtcgcacaccccattacattcagagactgcaacgacatattacccgaaatatccagactcgacaatgcagtattgctcgcatcgagcgtcttcaaagctgtcccgtaaccggcaccaaacaaagtaagttccacaagcggatttccgctgacattataattctccaacatcggagtcgaatggagataaacatacttgagattgttattacttacgttccaatccgtaagaaccgcattgtcggaacaactgaaaccggaagactcgctcaacaaattattcgccacatttacgcttttcaaagtactcgtattatacgaacactggaagcgggtcagttggttgttactcaaatcgacagactccaataccgagttttcgaaagcaacctcctcgagcatattgccgctacctttcagaatacgcaacttcttacatttattcagttcgattcgcccggtcagttgattgttcgaaaaatcaatctcctcgagattggtgaagaatccggcaacaggaagctcagtcagctcgttgtccgagcaatccagtttccgcacattcgtgaaattgacatattccacacctttaagggacttaatacccaaacctttgatattgatctcggtgatcgcctcgacctcggttttgtcgagcttaccgtccccgttcttatcgaaagtcagcagataagtcttatacgcttcgtcttcgatgttagcgatagcatccggccctgcctcataatccttgtattggataaagctctcgatattcgacgtgctctcgatcgtctgccccttactcaaccaaaccgttttcagggagttcgccatatatgccaatgccgaagtcagcagcaggtttctcgaaaggtcgatctcgacgatcggggtgctgccgaagtcgatcgaacgcagataaggacagttcgttacgtcgatctctgaaatcttggtgttgctgatattcagaacttccaactgtgcgcttttcgtaagatcgagcgttgtaattgtacccgttaccgccaaatttgtcaattttgtattgttcgtaacatccaaactgttgaacacgtcgccgccgacattcagcgacttcagttccgtgttcttcgaaacgtcgatcgtactgaatttagccgaactgaagccgatgatttccagcttggtgttcttgctcaaatcgggagcgaccacgaaaccagcactcgaagcatagagatttttcaaattaggtgcaaccgaaagatcgatctttttgagcttattacacgacataacggagagttcttccaagctggcaggaagcacgaccgacgaaaggccggcgccgctgctcaggttaagctccttcaaagcataacactgcgagaaatcggcctttaacaaacggtgcgtagtgaaatcgaccgtttccaaattcgggaaatattccagaccgtcgatcgatgcgatctccgaccccgtaagctcgatcgcctttaccgcttcggcttcttccttcgaaatctcaccgtccttattcgtatcgaagttcgtcatgatgtaggtcttcagcaccttatcgggaatcacggcaggataggtcagttccttgcccgcctgcttgattacgatatgctccgaagcatctgcattcttgaagataatcgtcgcgtcacgcgggccaccctccgtattcgccaacaccttgaacgagaactccttgtcgatcatagcgcgggtatccacagcctcgatccaatcgactccctcctcgatcgtagccgtcacaggctcgatgttcgtctgaagtttcaccgttacattctgctccgtattggacacagatatcgttttcgaatcctcgtcgatgatgagcttcccctcctgattctgctggattttgagaggggccttctcactgccacttacgaaattgaatgtcacctccttggccgcatctgtctcattggtcgtagaaaccgtaaacttcacgacgctctcgccagattcgccttccgtcttgtccgcctcaacccaatctgcgctaccttccagcgtccaggatttcgaactggtaacggtaacagtctcctcgccgcccttgtacgagaacgacaaggtcttcggactgatcgaaatagactccgaagcagacatctgacgaaccgtcaattccacactcgttgcctccgggtaagtcagcgtgagtttagcttcccgcgcagcacccggattggcgtctgcctgaagagtgaatttatctgcactgaccgacagatcgtgcagccaagtcgcatcccacgtcacatcgagagaacaaccatctacggcataatccacggtgtaaggtactgttaccttacccgcaacggctgcgatgtctgcgggattcgaggccttaatgactggtgtctcctgtttcacatccgggtcgtcgctacaacccgtgaggcccaaagcgaaaaccgcgaaaaaagacaccaacaaaagcgttagttttttcatactggttaatgattttttgtgaaagcacttccggtatcgctaccgtaaatagggacagtcgcgaaataggcttaaaattataacaaattgattgtcaatgtgataaaaatttcatatcttagctacaggaattaaaaattcctccg

SEQ ID NO: 10397 - DNA, 6322 bp, Unknown
  gut microbiota DNA sequence
caaaaacatttcctaactttgtgctgtcatcgaataggtgacagacatattgattagtgaaagtgtttcgctgaatcctcgataggaaatctggtaaatgttattctacaaatgattaatcgtttgtatatcatcataatagcattttgttcaacttgtaagggaaacaaaacaggaacaaaatcaaggatttaagcgattctccgtttttcgcatttcacttagtttcatcctttacacttggtcgtactaaaagtgtttttcaagccattttttcctgacaactaatcgctcttctgagaatatattgttgaagcgcattgatgaattgttgcagccaaaagagaaaatgacaaacgtcagtcttatgggtatatccttattagattttgttcttcgcaaaggtaactatttctatcaagtcataggcatatggaaaggcaaatatgcctacctaaatttagtttactttgatttagcatatatataggctaatagactaaactaaactggtttttcaatggatttccacattcaaccctgcataaatgcacagccaaaagagaagataactttactacatatttctcttttcgctgcaaatttataggacgaataaagaagtttaaacacccaacaattttagagggttaactaagtctatcactctgaaagtagataatcagcttatatatataacttgcagaataaagtgttatttgcgattttgagtaattttattgtgactctgacgtttatattatttatccttatagttcatttactttaatctagccaattgtccttaataaatgcaacaattctatctcggcgttctgatatttgtatttcattccatttcttttcgctctttaatgtctcatatatctctttgtgagaataaaaaatactattatacatctccactacaccatcatttgccggattgtgatttttcttggcagagttattcccccatgtaagaagcgatagattacctatattattgagatattcattacaaaattcttcggaatattctacaaaatcaggtgtttgaggggtaatatggtctaatgtattcgatacagacacatcacggaatacattagtacattcatctggagacagtaaaggctggcgtgccttagcacgtaagtagttttcatatttatagagtacatatctcagttctctacgataatgatacttatttgcagtgaagtagcgcagacaatctccattaaaattccaatactccttaaacccatggcagcacttgtatgtaaggtctgctataagattgtcatattcatcaggtttatattttttcgctatggatattaaattgttggtacgatagccacctagtgtataagtcattttgaataatattttctccactaatttcagtgcgttatcaatagctggaatatttcttacatctattccgttgctattataatggcaaagtttgagtaccaatggcattgaattagccttatcaagaatacatacatcagctatggggctattgaatagatgccaagtattctctatttcacacattaaagaataagaacagcatagttcacttacaaaagaattaatccactgcgttttatcatcagcacgaagcaaactttcttttattgcatctaatggagaatcataacttgaaagaaatgccgaacaatggtatcctaagactgaatcttctttggtttcaagtctttcaatatagttgtaaattgaagcaaacttagcttctacagagtggatgttactaattgcattagtggtattattcctgtatatttgatgcattagaaaagctttcaacttctctaatgtagtcaatcccaagcctcggtcattttggaaggcaaagatttgagttgccgtaagttttgcagactcaccactcaataaaaatgttgttatgatggcattgtcgattacatgaaaccacttaaaaagagttccctcctcagtttgtgtagccattttttcttcaaagaaacttgaggcttcacgaatacgtcgttctgatcttcttccagtttctatcctataatcgctatcacattcaataattaatcggttaaaaaaagaggaatcttcagggacagtctcaaacttttggcttccataacgcggttgaaggtatcgctcgtatatttgttcagtagcatattgcatattattataatcgaatcttacaatcttacgtttacgcaattctttcactaaacaactcataaagatgaccgttgtagtcaacctttgctgtccatcaattagctcatatctatttccttgagttttttcaaaaagataatgaccaagaaaatagctcgaattatcaggttggtcgataatatcattcagaaacatatcaacctgaccaacacgtccatctttgcccactctccaagaataagctctttgataacttggtataacgaaagttatcatatcttctccaaacaagcgtccgatagttgtttgattgtccattttgtatttaaaattccaataacaattttataagtgtatgtgaatagggtgtacatgtttggtacaccctattttacatttaatatgcagagcgggtatttatctttttaccagttctatcataggtgtccagccaagcacttcttctcacaatgaaagtgtcacctgaaatactcacaaatgaaccgatggattcactaagcgttttgtactttttacctgattcatcatataaatcgtaccatgcgcttcgccttacaacgaaaaaattagcagcccaaccaagtacctcaccgatactttcgctgagtgtcttttgtttttttccacgttcgtcatagatgtcataccatgcactacgacgttcaatcattgaaatagccataattaaattaagtggtcttacagctcctttgggaccttttaaagttaaaaatgggaagcgtggaactgtatgccacactcttacttgaaggtcgtaggaaaccttggatacagatgtaacaatagcagcccacgctatagcgtgagaaccactatgctatctttgtatccaatttgaaaatttcctacgttttcaagtacaggataagcataacgcttctttcttttctaatatgtcttggaaaggagttacctcaaatccaacgcaaaaataatcaaaagtttcggcaataccttgctaccgagtgattttttatgcgtgagagtgccaactgcgcaagatttataatttcttgtccttatctgtcgcttttgtcggcataaccatagttttgggaccgcccgatgtggtcggtttcttctaaaatattatttctttttgcttgggcatattgtggagcaacagttttcaacgagaaaaagaatcccgttctatttaactgataccttcataaaaatattgaataataaatttgtcaaaaggcattatatctttaagatttgaaatgaggttctttggacttattgttttaaattgtatgataatttcagaaatttccttagtatcatcctccaaattaattaaaccagaatcttgaatcttgcgactgatcattcttggcaacccatactcttctagttgatatacgagttttggaaggaatgcgttagatgcccgtcctataaagagagatatgtcgggagctgccggatcgaaagattttttcaaaatattaatgacagataaagttgtgcataagttgtatgaaaggtaacgttcagctgcgaataagtcttcgtaactaattttatatccgtccttttctaattcatcatagatgaatgccacagaatgagaccaattctttggcattttccatatagcaagttttatcaatcctcccattttatcaccaaggagattaatgacatctttaataggttcacgccaattatatgtattagttgctgcaagggcagcataattttggggccaggcagggtctgcctttaactttcttaccaaagtttttatgagtttggaatcacaagatttgaaagcagggagcctacggatgttgttgaagttttctcgtcctaaagcttttatcataaaagactcatactctttaatacggtcattctgctcttcgttgatttctacgcccggatttgctgaatccagagattcaacaacctcttccggaaaatcgatctcgagggttgtattttcttgtacaggaggttcttccaacaaatacacctttcccacaaaatacttgaacatacgacctgcacggccaatgatgttcctataagtaaaatagtcaaacttgcacgagccattcttgttagaccaaacaactacttgttcggcttgagtatttacaccttcaataatcgaagatgtggaaaccattgtgtcaataccttcttcttgctcaaaaagtttgacctgtatttgactcaatgatctgtgcatcttgccattatgtaccccaattcctctttcacttaacttgcatagcgaaaatttacgtccataattaactctaagccaatcgttgaaatcctgaagaagtgaggtcttttttaccgctaaatcattggcaaggatattcgagattgtatcgatattcttataactgccggcatagatcagcgtttttgctctctttttttgtaaaattttcagaagatgtccttttttaaattgctccttgtctgcgcttttgggcaaattcttataaagatgggccgcctttgtaatgactgttttaaagtccgttaaacgcataaactgcattccttcggtaaagacgttgtcagaaattttatgaatgttgggagcaaggtaataccgttgtcgagaaattttccccaattctatcatcgcacttagcagagaggaacttctggagtcatcgaacatggaacttgccttgtagaactcatccacgatgagcatgtcaatcttttcaagcttatcgaaataagcaaagctgcgttcttgcggaaagataaaaatgtttctttctgtaatggtggcatccgtggtagtaattatcttatagaaacgagaaaacttatgttcaatcctgcggcgtgtttcatccgctaaggctatcgttggaacgattataaccacattgtccggttttctgattgaaatgaaagcgtcgatgataaaacttttgccaaaactcgtaggggcactcacagcgatattctcgccaagcaataggcgcttcaaaacacgagactgggcactatgcagtgttacgggtgttttatcgccaacatctgctttgaatgcctcgaccacgacttgatcgtcccatgatgctgtctttttatcgatatatgggaatagaccgacaacccggatgaaatgattaaccataggattatactggttcccgtcttgttgcattctatccaataaattgatcactttacagcgagccgtcgccaagtctcgcttctcaatcaaatcattaatctgatcgcactcggagtatatctcgtaatcaagcatcttccttaatttgtttagctcgttctacaaaccaattgacaatctcatttttattagggacagggaaaagaatcaaatggaattgaatattatcgtagccatggacattctgtttcttttgcttaccgttctgaatattgaaatagttgacagctcggtccaaatggtatcgcttaatctcttccaaataagtctctgacaactcagttgctttctgtgtcttatcgcattcatgaagcaatagtatgggaacatgtagtcttttccttatttcgtcaacagaagtttcacgtctgagaatagtttgaacaaactttctcgtatcaggatcgggaatgacatattgcaaatccgaaatacttgtaataatggaattttctttctttatcttatcagtactgatagtatcgaatacggacttgacaggctcgtacattcgctcattggcgatgttactataaatctctggaaaagacgaataaaaagggacaaatgtcttcgtaatgcctgtcaataaggcgtttgcgaagacaaatgaggacaggcgaaaaatcgaggtaacgtaaaggaaagcggatttatgaagaagaacggtctccaaatcattacccgccgaatggtgatttttaacacaccgtgttgtatttggcagcttgtggcacaggttggcatatcaaggtctaactcgttgagtaataactttgcaaacaaaaaacgagtatggcaagaagcacattcaaggttctgttctacgtgaacggcagcaaggagaaaaacggtattgtccccatcatgggacgagtgacaatcaacgggact

SEQ ID NO: 10398 - DNA, 1195 bp, Unknown
  gut microbiota DNA sequence
cgggccacgattttagcacgtaacgcattgattaccgacattttgttctttccttcttctactttccgcatatagtaggcctttagttcaccctctttacgatgagttaccgatacggctgccatatgtagcagtttctttatgttcttgttggccctatgcgagaccttgtttttggagtgctggctgctcccggatgtgtatgagaacggagcgacacctgcgtgacagcagaactttctgggattgtcgaagcgggagaacgcttctgtttcgataatcacattcagagctaccactttacctacaccgtctatcgacattaaaagttccatctggcgcgcaagcacttccgttgagcctatgatcttctccatttcagcagtgatcgcatcgatagccgcttgtagttcctgtattaagcctttcatccgctttgttttcttgcgataaagcgccgccggcataaaatctttctgatcgtacatctggcctttgtatttagccaggtcggtaacgtaaagcgcacgctccctctccaactgtttaagcctctctatctcctcggagggacggtcgtaatacttaaccttatctccgaaccgtgaagcgtaaatggctatgcgctttgcatccaccttgtcgttcttgccccgctgcataccggatgaatatttgatctgggacgggttctccaaccaaagtttgcactcgaccgacttgcaagcacataccagagggaaagtatattgccccgtatgttcggcacagattaaaaactgttcgttatccatttccaaatcgttcttcaactcgccgatcagtctggcgacagcctgctggtggttgcttacctgttcttcgcgcagaaccttaccctcgaatagtacgcagaagtccagtttctttttgctgacgtcaaccccgatgaaataaaaattgtccattacttttgtttttgaccatcaaattgagagaaaggaacttgaacctatcctaactaccttaacaatgaaaggttaaattcttattcaggtctcggttcaagaaagacaaagagtcctaatatggaaatgaatcttgaattcttatcgatacctggttcactccctgcctccctttcttttagctaacctcttctctacaaaattaccaactctatctcatctcctgtttactgcgcaaatctaaggta

SEQ ID NO: 10399 - DNA, 38203 bp, Unknown
  gut microbiota DNA sequence
agcagggccgagcgccactcacgaaccgtcagcgtgcggatatactcctgcggcgaggtaatatcgacggccagcgtaagccgcgtatcgggggcgcacacctcgagcaactgcccgagcagcttcgcattccggtagggagcctcgataaaaacctgcgactgcctctcgccggtcgcacgccgttccagcgtccggatcgcccgggcccgttcgggcggtttgaccggcagatagccgttgaaggcgaacgactgtccgttcaaccccgacgccatcactgccaggatgatcgacgaaggaccgatcaaaggcaccacgcggattccgagccggtgacaccgggccaccgccagggccccgggatcggccactcccggcacacccgcttccgagataactccggcagaacgccccgcaagaatcggacgcaccatctcgtccacagcccgggtatcggtcgtatgctcgttcagctcccggaactccaggctgtcgatcggacggccgatgcccgccttcgacagaaaacgccgcgccgagcggacattctccacgatgaaataatccagcgagtcgatcacggcccggttcgccgccggcagcacgtcccacacgggcgtatcctcggcgatcggacacggaatcaggtaaagcgtacccggctgtcccggttttcgttcctgcgacatatcttcattccatttatcgaaaaccccgcctctgccaccgccccggcatccggctccgtcgggattctcttttttactccttgctgtaaatccgtttcacacggcccgacacggaggtcatcacctcgtaagggatcgtatcgagtacgcgggccatatcttcgggcgtattgcccggcactgcggagaagatcaccacctcgtccccctcctccacgccgggaatgtcggtcacgtcgatcatgcaactgtccatgcagacgcggcccacgatcggcgcgggccgccccgcgaccagcatcgaccaccggccgcaccccaggtgacggtccagtccgtcggcataccccatcggcacggtagccgtcacgctgtcacgcgtcagcttccccgcccggccgtaaccgacggcttcgcccgccgacaggtgcttgagctgcacgatacggcttttgagcgtcgaaacgggccgcagctcgtcgttatgctcgaagccgaaaccgtaaagtcccaaccccagacggcacatgtcgaactgcgcctcggggaaacgctcgatcgccgccgaattggccgtatggcgaagcaccggatagggaagcgccgcagccagacggccgctcatacggtcgaaacgggcgatctgctcccgcgtataacgatcctcctggggcatatcggaacagttcaggtgcgaaaagatcgtagcgaccttcaccgacggagtttcgcccagcgtttcggtcagcctctccaactccccttccataaaacccaaccggtgcatccccgtatcgagcttgatatggatcgggtaactctcctctccgacccgttcgacggctttcgaaaaaaacgccagcgaacggaaattgtatatttcgggctccaaccggtgagcgaccatcagatcgaaactaccctcgtcggcattcagaacgacgatcggcattctaattccccgctcgcggagcagcaccccttcgtcggcgaaagctacggccaggtaattgaccccctgatgctggagcatctgggccacctcgaaatccccggcgccgtagctggccgccttgaccatcgccacgagccgcactccgggacggagccgcgcacggaaataattcaggttgtggatcatggcatcgagatcgacctccaataccgtcgtatggctcttgcgttcgagcgcatgactcacccgctcgaagcggctgtcgcggctgcccttgatgagcaccacgcgcccggccacatcgtcgcggcgcaggttgcgcaacagctcgtcggtcgtgcggtaaaaggcgctgtcgcaggcgaaattcgccccggcatttcgaatacggtctcccacgccgatcagacggctcactccggcggcggccaccaggcgggccacttcgccgtaaagcactccgtcctcgacgccgctctgctcgatatccgaaagaataagtgtcatgggacggccggcggccatattatgcaggtagtcgagcgcaatggagagggagttgatgtccgaattgtaagcgtcgtcgatcagcagcgaaccgttgattccctccttcaactcgaggcgcatcgccacgggccgaatccggccgaaatcggggtcgggaaagcccatcacccgacagaacgccccgaccaactgggcatcgacacgcccggccccgctctccagaacccctgcgggcaactgctccggcagcggatattccgcagcgtcctgcaactgccggccgccgtataacgtgcggatcatccgttcgagcagggaggagccaccatgataaataatggttcgcgctcccttcgccaacaccaacttttcggcactcttctcctcgagcgaggtgaaattttcctggtgcgcctcgccgatcgaagtgaaaatcaccgtatcggggcggatcatccgctccagacgcaccatctccccgggacaggagatccccgcttcgatcaacgccaactcctcgtccccttcgatcatcagcagcgagagcgccacgcccaactgcgaattataacttttcggcgaccggaaatatttgacgccggcaggaatctgctgggcgatccattccttgaccacggtcttcccgttcgaacccgtgataccgaccacgcgccccttgaaccgagtccggtgatgggccgcaagctgttggagggcagcgatggcgctcggaaccaccacgcagccgcaaccggccggaagttgcgtcttccgctccgcaagaaatgccttcacatcccggcgaaccatctcgccaataaaggcgtgggagtcgtgattggtacctttcatggccacgaacagcggctcctcgccgaacgaacagttgcggctgtcggtaagcacccgtgccaccggcaaatcctccccgatgagttcgcccccgcaaatgcgggcgatttccgataacatgtatttcatgtcgtatctttcctttacataactgccgtcaatccatacgcagagtcaccaccgtaatccccgctccgccccggtcggcgtgttcgtccgcagcccgttcgacctccggcaccgtgcgcagataacggcggatctcctccttgagcgcccccgtccccttgccgtgcaggatcgtgaccgtaccgacgccaaccatgatcgcgtcgtcgataaaatcccgcacctcctccaatgcttcggcggcacgcaggccccgcacatcgatatgatccttgaaattgagcttgcgggccgacacatcgaccgataccaccgtgcgcggctgcacgggcctggtcgcctgcttgaattcggcgcccgagatcacgacgagcgaacttctatccaccgtcgtaagaatctgtccgaatgccacctgcgccttccggcccttgatcgaaagcaccacgccgggaatgtcctgcccggcgatcttcaccttcgagccgacctccgcctcgcggggtttctccggcacggcaggctgtgcgacctccggagtctcgccggcctgctgtctgcgctcggcacgacgctggcggcggcgttcgagtttctccatttcgcgggccacccgttcgtcgtgcgccgcatccgctgcatccgtcctctccaccctgtcccgaaaatcgttcaactccttacgggccaactgggtaagctccttctcggcctgcgcttcgcggatcgtccgaatcgtattctcaatctgacggttggcgtcggcgatcatccgctgcgcctcctccttggcctttttcaagatttccgagcgctcctgccggatgcgcgaaagctggtcggcataggtctgttccagctcctcgaccttgcggtcggcgatccggatgcggtcgcgcttctgctcccagtaatgtttgtcacgggcgatttcacgcaactgtttctcgaggttgatatgatcgctgccggccttttcgcccgcatcgcggataatatcctccggcaacccgatcttgcgggcgatctccaccgcgaacgaactgcccggcttgccgatctcgagccgaaacagcggccggatattctgcacgtcgaacatcatcgctccgttggcgattccctcggtgttcgacgcataatacttaatgttggcatagtgggtcgtaatcaccccgtaacagcctttactgcggagccgttcgaggatcgactccgcgatcgccccgccgatgataggctccgtacccgaaccgaactcgtcgataagcaccagcgtccggttcgaagctccggcgagcatgttcttcatattgagcaggtgcgacgaataggtcgaaagatcgtcgtcgatcgactgctcgtccccgatgtcgatcattaggttgcggaacaggggcagctccgaattctccgatgccggaaccaggaatccgcactggaacatatattggatgatgcccgtagttttcagacacaccgacttgccgccggcattcggccccgaaatcaccaggatatgacgccgtttgtcgagttgcagatcgagcggcaccacctgcttgccctgcgcccggagcgtctgctgcaacaagggatgccgcgcattgcgcagcaccagccggtcgtccgtcgaaacgatcggcttcaccgctccgttggcaacggcccagcgggctttggcacggatcatatccagatccgaaagatagtcgccaatcagcgcgatccgatccgcttcggggcgaatcgagtcggtgaaggccgagaggatccgcacgatctcgcgccgctcggcgtactccagctccttgagttcgttattgatttcgacgacctcgaccggctcgacgtagaaggtcttgcccgtggccgattcgtcgtggatgaaaccctgcaacttgcgtttattggccgctgcgaccggaatcaccgcccggccgtcgcggatcgagagcatcgcgtcggcctccacgataccggctttcttggcattcgacaacacctgctgcaggcgtttggcggcctgcccctcccgctcgcggatcatccgccggatctgctgcaactccggcgaagcgtcgtcccggatcttgccgtactgatcgacgataccgtcgatcgcccgaacgatctccgggaaagcctcgatcccccggctgcggagccgcagttcgggatatagctcctcaccgcgccccaggataaaaccggcgatcgcccccgccgaagccagcgcccggcgcagcaacacgacctcctcgacttcgaggaaactgccttcgatcttcagtttggaaaggatataatcgacatcgacgaactcgtcgtccggaaagtcccgttccatctccagcagacggcgcatctcgtccgccagcgccagccgccgctcgacatcggcctgcgaagtgctgaattgttcggcgcacaacctttcccggccgccgcgaatcgtacacagcgccgcgacctgctcacgcagccggtcgaaaccgactttctgttcaaagttcgccggatagatcatcgcacagagaaaacattcgaaactatcgggccgctttcagggccttgagcgaatcgcgccgggcatgtttcgcctcttttttctgctgcttgcggtcggccttttcgggatcgcggccgaacagcgagaaatggacgtaacgagcaggatgggcctgcaagttggccagcagcgacgccaagttcgcagtcgcctcgttgagcgattcgtacagacggggatcgctgacgagctgcccgacagtcccctccccggcattgacacgggccaagatcgcattgaggttcatcagagtcgaatcgagcgccccggccagattctcacgctgtatttggtcggtaaaattgcttaaattcaggataatactgtccatacgcggagagttctcgccgagcatctccgaaaaacgggtcaaattcgctacggcgctctccagattcgcacgctgcgacagcaacataccgtttacgctgcccgtaatcgaattcaggtgcgacatcgtaccttcgatattcgcggcgttctgctccataatcagattcaggttatccatcgtgcggctcaaatcccccacgacctgcgacatcttctgcttgaaaaattcgagttccgaacccgccatatccatcaggcccttgctgcggctcgaacagagggtgtccccggattgcaggtaggtcccggcatcgcccagagcgatttcgatcgctttggcgcccatgatgctgttgctgtagatccgggcttcggaattggacggaatccggtatttccgctggatcgtcagttgaagtacgacctcgttaccgatcgaaggatcgaacgaaatatccgtcacggctcccaccttcacgccccggatcagaatcggcgaagcgttctgcacgccatcgacctggtcgtaagcggcataatagaccgcgttgcgactgaagatgtcgaaccccttcagaaagcggatacccgcccagagggcgccgatcatcagcacggcgaaaatgccgatcttaacttctcttctcatatacctgtttttttcgttttatttactgtacgatccggtcgccccgacaactcaccacgaacgcatcgcggaactccctgcgcacctcggccaacttggcttcggcctgcttgcgggtatcgaaacgccccacacaatacttatacctgaaccggccgccggtaacgaactccgtgacttttccccggtaacttttgaactgccggtccttgggcggcacgcgcttggcgctggcgatcaactgcacggcataaaacgtcttctcctgtttggctttcccggttttgacactacccttatccgctttgtccgaagcggcagccggagccggctccgcgacatcggcatcggcctgttcgtaaatagcatcgtcatcgacaagcagcgtaccccgtacgaaagcgacgtaatccttcaccgcatcgcacagcgcacgtgcgatttgagcctgccccttcgccgaattcatataagcgtactcctccgaattggaaaggaaacctatctcggtcaggataccgggcatatcggtagcgtagagcactttgagcggctgtcgcttcacaccgcgattgtgccgcccggacttgacgtaatgtttctgcaccagacgggccatcgcttcgctgtattcaccataggtgaactgcaggttctggatataagcccgaacgatcgccgccgtcttctcgttcgacatatcgagcagctcctcctggttgttataatagagggcccgctcgttggcgttcttctccagcggactctcacccataatcagggtctcgactccccgtgccgacgccgatgccgcagcattggtatggatcgaaatgaacaggtcgccgcccgccttgttggcgatatcggcccgagcctgcaaatcctgggtcagactttcggaaaactgcttgtccgtcttacgcgtgtaaaccactttcaactgggggatctccttctcgatcaaggccccgagcttcagagcgatctgaaggttgagatctttctcataaacgcctctgtaatgagctcccggaaacttcggccccccgtgcccggcatcgattacgacgacccgcacgccctgtgcaatattctgcgcggcaactccgttgaaagagagtgtcgcaatcaaaaacagggcaacaagaaaaagcgatttccgcatagcaaaagtggctgaaaatttaacggttctgaattttttacctatatttgccggatgttaaaacccccgcactgaggccttcggagccattttcgggcggttttgccgactcgtcggcaaaggtatgattttttttggaattttggacaggctaaaggcaaaatatatcttctcgggagcactcctgctgctcttcctgcttccggtgctcggcatggcgctgccgggcggagtgcagcatcccgcgacacccgaacgccaaacaccgcccgacagcactccgacgcaagccgtacaaaaatcccgccgcgaaacccgccgggagattcggcgccttcaacgggaagccgaccgccccccgaccgccgaaacacgtacggaagaggagcaggattcgcttttcgacaccaggatcgactcgatcttcggagcgcctcccctctcgccgatcgcccccgccgacagtacggctcccaccggcaacgactcgctgctgcgcgattcgttgcgtcaggacacgacccagcgcgatacgacccggaaaaaatctttcctggacgacatcatcagcggcaaaaaccaggactcgctctactacgacgtacgcaaccgcacggtctatatctacaaccagggtgatatcaactaccagaacatgaatctcaagggagatttcatgcgggtcaatatggacgaaaagatcatctacgcccacggcaagcgcgacacgatagacggcaaaccgacagttaccaaccccactttcaccgaaggagccgccaatccctacacgatggacacgatcacctacaacatcggcagcaaaaaggcgaaaatcaaaggcgtggcgactcaggagggcgacggctggctgatcggcaacaacgtcaaaaagatggacgacaacaccatccacatccaggacggcaaatacaccacctgcgaccagacggaccacccccacttctacctggcgatgaccaaggcgaaggtgattcccggcaagaaagtggtcacgggtcccgcctacctggtcctggaagacgttcccatctactttccgctgctgcccgagggtttcttcccgctcagttccggccccaagtcgggtctgctgatgccgactttcggcgaggaatcgaccaagggattctacatccgtgacctgggctactacttcacgctcggagagcacatggacctggccatccggggcggtatctacaccctcggatcgtgggaggcatccgcgatgtcgcgctatatgaagcgttacaagtacaacggcaccctgaatttcaactactcgaacgtccgtgtcggcgacaagggcgaacccgacttcctccagcagaacaacttccagctctactggcagcatacgcaagaccccaaagccaatccgggatcgaccttctccgcatcggtcgatttccgtaccagcggctacaaccgctattcggctaccagcctgaacgaagcgctccagacgcagacaagttcgacgatctcctattcgaaaagctggctcggcacaccgttctccctttcggccaacatgtccgtttcgcagaactcgcagagcggaacgctctcgatcgccctgccgaacgtcgtcttcaacgtttcgaccttctaccccttcaaacgcaaggaggcgatgggcaagcagcgatggtacgaaaagatttcgctccgctacaccggcaagttcaacaacaaggccaacgccaaagagtccgaaatcttcaccaaggaaacactccagaacatgcagtacggcttcgagcatagcattcccatctcggcgacgtacaacatcttcaactatatcaacttcggacctacgatcaactacaccgaaaagtggtatttcaaaaaacaggagcaggtttggaacccggtgctgaaccgcatcgacaaactcgacccggagtacgggttctaccgtctgtacaactacaacttcagcctgcaggcctcgacgatcatctatggccgctacgaggccaagaagaaaacgcgcaagatacaggcgatccgccacacgatcaccccgacggtgagcttctcctacgcccccgacttctccaagcagaaatacggctacgtaaagaccgtgcagagcgatacgctgggtaatttcaagacctactcgcctttcgaagggagcatcttcggcgtgcccagctccggtcagtccatggccatcaacgcctcgctctcgcagacgctcgaaatgaaggtgctcagcaaacgcgatacctcgggtatgaagaagatcaaactgatcgacgaactccgcatcggacaggtatcctataacttcctggccgactccatgggactttcgaacatccccatttcgctgcgcacgaccgttttccagaatttcggcatcaatatcaacgctacgctcgacccttaccgggtcaccccgcagggccagcgtatcaacaaactctttttcccgggccgtgtggtatcggccagcacttcgttcggctatacgttccaatcccgccaggacaactccaccccggcgatcaacgacatcaacagcgccccggtcgatccggcctacgccaatcctttctacgacccttacgggcaaatgaacccggccctgcgacggcaatacatgacccaggcctactacgacttctcgctaccctggaacctgggattcaactatacgatcagctactccgcatcaccgaccaacaacggcacgacgggctaccagaaaaacatcacccaaacgctcggcatcaacggcagcgttacgattctgccaaaaatgggtgtaacaatccagggcggttacgacttccaggccaaggagctgactccggcctccatcaccattacacgcgacctgcattgctggcaaatgtcgttcgcgtgggtccccttcggccactatcagagctggagtttcaacatcggcgtcaaagcggcttccctcgccgacctgaaatacgacaaaagccagagcatgttcgacaatttatactaaatttcggacgctttcacgcataatccgcatcgaaatatgaagattcgatgaattttggattctttcttgttccttaattgaatattgtctatatttgtggtagcccataaccaggacacgatgtaaaaactctcaaacataatacctctatgattatgaaaaaacactacgaatctacggttaaggggggggggaacttcgtactccgctccttcggttgagatcctcagcatctcgatcgagaaaggttttgccaacagcactgtcctggactatggcggagccggcgaagcaggcggcagcgttaatgacaccgattacggagaatactaacaaacacatcctacgactatgaaaacttttttcaaatccattttggctgtcgcagtgtgtgcatctctgttcgtagcctgttccaaagacgacacggtttccgacccgtcgaacggtcgtaaagtaacgatgacggtcaccgcatcgtctgaactcgaatcggcatccggttcccgtacgacgtatgatcccctgacggggaaaatctcgtggaacgaaaccggcgaataccttcaggtgttcgaaacggccgcctccaaaaccacatacgccaactcgcaggaaggtacggtaagcgacgacacggcgaaattcgccgtatcgttcccggagaatacgaacactccgctcgtttataacgcggtttatcccgcctcggcatgggttacctccagcaatacggacatcaccaacatgaaggtcatcactcccacagtccagcagccgaccgctacgagtttcgattcgaacgcggacctgctgatcgccaaatcgatctcgctggagagtcagccgaccgaactgcaaatgagtttcggccgtgccgttgccatcggtaagatgacggtcaaaaacctcgcatcggaggagcctgtccttggcgtcgaattcacggctccagataagaaggtcacgggccgtagctatgtcgatatgacggcaggcaccgtcaaggagtacggttatcccggtaatttctcggacaacgtgacgctgagctactcttcggagatgaaccttaaggccaacggcgcaacgggcatgaccgcctatttcacctgcttcccgttcgaggtggcagccggtgaaacattcaccgttaccgtgaccaccgcatcgaagatcttcaccaagacggtaaccgttcaggagggccggcccctggctttcgcagcgggcgacagttcgactttcgcggtcgatatgaccggcgctgcggaagaggagaacgaaacattgagcggcgactacgtcatcacggcgacccaatccgaaacaacctatgcaatgagttctttagctgaaagctcccgtttggctcccgtagtgattacgccgtctaatccctacaaaaccggggacgaaaccctcatttggacaattaccaaatcgggtgacaactacacgatcagtcaaggcgagaactacctctcctgggaaagcggcaacagcgctacgacctctacgactccttatgaactggtaattaccaagaacaagtccgaaggcacttaccaaatcgcatcggcagcgaccccttcccgtattttggcgaaaaacacgcaggcaacttacggttttggattctataccggttcccagacaaaagatctgactctgatccctgccgaatacgtcaagttgcctgaaatcacattggatccgtccaccctgacactgtcttataacgatacggaaacacactacatccccgttacgttgaagaatgccgaaacgcaagacgtttccgtcgctatttacgacggcactgaaggaaccgaacagccggactggatcaccacaagtgattacaacggcggcgaaaatcgcctcgaagtcgcagccacagagaatacggtcgcaacacctcgtacagcacgcatcgttcttaccgccactacttcactgggtacagccaacgcgacattgctcattacccagaacagcaagccggaaggcggtgtcggagaaacttggacctacaccttcgaaagcgcggataaagacaagatcgctgccggcttaacagtaaacggactgacatggactgcaagcaaagcgcccactgcattcgataccaatagcgggatacgcggtctttcctggtcgaaacccagcggtgtcaccataaaaacgtccgattataccggaggaatcaaaaaaatcacgttggttatgtcggcaaatacggcaaacttaagtaccgtgaatgcaaccgtcggtggacaagcactcggcgaaacgatctccttggcaaaaacgaataaccagaagtatgtcgtcgaatcggaaactccgctgtccggcgagatcgtccttacgttaaacaccgaatcgggcggcaagtcgttgatgattaaaaccatcacgatcaactgaaactcgggagaagggggaggcgataatccttccccagaccctaccccgggaattgccacaccgagcgtaagcgacataacttcgagcacagcgaaggtttccagtagtctgaccgacgccgcttacgcaaccgaggtgcagttcttctattccgcaacgaacggcagcgacacgggaagtgtcgttgccttcgtttccggaaacgaagcgaccgccaacctctccgatcttctgcccgcaacgacgtacacggtttacggcgtcgtaacggcgaccaacggctccacgccgcagagttcttcgacaacctttaccaccgaaggagcacggacgaatcatgccgcctggtacgagcttccggcccgcacgacagccgatgagacgatcacgcagacggtttatcccgcctccggatcgcagcgcaactacacgatgtactacgacaaatcgacctacacggcttactgggtagcctatccgctcgcaaaaggacacatgggaaacggacgttccgacaaatggcagcgcaatcccggactggccgaatccgaacagatcaacgtctggtcgagcagctacggggtcaatctcggagctaccacatcggacggatatgacagttcgaaagagttctacgcccgggggcaccagatacccaacgccgaccgcaacggttcggacgaattggtcgtacagacctattacgcaaccaattccacgccgcagattcagaacaaattcaacggcggtatttggcagcagctcgaaagcggcgtccgaaatatcgctgcgactacggacacggtatatgtggtgacgggcgctattctccagaccgcaggcaaccacgaagcgatcacctggatcacaccgaagtcggacagcaaacgatgccccgtaccgaactattactacaaagcgttgttgaaagtccggcgcgacgcgtcgaacaaagtgacgtcggccatgacgatcggtttctggatggaacacagggagtactcgaacgatagctacacgaactatgcgacttccgtcgccgagatcgaacggctcaccggcttcgatttcttcgccaacctgcctgccgacattcaggccgcagcggagcaaaattcgaactggaacacattcgcatcgttctaaacgggcgaaaagatctccgacacgacaaaacgacacgcatcgaatagaatgatgcgtgtcgttttgcattatccatacatccgaacggcttattcttccgaaaaataattatctttacgaatcggaaaatcgccgaatccgaaaaccgacactcgaagcggatgcaacgaagaggcgggaatattccgccgcctccaaaggaggcaaaccgcaaatatccgatcgacgaggcccgcgactgcccgcgaggtcccaccgaacgcagaaaacgaaaaaaacacaaagtcaaagcccggttctccgtccattttccgcgatccggctccgttatgctacgactcaagtccgaaaacctccggtcgaaactccggcgcatgcccctgctccgcgcattgccgccgctcgcggccggcatcctgctggccgaccactacgtactgccgctgtggttattagtaggcggattcctcgtctgcggtatcctggcactgctcgccgacgaccggggcgcaaacctcgccaccctgggagccattctgcttttcggcatgaccgtcaccgaactgagacacactcccgctccgccgaccggcactccgggcgaatacgaaatcatcgtccgggaacgcctctccgaacgggaaggcaaaacggcctccggcacaacgatccgcgcccggcggaactccgcaaccggagaatggctccccgccgccggaaacctcgtggtgcgatgcgactcttcgaccgcactgaatcccggcgaccgagccgtcgtacgcggcaaaatctaccctttcaccgcccgtcacggcggctacggacggctgatgacccgccggggatacgtcggcaccctctacctgaaccgctcaagcctgctgctgagcgacaccctgcaccgggagctttccccgaagcacctctccctgttcctgcacgaacgggccgtcgcacggctcgaccgtctggccctggcacccgacgaacaggccctctgcaacgctatgacggccggggatcgacgctcgctttcccctgcactccgtgcggcctactcgcgcagcgggacctcgcacctgctcgccgtctcgggattgcacgtgggcatcgtctttctgctcgccaacctgctgctctggtggctgccgctcttccgacacggacacatcctgcgcaatatcgcggtcatcctgctcatctggctctatgccgccacgacgggattcccgcccagcgtcgtccgggccgcgctgatgttctccgtcctgcaattcgccctggcctcgtcgtcggaatacgtcgggatgaacacactcgccggcgtagccttcgtcatgctgctcttccatcccgattacctgttcgacatcagcttccaactctcgttcatcgccgtcgccggcatcatcgcctggggactccccctctgccgcctcctgcgaacacgccgcaaaagcatcgatatgctgaccgcaaccctcgccatcggattttcagcgtccgctgcgactgcacctcttatctcccataccttcggccagatctcggtcgtcggactggcactcaaccccgtcgtcatcctgctctcctacgtcgtggtcgggagctgcacgctctggctcgtgatcccgggaacggcgctcgcaccgctcttctcggtcgtcgcaggattcgcagcccgggcacagaacgaactgatccgagctgcagcggcacttccggcagccgccctcgacatccggctcacgacgacccaatgctggagtgtttacggacttttcatcttcgcaaccctactcctatggagcgccgaacggaaaaaatcggtatcttcgctcccggaatgatgactccggaacaataccgactgctactgactcccgaagtgcggcataccgtcgaggaacaaatcggccgcgaccctgcggcgatcgccctcgacaagcgtattccgcatgcggcactcgtcgccacgcaggtcaaatacctcgcacgggcacggacaaaactcccctcctactacgaagcccgctgcatcctcccgccgctggctttcgaacaggcctcgagcgaggcgtgcgcggcccgcaagagttgcagcggggaacgggtgctcgaccttacctgcggactgggcgtcgatgccctctacctctcgaaacgcttccgcgaagtcatcaccctcgaacgggatgcgacgctggcggccgtcgccggagagaatttccggcggctgggcgcaacgaacatacgggttatcaactcctccgccgaggcgttcctcgcctcgacccgggaccacttcgactggatctacgccgaccccgaccgacgcagcgccgaagggcgcaagctggtgcggctggaggattgttctcccgacataccgaagctgctaccggaactccgtcgcatcgccccgaacctctgcgtcaagaactccccgctgttcgacgtcggcgaaacattccggctcttcggtccctgccgcacggaagtggtgtccctgcacgacgaatgcaaggaagtcgtcgtctataccgacggaaccggccccctgctgacggccgttgcgctcgaactgggagaattttcctgcacgccggccgaagcccgtgcaactccctgcgacaagcccttcgatccggccgcttaccgctggctgctgatccccgacgtagcgcttcaaaaagcccggctgacgccgacctacctgcaaggccacgccgacatctggagcccgaacggttacggattcgcagcggaaaagtccgaagacacattgggccgctggctggagatcgaacggatcgagccctacaaccccaagcaactgaaacgggagctttccggcagccggctgacgattctgaaacaggatttcccgctcacggcggctgaaatcgccgcacggctcggcatacgcgaaggcggcgagcgacggatcgccttcacgaaactcgggcaggattattggacaatccgtctaaaatagctacctttgagaaacgtcccgaaatgaaagtcaagaacgtcttcacctacttcacggacacgatcctgcggcgcaacgcaaactcctaccgcaatccccgcgtccggtgggccgtcagacagtacaagctgctgttctacacggcacgcggcctgatcgcccacgatacgatcgtgcgcagcgccgccctgacgttctatacgctcatctcgatcgtcccgatcctggcgctggtattcgccgtagtcaagggattcgggcttctggacggcctgatcgacgatctctacgcccttttcccgcaaaacgtcgaagtattggactacatggtggaattcgcccgcaaagccctcgccaatacgcagggcgggcttatcgccctggtcagcgtcgtaacccttttctgggccgtcatccgggttttcgggtcggtggagagcgctttcaacaacatctgggaggttcagtcctcgcgcaatatcgcccgccaatacctcaactacatcgtcatcgcgatggtcgccccgatcctctggctcgtggccagcacgatgggaggttatctgctccggttcttcgacgcggggaatacgttcctcggcatccttctttcgaaactttcggccctggtcatcatctggggcagcttcaccctgatctatgccgtcgtgcccaatacgaaagtcttgtggcgcagcgctttcatggcgggtatcgtcgcaggaacggtcttcatgctctttcagtggggctacctctatctgcaaggatggatgacctcctacaacgcgatttacggcagtttcgcagccctgccgctcttcctgttatggctgcaaatctcgtgggaaatcctgctcttcggcggcgaactctcgttcgcctaccagaatatcgaccgtttcgccgaagagcgcgaatcgctcggcatcagcaacgaccgacgacgccggatcatcctggccgtcatgctccaggtcgtacaccgctttcgggaaaacgaaggggcgctcccggtcgatgaactccgccgccgactctcgctgcccacccgcatcgtgaacgatgtcctgcaccagctcgtgcgcacgggcctgctgatcgaaatccggaatccggacgacgaccgcgaagtggctttcgcccccggacgggacatccacgaaatgacgctctacaacattttcagaaccatcgacaattacagttcgacacgcctctacttcgccgcgaccgaagaaacgcgccgaatagaccgcgcgctcgacgagcttcagacggcctgccgtacagcgggcgaccggcttcggctcatcgacctggacgacgcagtgaacgccgcccgcaaaccggcttccgggccgcagcccgaatcgaaacactcggaaagatgaaaaatatcgtcctcataggcagcggcaacctggccgaagcgctcgcccgcgcgataagccgcacggaaggagcaacattgctccagatcttcgcccgcaacgcgaaacgaggtacagcactcgccctcgaaaacggcaccgcgtggagctccgatccgcgcgagctggccgccgcagacctctacatcctggccgtcagcgatgcggcgatcaccacgctggccgaaagcctgcccatacccgccgaagccgctgtggtacatacggccggaggcatcggaatagaggctcttcccgcacgcttcgaccgtcggggcgttctctatcccctgcaaacctttacccaaggccgcagcgtggattttgccaaaatacctcttttcgtcgaaggaaacgacgactccttcacctcggagctcgaagcgttcgcccgcaatctgagccgcacggtatatcgtgccgactccgaccgtcgcgtacgccttcacctggccgcggttttcgcctgcaatttcgtcaatcacctctacgcattgggaggcgagattttgcacgggaccgaactgcccttcgacgtactgaaacccctgatcgccgaaaccgcagccaaagccgtcgattcgggcgatccgcatcgggtgcagaccgggcctgccgtacgcggcgacctgccgacgttgcggcggcacgaagccgcactcgctcacgatccgcgactgttacgaatttatgaatcattaagtcaagatatatgggaaacttcaaagaagacatcgtaaagaccgaagcgttcattttcgacgtggacggcgtaatgaccgacgggggaatcatgcccctggtcgatggggatttcatccgaaaatactatgccaaggacggctatgccatcgtctatgcgctccgtatgggttacaaagtgtgcatcatcacgggcggacggggcgcaacgctcgaccaccggctcaaaatgctgggaatcacagatgtttacctggactgcatggacaaaatatcggccatgcaggatttcttcgcacgccacggactcgatccggcgaacgttatctacatgggcgacgacatcccggacctggagtgtatgaaagcagtcggaatccccgtctgtccctcggatgccgcgtccgaggtgatcgaagcctcgcgctacgtttcggagttcgcgggcgggcacggctgcgtgcgcgacatcatcgaacaggtactccgcgccaggggcgactgggcccgcgattcccggggcatgcacagctcgaatatcgccgcgtcgcggtaaaaccaaaaagcaacgaaaggggctgtctaaaactgttagacagcccctttttcatttttcagaaacagcaggaattaaccacaatcgaaccctcttcctccgggaaacagttcccgtgatcggacacattcctcggttccaagaatttatttttactcaagtccaaagaggacaaccggttattgcaacaatacagctttctcaaaatcggatttcccgaaagatccaacgtagtcaattggttgtcattacaccacaacgtttccaacaccgaattatgcgacacatccaacgtagtaagcaaattttcaccacacgacagccaatttaacgaccggttgtgggatacatctaacgaggagagcgagttcctgtcgcacgaaatccatgtcagagccttgcaacgagatacgtccagtcggctcaatttattcatgggacaatccaattccttcaaattcggaacagcgccgagattcagacgctccaattcatttctactgcaattcaaatatatcaaatcccggttccgactgacatccaaggttttcagccaacagcccgagcattccaacgtgtcgagtttggtatttttactaacatccagggtttccaaacggttctttttgacaaaaccatttccgcacataagttttttcagttccaaattatgcgacacatccaaactcgacagactgttttccgtgcacaccaactctttcaacaggggattaccagtcacatccaacgctttcaacgagcgattaaatgcacaatgcaaaacagtcagcttcggattccgatccgtttccaatgccaccagctcattcaacatgcaccgtaactccattagcaccgaattatggcttacatccaaggatttaagacaatttcccgaacaatccaactttaccaaacgaggattctgcgtcaaatccaacgtcgatatcatattcatacagcaattcaactcctccaacagcgggaaatactcgattcctgctaaggaagcgataccccgcctcgaacaatctatcttcgtcgcagcccgaccggcaggtgttactacgacccggctcccgttttcgccgatctcttcgatatacccctgttccaaaagataagcccggaaattgggatcgggaatcatgtattgcagatacgccgggcgaacaatcgtatccgccgcacggtatatccgaccttttttcaatcttacggggaatttgccaccgcattgaatcctgaacatattcccgctgtcacgatccgtcacgaccgttaacgaataccctcggcgaaactccacaggcagtacaggcagataaaaagaggtcgattcttccgtcagctccacccccgatccgcaatccaatacgacgcaaggactgactttcctctcttcgcacacactgtcgggcagctcctgcctactggctaccaccttgatcgatcctgccagaatttcaccgtcgtttccctgcaaaataacttgtttcaccttaatcggttcgagagcgaagctgtctttcctcaatcgcaactccacagcggagaacatattttcgaaatcgagtgtcatttcagccagatttccccggtaccggccgagcataggcacgctccggcaccccttctcatcatactgcgccacaccgaccggaagaaaaaaactcccgtcctcttgtaacgcaaatccatacggtcgccaagctacgaccgaaacaggatcctcgatccgctctttcggccacatctctttcatcaaatcctccgtcgaataggttattcgaccgtcagcagcctgcatagcaaacaccggcctcgatgtgaaagacgatttaataaagtccaaatagctattatcctgaattaagaagccgattccatcctcttcgttccatacgaacttctcgaccgcaccatcgatgccgatcgtatccaaggcgatacatccggcctgatcgtttcccgatgtgttcgacactccattcgtcttcgtcgtcgaagctccggagcatgcctgcagcaaaaaacagataaaaaaagacactaccaatcttgtacgcatacaaacttctcttttctctataaaattacaatttttcgagaaattccgcatccataaacaaaaaaattacaccgaaaaggcgtaattttatcaaaataagacatccgacccgggaaaatccggctcgactacacttcccatcttttcccgatacgcgagagatgctcctgcaggcggaggcggaaatgttcccggcgctgcttgaggttttcacgccacccctgccaacgcatataacgctgttttttctcgggataaatgtccggaatggtcagcagaatacccgtctcctccacaccgccgaaatcggtgttgattaccgtatcgaacacccgcatcgtaggcgagagattcatataggcattgatcagcggaggaatgttctcgttgaactcgcggatgcgctggatcaggatacggtaattctcctcataggtcttgcccgtgaaaaaatgctcgtaatagggatcgtccaaatcgagctgcacgggatttttacccgccaccagatgatcgggatcgggaaaataacggcgcaggaaccagatcagggcattgcgtgccatagccttgtacgaagcgtacatcgtcaccttgccgaaaaggtatttcaccttgggattcagcaccacaagcgcccccaaaccgtcccagaggttgtccagcgcatagatactcttcgaattgccgcgcgactgataggaaggctgtacgaacgaacgccccagttcgatggtatagggcaggtattccttgcggaatttgtcgctgaaggtgaaataatgttcagtggaaagatgccggggattttccgacgtgcagacgataaagcgataaccgcccacgatctcctgctccgcagggtcccagacgatcaactggtaataaccgtcgccggcgagatcctcctcgtctatatccacggcgagccccgttccgccccccgccgaccggaaggcgacctcccgcaggcgtccgatctcccgcagcagggacgggcattcggcggcatcgaaaatatagatttcattcgaagccttgttcgtatttcggaccttgcgttcaggggtcaattccgcgagcaacagacttcggcttacaggctctatgatgggttccatgctgttaaatttagagcaaaactaaacaatttatccgtgttttgcttcggcacgcaactttttttccaaagaatacgccttttcgcgtacgtaatccgcccgctgctgccacgatccgcattcgaccagctcgtccgtcgaaacaggctccccgaccagtatccggaaatgttttcccttctgcgaaaacatctcgtcgggcagatagagcatctcgatattgaaccggatacctatcttcctccgaaaattggaaaggcggtaaaagaaatcggatagttcgccctcgacgaaaaccggcacgatccggcgcccggacgccgccgcccgcttgacgaaattcgaacgccacggcaaatcggacaccaccccctgccgacggcgcgaacaaagcccggccgggaaggtcagaatcggacagtcgcttgcgaaagcttcgtcgaacctgcgcaggtattccccgcattgcgaaccgtgcttgttcaccggaatccagagcggtcgcagcggctcgacgtgcatcagcaaatcgttcacgatcacccgcgcatcgccgaaatatccgaccagctcgtcggccagcatcataccgtccattcccccgaaaggatggttcgacgcaaagagataccgtcccttcggatcgagattttcgagcccttcgaccgaataggtcactccccagaacttaaaacaagcctggataaactgctgaggaggaagcgcggaatactcatccagaatatagttgatttcgtcctgatggatcgtgcgcttgagccagcggataacgaatcccggcacccatcgggcgatccggggagcctttgccgcaagcacggcatcgacatctattttcggcataacgtaacccttttaattatcggtcgaaagtcgtacgacgcccgatttgcacctatcgcacctacgctcggatttccaatcgaaactccgcatcggtacagggagatcccggaagcgggacaccccggccttccggagtacgaccgttctcaaccgttttttcttcggtaaagataacgatttttccctgcaaattgtctaactttacaccctaaatatatatcgaagccaaatgacctccgtctatcatacgcccgtcctgctcgaagagtccgtccgactgctcgacatcgatcctgcaggaacctatgtcgatctcaccttcggcggtggcggacattcgcgccgcatcctgtcggcactgggcgaccggggacgtctttacgccttcgatcaggatcgggatacccgggacaactgcccggaagacagccgcttccattacgtcgaaagcaacttccgcttcatgcggggcgccctgcggctgcacggagtaacccgggtcgatggtatcctggccgacctgggcgtgtcgtcccaccatttcgatgccgtcgaacggggattctcgttccggggttcagcaccgctcgacatgcggatgaatcagcgcggaggaggcacggcggccgacctggtgaacacgctcgacgccgacgccctgacccgcatcctgggcgattggggcgaaatcgacaccccctggaaagtcgccgcctgcatcgtccgcgcacggaccgcgcagccgatcctgaccaccgcagacctggttgcggccgtagcgccctgtaccccgaaaaaggacgaatcgaaattcctgaccaagctgttccaggccctgcgcatcgaagtaaacggagaaatggaagcgctcaaaatggcgctggaacagagcctcaaggtgctgcgccccggcggacggctggtagtgatctcctaccactcgctcgaagaccggctggtgaagaacttcctgcgcagcggcaatttcgaggggcgcatcgaaaaggatttcttcggcaagcccgaaacgccgttcgaaatcattacgcgcaaggccgtcactccctcctcggaagagctcgtccgcaacccgcgttcgcgctcggccaaactgcgagccgctgccaaaatcgtacgccaataaccgtttccgaccgacatgaaatacaacgaccacgaattcgaccccgtcaccgacgaggagcgtgccgcccgggagcgggaggaagagctcgcccgccgcatccggcgcgaagtgctgcgcgtgcagagcggcgaagccgacgaggaaattcgtgccgaccgggagcgggagcaggccgaagaggaggcccggcaggaggagcagcgcaaggaggagcgccgccgctcgaacatcttctggctcctcttttcgggcaatattctggttcggaaaggagcctcggaatactatcgttacatgatttgcatcgccgcgatgtttttcgtcagcatcttcgtaatgttcacggcgctgcacctcgacatgaaatactcgcggctttaccgcgaggtccagatgctgcgcgagcgctcgacgcgccttcaggagcagcgtttccgccatacgacccactcggccatcctcgaagagctgcgccgacggggcatcgacttgtacgacccggtcgttccgggtgaaattctcgacgactgatgagcaagatgaaaccggaaaaatcgcgcatcaaaagcgacatcctgctgcgggtgaggttgctctacatcctcttcatcctggcgggactgctcatcttcgcacgtctggtatgggtgcagctcttcagctcggaggtcgcctacaatgccgaacggctcgccggacgcatcttcaccgaacagatcatcccggcccagcggggcaacatcctcacgcgggacggagatccgctggccacctcgatcttccgctaccgcgtcgaattcgatttcggcagcccggggctcgactccgtgcgtacgttccacgaacagagcgactcgctgtccaaactacttgccgcctatttcggcgacagatccgcagccgaataccgtcgcatgttccgcacgcagcatgccaaacactaccaggtaaaataccgcaaggacaccctcgttccccgctccgaaggacgcatcgcccgctggatcgaccggattttggaccgggaattcgtgccgaaaaaactctacgataccctgcgcgaccacactcccgtccaaatctttccccgcgacatcgactacaccgaatgggaaaccctgcgcaaatacccgctcctgaactggaacatgggcatggtttacaacctgcgtgaaagcgacgaacgcatctatccgcagggcgaactggggcgccgcacgatcggactgaccggcgaccgaggcaactacggcatcgaggccgtctatcgcgaagagttggccggccgcgacggtcgggccacgcgccaacgcatcgcccggggtttttacggccgcgtcgtggacggcgacaacatcgacccgatcgacggactggacgtggtcacgacgctcgatctcgatgtgcaggacgtggcgaaccgttacctgcgcgaacagctcgaagcccagaacgccatctggggtaccacgatcgtgatggaggtccgcacgggcgaaatcctcgccctcgtgaatctgggccgcacccccggcggcggatacgccgagcgggagaactacgccatcgggcgtaacacggagccgggctcgaccttcaagctggcttcgatgctgctgttgctggacgacgcggatatgccgctggaccagacctacgacacgggcaacggacgtgtggtgaaggtcggcggcatccgggtgcaggattcgcacgccggattcaacgacatggatttccgcacggcggtcgcccagtcgtcgaacgtctatttcgccaaggcgatctgggagcgttatgccgacaacaaggagcgttacagcgacttcatgaaaaagctgcacctcgaccaaaccgtcggactggaggctttcggcgagaaaaaaccgctctttcaggattggaaggaggtgcccgaccccaacagtatgctcgtacgccgctcgttcggctatcgtatcaaactctccccgatccaggtcatcaccctctacaacaccattgccaacgacggcaaaatgatctctccgatcctggttcgggagctgcgccggggcgacgacgtggtcgaacatttcaaggcccgaacgctcgtggacaagatatgctccgaacgcacgctgcgcgaggtccgcaaacttctcgaaagcgtcggcacggaaggtacgggtgctggatttttccgcgacacgaccctctacaccgtagcggccaagaccggtacggcccaatacgccgacgacaagatcggctaccgcgacggctactacatcggcagcatggtcgcctacttcccggctcacaacccccgctacacggtgctcacgacgatccacaccaaacggcaggccggcaaatcctattacggcggcccgctctcgggtccggtggtcaagaaggtcgtcacctacctctacaaccgggagcacgactgggatctctcgccggaaaattcaggggaaaaacactatccccggcgaatcaaaggcggcgacatcgcccaaatccgccgcatcgccgacaaattctcgccccgcacctcgttcgaagaccgcaaaggctggggaacggtacggatcgactccctctcgaacgtcacgatctcgacgctcgcacaggacgaccaaacgatgcccaacgtcgtaggcatgggactcaaagacgccctgttcctgctcgaaagccggggcctcagagtttccttctcgggacgaggctccgtccaataccaaagcatcgctcccggcacgcggatctcgcgcgggggagccgtaaccataacactcaaataaagagatgaaacaaattcaagaattaatcaaggcgacacaggtgctccgcgtggaaggcaactccgatacacgtgtgagcagactggcgtatgactcccgccgcatcgctcccggggactgcttcttcgccgtgagcggcacccaaagcgacgggcacgcctacatcgacgcggccgtcgccgccggagcggtcgccgttgtctgccagcggctgcccgaacacctcaccccgtcggtctgctacgtcgtcgtagcggataccaacgccgcgatggccgacatggccgccgcattctacggcgacccgagccgtcagctcaaactggtcggtatcacgggcaccaacggcaaaaccaccaccgtcaccctgctctacgacctcttccgggggttgggctacaaggtcggcctgatctcgacggtcgtttactgcatcgacaccgaacgcatcgaatcgacccacaccacccccgacgccatccgcctgaacgagatgatggcccgcatggtcgaagccgggtgcgaatactgcttcatggaggtctcctcgcacgccatcgtgcaggagcgcatccgaggactgcatttcacgggcggcatcttctcgaacatcacccacgaccacctggactaccacaagactttcgccgagtacatccgcgccaagaaactcttcttcgacaatctcccgaaggaggctttcgcgctggtgaacatcgacgaccgcaacggccgggtcatggtgcaaaacacgcgggcgacggtcaagaccctgtcgctgcaatcgatggccgacttccgatgcaaaattctcgagacgcaccccgacggcatggaactgcgcatcgacggacgcgaagtatgggtccatttcctcggccgcttcaacgcctacaacctgctgagcgtctatgctgcggccctgctgctgggcgccgaccgcgaagaggtgctccaaatcatgagcacgctgcatcccgtaagcggacgcttcgaattcgtacgggccgccgacggcaccacggcgatcgtcgattacgcccatacgcccgacgctctggaaaaagtgctccagaccgtcgaggagatccgccgcccgggacaacagctcttcgtgctgtgcggctgcggcggcgaccgggacaagaccaaacgccccgaaatggcgcagatcgccgtaaaatacgcgaccaccgcaatcctcacttcggacaacccccgccacgaagatcccgacgcgatcctcgacgacatggtcgcaggactcgccccgggtgaccgctacctgcggatcgccgaccgcgccgaagccatccgcacggccgcgatgctcgccaagccgggcgacatcctcctgctggccggcaagggacacgaaacgtatcagatcgtcggcgacgtaaaaaaccatttcgacgacaaggaggaggctctccgtgccttcgccctctacgctaaaaattaacctgcgacatgctctatcatcttttcaaatatttcgacaacgttcacaacctgcccggcgcaggtatgttccagtacatttcgttccgcgcggcggcagccatcatcatcgccctgctgatcgtcatcgtcttcggacgcaacatcatcaacttcctgcgccgcaaacagatcggtgaggagatccgcgatctggggctcgaaggacaactccagaagaaaggcacgcccacgatgggcggcgtaatcatcctgctggccattctcatccccgtactgcttttcggacagctcgacaacgtctatatccaactgatgctggtttcgacgatctggctggggctgatcggctttctggacgactacatcaaagtcttccgccaccacaaagaggggctcaaagggcgtttcaagatcgtgggacaggtcggcctgggcattatcgtaggtacgaccatgtgcttctcgcccgacatcgtcgtccgggaaaagacgaccgaaccggtcgaaacgatctacctcgacgaacacggccgaaccatcgccgaccacatccagcggcgcatcgtcagctccgagagccgtcagacgacccagaccacgattcccttcgtcaaggacaacgaattcgattacagctggctcacgggcggcaaccgcaccctcacttggattctctacgtcgtcgtggcgatcctggtggtcacggccgtttcgaacggcgccaacctcacggacggactcgacggcctggtgacgggggtatcggccccgatcgtactggtgctgggcatcctggcctatctctccggacacatcgtctatgccgactacctgaacatcatgtacattccgggcagcggcgaactggtcgtcttcgcagcggcgctggccggtgcgctggtcggcttcctctggtacaacagcttcccggcacagatcttcatgggcgataccggctcgctctccatcggcggcatcatcgccgtcttcgctctctgcatccgcaaggagctgctgctgccccttctctgcggcatcttcctggtcgagagcctctcggtcatgcttcaggtgagctacttcaaatacaccaaacgcaaatacggcgaaggacgccgcattctgctcatgtcccccctgcaccatcactaccagaaacagggtttcttcgaaaccaagatcgtcacccgtttctggatcgtgtcgctgctgctggcggccattaccctggtaacgcttaaaatccgataaccccatgaaaaaaatagttgtcctgggcggcggcatcagcggctacggctccgcgatcctcgccaagaagaaaggattcgacgttttcctctccgacaaggggcggatcgccgaccgctacaaagccaaactggaccagtggcaggtcccctacgaggaggggcaccactccgaagagcggattctcgcggcggacgaggtcgtcaagtcgcccggcattccggacaaggcgccgatgatcgtcaaactccgcgaagcgggcattccggtcatctccgaaatggagttcgcgggccgctacctgggtaaggcccggacgatctgcgtcaccggctcgaacggcaagacgactactacgtcgctcatctacaagatcctgcgcgacgccggctacaacgtagccctcggcggcaacatcggcgagagtttcgcctactcggtcgctaccggcgattacgactggtacgtactggagttgagctcgttccagctcgacggcatgttccggttccgcgcccatatcggcgtgctgacgaacatcacgcccgaccacctcgaccgttacgactactgtttccagaactacgtggatgccaagatgcgcattacgcagaaccagaattcgcgcgacttcttcatctattcgggcgacgacgaggtgatctggcagcagttgcccaaatacgacctgcggatgaagcagctccccttcgcggccaaaaacgccgtggcgagcggcgcaggcgatgcgttccttctggacggaaaattcaccgcaactgtcggccgggagtcggtggagatcgacacggccaaaatgcggattcccgggctgcacaacgcttataatgctatggcggcggcgctcgcagcgctcgcggccggagtatccccgatccgcatccgcagctccatctacgacttcgcgccggtggaacaccggctcgaacccgccggagagatcggcggcgtggcctacatcaacgactcgaaagccaccaacgtcgattccacgtggtacgcactggagagcatgaaacgtcccgtagtctggatcgcaggcggtacggacaaaggcaacgactacgagccgctcaagcggttcgcccgcgaaaaagtgcatacgctcgtctgcatgggcatcgacaaccgcaagctggtcgaaagtttcacgggcataattcccgaaatcatttcgaccgattcgctcgacgcggcgatgcaggcggcccgcaaagcttcccgtccgggcgacgtggtgttgctttcaccggcctgtgcgagcttcgacctcttcaaaaattacgaaaaccggggcgaactgttcaaacagtgggtcgccgaacacgcgaaataataagatggaagcggaaaaacagacggagaaaacggccggcaatccgaacacagagggtacgactgtgcagaccgacgcacccggacaggagcccggcatgaaactcttcgccggggacaaggtgctgtggatcattatcgcggcactggccgtcatttccgtactggtggtctattcctcgacggcgaagatggcctacgatgcgcatacggctcgttcgacggcccacttcctgcgccaacagctgctgatccttttcgtctgcattccgctgatcatcatcgtacacaagatcaactcccggatatacaaccacctggcgctggtcgcctatgcaggcagcgttctgctgacgctggccgtctatttcatcggcgccacgaccaacggcgccgcccgctggattccgctcggtcctttccagttccagccttcggaagcactcaaggtcgccaccgtactgtttctggcccggcagctcgccggccggcagagcgtgatcgacaaattacggatcatcccctcgctcaacccgctgcagtggaagcgccccgaccagcgcaaaatctggcgcgagggcacgtggcccatcctggcccccgtcctgctctcctgtgtagtgatcttcccggcccacacctcgtcggccgtgctggtcttcttcgcctcgtgggtgatgatgcttatcggacgggtgaggatcggtgaactgatgaaactgctgggcctggccttcgccgccgtaatgctggccggcctgctgaatctgggccgcagcgaaacggccggcggccgcgtggaaacctggatcgacctctggaccaagccccaaaccgaaaagccgatcgaccagctgaccgacaccgagcgttcgatgatcgccatccacaacggcggcatcctgggcgaaggcgccggacagagcgccatgcgcatagagatgatccacccggaaagcgattacgcctacgcctttttcgtcgaggagtacggtatcgtcctggcgctgctgctgctgttgctctacctgtggatcttcttccgtgccatcgaaattttccgacggtgcggcacggcatttccgggtctgctggtcctgggattggccctgttgattacctgccaggcgctgctgcacatcatggtaacggtaaacctgattcccgaaacgggacaaaccctgccgctcatctcacgcggcggctcctcgacgatcttcacggctatcgccctgggcatgatcttgagcgtcagccgacagaacgacgaacaatcgcacgacatgcccaaatcggaaagcatctatgagaaatagcccgcgacacttccccaccgaaaccgccgttcccgagggatcgatgcaactaccgacctccggttcgaagaccgtcgaacaacccgcagccgcacactaccggcttcggctctgttccgacatcctgtcccgaatcgtcagcacaacggaaaatccgaatctgccggagccaccgagccttccgacatcggattttgcctgtacgatataattgaaaaaacgaaatggaagcgatcagattagacaaatacctctgggccgtacgcatcttcaagacccgcagcgacgcggccgaagccatccgccagaaccgggtgctggtgaacgacgcctacgccaaaccttcgcgcgaagtgcggatcggcgaccgaatcgccgtcaaacggatgcccgtgacctatctcttcgaagtcgtgggctacgtgtcgagccgccagccggccaagaacgtccccgactactgtcgcaacatcactccacaatcggaactcgacaagctcaacatcccccgcgaaacggtcttcgtcttccgcgaccggggtacgggacgtccgaccaaaaaggagcggcgcgaactggacaaccttatggaggagatatatttggaagaagaggaagagtaaccaaagaaatataatacttatcggacaataattccattcaaacgaacttttttttcacaataatgttatttttgcagtatgggaaacggcagaaaccttcaacttaaataaaaataccattatgaaaaaatctttacgtttttaatcggtttgtccctgtggaccttgactgcgacagcacaagaaccggtcgccgaaacgacctctcccgttgcgacggaaacggattcgctgcagcgggtcgtcgatgacctatcccagcaattacggcaccaaaagaacgaggaactcgatcgcaaaatatggaaaaacaggtccaagtacttcaacctcggttacgtaaaacaatcgctcgtattcaaggatttcggcgacgagaagctgaaaaacgatttcggcgtgtcgatcagttggggtaaaacctattacctgcacaaaaaaccgttgctcggaatgttgaaattcggtctggactggagctgggtcgatctgaactattcgaaatacacgatctccgaatcggaagagccgggttcgggttccgtcggcgacattatggatgaaacgatcgacatcggcaatcatcaactggaatacggcatgcaggtcggtccttcgattacgatcaacccggttcacgaactgaaaatcagcctctatttccaactcacgccctcctactcgatgatgtacctcgacgatagtttcaactccaacttcgccctgttctacagcttcggcggatcggtggcctggaaagtgatttcggtcggcgtggaaggtcgctggggccaggccaaatacaatggattctcactcgaagatgcagacctggagggcatctcatcgaccaaaacgaaactgaaaaccaactccgtccgtttctacgtcggattccgcttctaaaaagcgccgaccgcaataacgaagaaacgcgccgctgaatatcagcggcgcgttctttgtgttgagctacctggattcgaaccaagaataacaggaccagaatctgttgtgttaccattacaccatagctcaatgtcctttcggtgatgcaaaagtagaactttatttttcaactgcaaagaaaattccgaaaaaaatttatacttttgttcataacccctttcgggaaaaacggcctgcaaaagtaaaacaacacataaatcaaccaattatgggaatcaaattccgtcttatcgtcatgaacttcctgcagtacgcgatctggggttcgtggctcatttcgctgggcgcctacctcggcggaggacttcagttcacagggttgcaaatcggcagtttcttcgctacgatgggtatcgcatcgctcttcatgccggccctcatgggtatcatcgccgaccgctggatccccgcgcagaagctgctgggcatctgccagctcatcagcgccgggttcctcgtcgcagccgcctcgcaaaccgcctacggacccctgtacacctgcatgttgatgagcgtcatgttctacatgcccaccatcgccctctcgaactcggtggcctacaatgccctcgacctggcgaaactcgatgccgtgaagcacttcccgcccatccgggtctggggcacggtcggcttcatcgccgccatgtggttcgtcgatctggttcagataggcggcgtacagatcaaactgacctattggcaactgtacgtttcggccatcctctccctgattctcgcaatctactccttcacgctgccgggctgtgccgtcagccatgcccggaaaagccaatcgtggatcgacacgctcggactccgcgcattcgctctcttcaaggagaaacgcatggcgatcttcttcatcttctcgatgctgctgggcgccgctcttcagattaccaatgccttcggcgacagttacattcagaacttcggcacgatgccccaatacgccgactcgcccatcgtgcgccactcggtaatcctgctctcgctctcgcaaatgtccgaaacattctgcatcctgctgattcccttcttcctgcgacgcttcggcatcaaatgggtgatgctgatctcgatgctggcctgggtgctccgcttcggattcttcggtatcggcaatccgggatcgggtgccgttttcctgatcctctcgatgatcgtttatggggtcgcattcgacttcttcaacatttcgggctcgcttttcgtcgaaaaggaaactacccccgacatccgttcctcggcacagggtgtctttatgatcatgaccaacggactcggtgctttcttcggctcctacgcggcaggtgcggtagtcgatgctttcggctggcccgaatcatggtatatctttgcgggttacgcgctggtcgtcgccatcgtcttcgcaatggtcttccgctacaaacacaagcccgaagagatgggggccgtaagccactaacaagcaatccccgtcacaacaaacggccggaaactatcacgttccggccgttttcatttataattcaaagttctcaacgcatcagcaccgagctatccccgtaactcaaaaaacggaaatcgtgcgtgagggcgtagtcgtaaatccgatgccaatcatctcccacgtaagccgacaccaacaacagcaacgtcgatttgggctggtggaagttcgtgacgatattgcgcacgatccggaaacggtatcccagcggcgtaatcatgatctgcgtggcggccttgagtttctcgatcccctcacgaaccatatagtctgacagtacctgcaatgcttcgcggcctgtaaacacctcgggcaagtcgtacaactcccactgcccgatcacgcggctcgcatcgggcgcacccgaagtacggatccgccacgccagcgccgtcaaagactccagcgttcggacggaagtggtacctaccgccgtaatattatcccacttctccagcagccgctccacgctgcttcgacggatctcgaaatgttccgtatgcatcggatgcgccgccgcatcgcggtctttcacgggcagaaatgttccggcccccacgtgcagggtcacctcttcgaacgaaaacccctgcgtccgcatccgctcgatcaactccggtgtgaagtgcaggccggccgtcggagcggccacggaaccttcgaatttcgaatagacggtctggtaacgggtattgtcgatctcctgactctcgcggttcaggtaaggcgggatcggaatccggcccagatgttccagcagttgtccgaacgtcagatcagccgtccattcgaagcggacgatctgctcgcggccgccctcgccctcacgccaggccagcatccgttccgcgcgaccttcatattcgaaatcgatcaccagcgggccgtctttccattttttgaggttgcccacgatgcagctccagcggcacgaacctttcacggcgaacgcccgctcgtaatccgccggatcgtacggttcgaggcagaatacctcgatccgggcccccgaaggtttgtgcatgatgatccgcgcccggatcaccttggtattgttgaacaccagcagggtccccgcaggcagtatatcgccgatgtcgcggaagcggcgctccgagatttctccccgttcgtaaacaagcagcttcgatgccgaacgctcctcgagcggatacttggcgatccgctcgtcgggcaggtcgtagtcgaaacggtctatgtcgatatgtctttccattttcagcatatagcgggcacaaaattaataaaaatcccggtctttacggaaaagatacccggtttagaccagcaaataaatttggcgctgcgctcggctttcactatctttgcatcagatagaaggcggttcggacaagctcgaacgggttcggctcgtcgttcccttttgctatctttacaaaaaatttcgctctgataggctgcgtccggatataagtcggctcgatccggcttcatcgcacgccagcactatctcggcctgtccaatcgctgaaaaccatgaaaaccgattttctggtcatcggatccggcgccgccggactgagtttcgccctcaaa

SEQ ID NO: 10400 - DNA, 98592 bp, Unknown
  gut microbiota DNA sequence
aaaagaaatgaattttatactcctatttactcttaaaaaacttgcaaaaaccataagaatatggaaaaaaggtgttcgcttggattgcgaatattcgcttcgttatcggtcaaaatacagaaacaatacgatgaaacaagacaaactgaaggcgacggcccgcctgttggaaattatggatacgctgcgcgaacagtgtccctgggatcgcaaacagaccttcgaaacactccgaaacaacacgatcgaggagacgtacgaattggccgacgccatcctgaacaaggatctcgacggtatcaaggaagaggccggcgacttgctgttgcacgtggttttctatgccaagctgggcgaggaggccggggcgttcgattatgccgatgtggtgaacgctttgtgcgacaagctggtctatcgccatcctcacatttacggggaggtgcatgccgatactccggaagaggtcaaagccaactgggaggcattgaaactgcgtaagaaaaaccgtcggagcggtacgttgggaggtgttcccgtgagcctgcctgcattggtgaaggcctaccgcatcggtgagaaagcagcggcgacggggttcgactgggagaaaaaagaggatgtttgggccaaggtgaaggaggaaaccgccgaggtcgaagccgaaatgatatccggtgaccgtacggcgatggaggaggagttcggcgacctgctgttcgccctggtgaatgcttgccgcctgtacgggatcgaccccgaatccgcactcgagcgaagcaataaaaagttcatgaatcggtttaattatatggaagagtgtgcttcgtccgaggggcataccctgcacgagctgtcgctcgatcggatggaagagttgtggcagcaagccaagcatgcggcggctgaaaaagagtaagaaccaactaatacatatcgaattatggcatatatcagagagatacggggacataccccgcaggtgggtgaaaatacgtttttggcggaaaccgccgtgcttgtcggcgacgtgacggtgggccgcgactgttcgatctggtacaacgccgtgttacgcggcgatgtgaacacgatcaccatcggcgatcggacgaacatccaggacggcgtggtgatccacaccctgttcgacggctcgaagcacccgtcgcagacccatatcggcaacgacgtgtcggtgggacataacgccgtaattcacggcgcgatcatcgaagacaactgcctgatcggtatgggcgccacggtgttggacaatgccgtagtagcgtccgggtgcatcgtagcggccaacgcactggtgctttcaggcagcaagctcgaacccaattcggtctatgcgggtattccggctaaaaaagtcaaggaaataaccccggaacaacgggacgagatcgtactgcgtacagcccgtgattaccaactgtatgcttcgtggtttaaggaggaataagtcgttttttccatttgtcggaagagattggcgcttggtttgcaagagtacattcggttataaagaccgataacaattaaaatggtagttgatatgaaagcgaaattcttgatcgtcgtactggcagcgctggtgctggcaacgggtacggtatgggcccagaagggacaccataatcgtcgtgccgaacacaaagaacttactacggagcaggttgcgaaaaagatgaccgatcggatgaaagaaaacctgtcgctctctgacgaacaggtaaaacaggtttaccctatttgcctggaacaggctcaagccatgagggagcaccgggccgaacgccgggagatggctgaaaaatcgcgtgaagcgatggcacagcagcgtgaacagatggccggccggatgaaggcggttctgacgcccgaacagtatgcccaatggatcgaatgccgagagtgtcccgcccgaaaggtcgattgcgccggaccggcatgtcgaaaaggcgatgcgaatcccggacatcaccgcagaccctgtaacggtgctccgtgtgtggataaaaagtaggcagaaagtcgaaataattcgccgatatttccgtttatagggatgaaacaggccgacctgtttcatccttttttcatgttccggacagtgaaaaaagtcgatttttatcgtatatttgccgtgtgacgacaatgatgggagatgattagagcgatttgtttacttgtattcttgtgtacgataggtttggctcgggcgcaggcccagagcggtgtgattacgctctccgtgatagatgccgaaaccggtgaagatgttccgggtgccgtaatagaaattgcacctaaagcccaccccgatcagaagaaatattatacttcgggctataaaggggcgttgcaagtgcgcggcctcgcttatggttcatataccctggccgtgactttcatgggatatgaaaaggccgaaaaggagtttcgggtgactcagccgtccgaaaacctgggaaagatcgcactgcgggaggcggccatcgccatcgagaccgtagtgaaggaggtgcaggcactccgcacttctcaaaagggcgatacggtaagctataatgccaatgcgttcaaggtgactgccgatgccgacgtcgaggggctgttgaagaagatgcccggcattacggtcaataacggcgctgtcgaggcgcagggcgaaacgatccagaaagtattcgtcgatggcaaggagtttttcggcgaggacgtgacatcggcgatcaagtcgctgccggccgaagcggtcgaacggatcgaggtttacaacaagttgagcgaccaggccgagttttcgggtatggacgacggcgaaagctataaggcgatcaacatcgtcacacgcgaaaatatgcgtcagggcatattcggtaaggcatatgccgggtacggttacgatgccgatacggaaaccgaagccaaaaacaagtatatggtcggcggcaacgtcaattttttcagcggctccagccgtctgtcgctgatcggtctttttaacaacgtcaatcagcagaacttttcgttcgaggatattctgggtgttaccggtaattccggaggcggaggcggtcgtttcggccgtggcgtgggacaatatatggttcgtcaccaggacggcgtggcttcggtaaatgcagtgggcgtcaattattcggatacctggggcagccgggatcaggtgactttccagggcagctacttcttcaacggaacccgtacggtcaatcgggcgcgtaccgagcgttggtacgaggagccggcaccgatcgatacgcttttcaccgacggttattcccggacacagaatttcaacaaccgcctgaatgcccgcatcgaatggaaaatcgcggacaaccagtcgctgatgatccgcccgggcttgagtttccagtcgaacgatccgttcagtacgacttacgggcgacagttcggcgaaagcggttacagcgtcatcgacaatttcgaggatgccttccgaaacggttacagcgtcaatacttcggccatttaccgcgtgcggttgggtaagccgggacgtacgcttacggtggacggctttttcaactatttcgactcccagaataagcaaaactcccataccaacgatttcggtatttacgaggattaccccgacctcgatcccgatccggacgagaacgatctgaaaaagctgatttaccagcgcatgatgaatccttcgtaccgttatcggctgaacggccgcctgacctatacggagcccgtatccaaatattcgcaggtgagcctcgggtatcggacgtcgtacaattaccagcagagcgacaagaaaacctaccggaccggcgaggattacgatattacgggattgcttcccgatcccttgctgtcgaacgcttacaagagcagctatacggtgcactctctcggccccggcttcaactactccaaggaccgcaatactttcgctgcgaacgtctattatcagcgttcgagcctttcgggtgaggtgatccgtaccggctccgaagagatcaagcacgcctacaacaatgtgacctattttatggtgggacagttcaacctgaaccgggagaatacgctgcgaatgttcctgcgctcctatacggacaacccggaggttacccagttgcaaaatgtctatgacgtatcggatgcgcaatacatcacgcggggtaatcccgacttacggccttcgtacagccataatttgagtatgcactacgtcaattccaatgcggagaagggtcgtacttttatgctgatgttccgggccgaaacgacccaggactatattacgaccagcacccgctaccgtcctactttggagatcgacaatacggtttaccgtccgttgcagttcaccgaatggacgaatatggacggctactgggatgtgcgggcgcgggcaagttacgggtttccggtgaatttcatcaagagtaacctgaatctgcggggcggcgtaagctattcgcgtattccgagccttgtggacggcgagcggaacaatacgggcaacctcggttacgaagcgggcgtagtgttgggcagcaacatctccgagaatgtggacttcaccctttcgtgggacggcacgtacaacgaagccgtcaattccctcgccgctaccggaggaaagaaccgttatttcaaccatcaggctgcggcgtcgttcaagttcatcttcggccggggattctccctctcgggcagcgcttcttatatccagtatctgggtttcacgaacgattacgacgacagctatctgctctgcaacctgttcgtgggcaagaaggtctttcgcaaccagctgggggaaatcaacatcggcgtaaacgacattttcaatcagaataaagcgttcgtgcgcacgaccggttcgggttggacacaaaattcttggaacagcgtagtgggacgttattactgtgtgcagttcgtctataacctgcggttcttcggcaagaagggttcgaagaacatcaaggattatcaaggcgtttcggaccgcccgtcgggagccgtcggtatgggacgcagcaccgctcccggaggcgggttccgtccgccgcaccggtaaagcgatatgcgccccggtttggtcgaggaatatacgatatgattattgaaacataaaaaagaggggtatcgacccctctctttttgtttcagcacctttgcgatcaggcccataacgttgcggaatatgcctgcccgagtcaccacaacctttttggggaaggacgatactcccggagccattcacttccggtcgttcgattcaggacttgccgtatgatggctttcccgctgtctgcatgtcggttaccatctggtttcggagcctgccgacgagccgtttgaatcgtagtaatatttacggtctttcgttgtacgtgtcgtacctgcgatatgtcctttggaatcctttatcacttcctgctgcccgttctcgcgcaccgtgtacttcactcgtccggaagcgtctttgatgacacgtgttccattctgatttcgtttggtttcggagcctgccgacgtgccgtttgaattgtagtggtatttacgatccttcgtttggtgtgttgagcctacgaccttcccttttgaatccttgattatttcccgatctcccgttttttgaacggtgtacttcacacgtccggaagcgtctttgacaacgcgcgtttcattcggattttgagcgctgcaaagcgttactgctgcaaatacggcaaaaagggtaaaagcaagtcgttccatagtttcggagaagctcatattttaatcgggttatttacctgcggccttcttgaggcgaaggtgtatgccgacagcagcgaatccgccgtaaactatcgtgagaatccacaggatacgtacctcgtgcaacacgtcgctgaacgaagcccccatactttggagccggatgaacccttctaccccgctgctgctcggcagaatctggccgaaccggtagagccattcgggcatcgcttcgcggggtacggaagctccgctgagcatcagagccgggatcgaacaccagagtaacagcatgatcgactgttcgcgtcgctggaacagcgtcgagacggcgatgcccaggaaaatacaggacagcagatacgggatgagaaaggcgatgatgtccgccgtgtgaccgttggtcgggaaatgaaacaatttgtagtgcagtcccaaaatataaaacagggtgacggcgtagatcgacgcataaacgaacgctttgcctgccacgacgggcagcgtggacattctccggcgtcccggaggaatgagtttcttgtaaagtccgaattcgctccaggtgcctccgatcataccgataccgatcagcatcgtctgttggatgatgaccatgatgatagccggcatcacgaacgatccgtatcccagatagggattgaacaaattgtggctttggtaaatcacgggttgcgtcgtggccgtagcctgcgggatgttggctccttttgcgatcaaccgctggaattccaccatagctcctgtggtgccgatgcccgacacgagctcctggaacgcctggcggtacatcagaaaatagctggcatcgacatagagcgaaacgaccgcctgctgtccgccgagcagtttttcctcgtaatcggaggggatgtaaaccacgccgtatatctcccggtcgtagaaaaggtgtttggcctcgtccatgtcgccgggttcgtaggccacatagacgttcggtccggcattgaaggtattgatcaactgacggctggtcgaagtgttgctcatgtcgattactccgatcggcacgttacgaagtacctgcgtcccgtaagccagcgaatagagcgtggaatagatcagcagggcgagcaccagcacgagaatcacgccggcatccgtgaagatcgagccgtattcgttgcggacgacggtgcggaactgctgccagtaagaggttatctgtttggtaaatcgactcatcgctataatctcccccagtattttttattcgtgcagatggtgcgcaggcgcggcagacacagcagcggaagaatgatgaacagggcgatgatgcccatgtcgggcaacgagtatatcgccggagcaccgcgcagggcctgatcgaccatgatgtcggtgtagaatgtgaacggaaagatgcagcagaaccattgcatgggtttgctcatagccataatcgggaacgtaaggcccgaaaacgtgaaggccagtaccgagtaaccgccgccgatcgaaagcgacaggcgcaaattgctcaacacggtgacgatcatcgcaccgagggactggtaactcaggatgaagagcagattgctgatggtgatgaccgtcaggctgccgttcagcggtacgccgaccaccttgaagatgaccaggagcatcaattccgacatcaggaacataatgaccgtaatcggcaggattttgcccgcgtaggccgcgaagaccgagcctccggccgtgtcgtaccactccctggccgtgccgttcttgagttcggttccgatgacgaaaatcgtcgccatgatcgtgaagatcagaagcatcatcggcataaaactcggcgaaaggtaatagccgtagttgatatgcgggttgaatagcacatgtttgtcgaaccgtacgggcatcagttgcgccatagcctgtttttcggtcagcccttgtttcatcagcagttgcagctggataccggcggtaaaagtggtgacagtcgtttgcaaatccttcgccagcagaccgtttaccgtaatgttcgtgccggtcaggtagctttccagatgggtctggctgttgttgagaatgttcttttcgaagaaatcgggaatcagaacgattcccatgaccttgccctgaagcatcagtcgttcggcctcttccattccctgtacgccgtaagcgacccaagccgtaggcgtcgcgtcgatcatctgcgtcactttgcgggagagggtgctgttgtcctggtccacgacggcgatcggaatgtcgcgtgccactcccttgtataacaacaccgcgaagaatgcgaacgcgacgatcggcagaatcaccgtcagcagccaatacatcggctgacgtgcgacccggtagatctctcgccgcaggacggcgagcgtattgctgaaaaagcccggcatacgctaccctttctgaattatttggcgatgtctttccagttcaccagtacgctcatacccggccggatgtattccacgtcttgcgtgggtttggctttgacggcaaaggtgcggatgtcgaagccgccctgcgtgcgtgttgcggaccaggtggcgaaatcggcctgcacagcgatataggtcacctcgaactccacgctgcggtccaaggccgggatatagcctgtcatacgggttccgatatggatgtcgggcatcagatcctccttgatgttgaaggtcacccatacgtcgctcatatcgagaatcgccactacgggataacccgttccgaccagttcgccggcttcggcgatgatcgtcgaaacctcgcccgttacaggggcgtaaaccaaggcatccgaaagataggactccacttccgaaacggcgccttcggcctgccgtacctgggcggctgccgcctctttctcctccttgctggctccgtcgaataccagttcgcattgcgctttggccgcacgctcggtcgcctgcatcgcctgcaggttggcgcgggcttcatccagcttctgggccggaacgacgccttgttcatagaggttgttcacgcggtcgaaggttttctgggccaacaacagtcctgcctgggctttttcccagagattcagtgcggcttccttctgttggatacgggcaccggtgagggctttctggtccatggccgatgcggcgctcttcacggcttcggcctgttgcaacttggcattcagttcgggggtcgagagcgtgtagagcagttcgcccttggtgacgtgctgtccctcctctactttcatctcctcgatacggccgggaactttcgacgaagctttgtatgtagtacattccaccgttccctggatgtacaggggcgtggccttgcgtaaataccaactgatgaagatgacgcccagcacgacagcggcggcaatcagaatgatcgtgacaatggtactttttttcatgagattatctatatttactctttgtcgaaatgaatgggacgggcgtcggtacggtgcaggtagctgatgaactcatcgctgatgccggcggcttcgagcaacttggccagtgcgacatcgtaattgtaggcggtctgcatacgctcggtgcgcaccttggcgagattcagttcggcatccaccaggtcggaggaggaactcataccttccaggaatgccgcattcttggctttgagatactcctccgcaaatgcgagcgaagcgtcgatcgacttcatctggttggcatagttgttcatttggttgtagagtttttcgatcagtactgcaatgtccttgccggctttcatttccagcacttccacttgcttgaccgtctgttttgccgccgaatatttgtattcgcggttcaggccgtcgaaaatcttgagattaacgccgacacctactgcccagcggggcattattttagttacctggtagttgtagaacgaggctccgcccatcgccgcgacctgcggcaggaaattggcccgttgcaaccgaactccttccttggccaactggcgcttgagggctacctggctgagcagcggattgaacttggccgccaggtctttgtaataggctacgtcttccaggttgccgagtacgaacatcgtcgttacgggcagaacctctgcctgctgtccgagcgtattattcagtgcactggcgatggtttcgacctgcaaccgggcgttttgaagctcccgctccgcctcggccatcttgaattcgacgtaaagacgttcgctgtgggggatcataccgttctgttcgagggcgatcgcatccttcagatgttggcctactccatccactacctgctggcgtacttcgacgacctgtcgggccagcgccagaccgtagtatcgctccacgagctccgaaaccagcgcgttgcggttttggtttccctgctcgactgcagtcttttcgttgattttcgcggcacggttggccgtgttgatcttgccgcccatatagatcggcagggttacctgccctccgacgaatccgagactgcggtcctgcaatgtcaggaaccaatccgctcccatgaccggggtgagaagttgctgaatctgggggatcaattcggtcgggatcagcccgctgccgagaatgtcgtgggtgatgtttccgacaggccctttcaaatcgttgaagtcgaatccgatgtccttgcccaaataggtgtaggttccgcctacgctgatttgcggcatacgcaagccgatcgctgcccgccgttcctgctgggcggctttttcttcgtaacgcgaggcttcgatgaccggacttccggagagggtgatctccagggcttcatccagggaaagtacccggggtgtttgctcctgagccgccagaggtgcggcagctaacagagcgaaaaatgaaacgattatacggttcataaaatggtcttctaaatttttatgcgaagatagtgcgaatattcgtacgtataatttgttgtggctatttaggccaatattcggcgtaaaacagaacaaaaaatagccaagcctatcgatggccgatatgtgcgtttatcgttcggacctgatcggacagcgtgtcatcgacgctgacttcgatcctgtggcgacggaggttcagggcgccctggcaacaaacgaaacagtccggctcatatagagcaaaaactacccggcgaaattcgtgccgaattatcaattccgaacaactttccggttcactttttcgttcggagcacggttccatcgaagaatagatggtcgcaccccgcagttcgacacccgctgcaagcgctttcagaatcgcttcctgttcggcatggtgggtcggggaggtttcgtgagtataacccgtaaatatctttcggtcagtcgttaaaatcactgcacctacacaatatgaagaggtcgatggggtgcatttgcggctttcgtcgatcgccatttgcaggtagcggcggtcttcggcggtccggtcgggtttgatcgcataggtcgtgacccgcattcctcccaacgattcggtcgaatgcgacgtttgcagataattggaaccgatctccaaacggggtgcccggggatcccccacttttacggccggattgacagccagccggaaggtatcgaccagattttcggcgaagaacatccggagcgtcgcagctcctccttcgaccagcagggagcgaagtccccgtttttcgagttcggtaacgatcagagcagccgtgatctctgcggcgggaatcaccgtcgccacctgccgcaggggaccgggatcggggcaggtggtgaagacgatcttttcctgatctccccgggtgaagaaattggcctccggcgagagccggcacgaagcggtcagcgttaccttgaccgggttggacggaagcccccggtcgattcgttcccgatgaagaacttcgtcgccgaccagcagcgagggattgtcccgccggatggtttcggccccgaccagaatagcgtcgcaagcggcccggaggcgatgcacttcggcccagtcttcgggcgtggagaggatcaggcggtcgggcgaacggtcgtccagatatccgtccgcagaaacggcggtggaaacgatcactttcattttttcaacgtaaaaagggtgatttcaggatcggcgccgagccgcatcggaaagccgacgtatccgattccgtcgttgatgtagagcgtattgccggccgcatcgtcgtagcgtccgctccaacggtcgtacatcagttgtgccggggaaaacgcccgtccgaaaagatgtcccttgatctgcatactgtgcacgtgccctgccagcgtgagatttccgcgaccgagggcgatgatattgggccacagttgcggcaggtgcgaaaccgtcaggttgaacataccctccggtatgccgtcgtaagcggccgcaagggatatttcgggaagatcgaacgaatgtcggaatttttgcagcgtgggatcgaacgagatgcccgtcaccgaaatcgaatcgctgccccggcgcaggtagagggtcgaatccagcagcatccgccacccgatctgccgctgccggtcgattacctgccgattgttttcagcacgcggcagggcgacggtgtctttgatataaagtcccacgtcgtgattacccagggtcgagatgacaccgtacggggcgcgaagccgccccagaatggccaatacgtccgatgtgagttccgtggagcggacattgaccaggtcgccgctgaagacgacgaggtcgggtcgcagcgcattgatcgtgtccacgagccggttcatctcccgttccggccgcacgagcgtgccgatgtgcagatccgagaattgcacgatccggaatccgtcgaatgcggcgggcagtgctgcggtccggatttcgacttcgttcacccgcagggcttgtctgccccaagccgctccccatacgagccatacggcacatccgacagcgaagagcgcccctacccgactgaaactccgatgccgatcgaacaacaaaccgaaataatagccgtaacgacagcctatcagcaacaggaagacgaaggtaaaccattgggctgcctgcatccagcccgtcgtattgtccggtacggccttgagcagcagcaccacgacgatcggaagcgcatccgaaaacaccgcgaaccagacgaaggcgcggcgaaggcgctcggaatgccgacgcatccgcacccggtagaagagaaagtccaccccggcaaaaagcagggagaggagaagcagaaaccagatcatatagctcgattttttcgttatcgcgttcagtcgctctctggcattttatcgacagatcgaccggacggaatcgtttttgcaaagataataagatgatggcaatcgcacgaattggcacgtacagattgccgaaccgcctcctatcttctgcaaagatacgattaagccgagggcaaaaacaaatttatttgtgctttgccgaggcggagtatctaagacgaagtcaaagattgggattaagccgagggcaaaaacaaatttatttgtactttgccgaggcgaagtatctaagacgaagtcaaagattgcgattaggccgagggcaaaagcaaattttatttgcgtcttgccgcagcggagtacttcaaagatagtgaaagccgggtccgtttgcacccgtcgttctgccctgcgccgaagatcgggcgaacattgtgttgcagttgttcgatgcgctcgtcgaatatcgacaccgttcgcgccgcatcggtgcggcacgaacggtaaggtatggcctgcggccgaatcgtattatttcgttttgattttgaaaaacagggcgtaaagtatcggcagaaacaacaacgtggcgatggtcgaaaagaacagtccgcccatgatcgtcgcagccattgaaccgaacatcgcatcgccgagcagcggaatcataccgagaatggtggtaagcgaagccatcatcacaggccgcagacgactttgggcgctgacgaccagtccggctatgaggtcggtatcgccgctgcaccgctggccgatttcgtccaacaatacgatgcaatttttaatcagcatgcccatcaatcccaacgcacccacaatggcgcagaagtcgaacgtctttccggtcagcaacattgctccgacgatgccgacggccaataaaggaatgcagcacaacacgatcgtcggcttgcgatagtcgccgaacaagagaatcagaacagcgatgatgagtactacggccagcgggacctgtttgaaaagccagtacatcgtctggtcacgggcccctttttcaccatcccagcgtatcgaatagccggtcggcaacggaatgtcttcgatctgttcggcaatagtttgtcgtgccgcctcggtttcaacacccggtgcgggggaacacatcacgctctgcatgcgctgaccgttatagcgcggaatgaccggatcttcccagcgaatgccgacaccccgtccgacttgcccgagggggatggtctgcgccagccttcggatgatatcgcctttgtcgagcgtgccggtctgaaggcttcccaccagctcgtcgtcaagcagcgcatttacattcgggagcatcgggaaaacgggtacgttctccggattgtcgatgcgcgagccgtcggccgccgtacatttgagatagatcgtattgcgatgtactccttcgtagaacgtcccgacgggaataccgccttcggccgtcagcaacgaggtggcgatatcctggcggctcaggttggcgcgacgggcggccgcctggtggtaatccaccgccaaaacgggaaccgcaggttcccaaccggtagtgatctgcgcaacctggggcgtgcgcgccataatcattcgtgcggaatccgccaaccggtgcagtaccgccggatcgggtccggaaaattgcacttcgatcgggtattttttgaacatgatattataacgcttcaccttgacgtacgcgtcggggtaacgggccgaaagatcctcctgaatgacatccatgttttccaccagcgattcgggcgattcgaaatcgacgatcaattctccgtaagagagcgacggcgtggcgatactgcgcaccagattataccgtgccggcgtcccgcccacggacgcaacaacgttccggatttcgggacgagtcttaaggtacgcttcgatttcccgcaggtcggcggcaacccgtgtggagttcgtaccttcgggcaatttgtattcgatatagagttggtcgtaaaccatatcgggaaagaatccctgccgcacgtaccggaatccccagacgctcaatccgagcagaacgagaatgaccgacagggccgcgatacggtgccgcaaaccgaagcgaagcagatcgccgaaacgacgatacaacgtgctgtcatacagtttaccgcttccctcggtcctcgacggttgcttcaaaagccgattcgccatcagcggcacgtgcaccagagccaggacccaactcaacagcagactcgccgccagcacgataaacagatcgcgcacatagacgcctgccgtatcgggcgaaaggaaaacgggcagaaatgcgaggatggcaatgaccgtagctccgagcaacggcatggcggttttacgaccgatggcgcacatcgcttcgcggcgcggcttgcccagcttcagatcgaccagaataccatctactatgacgatcgcattgtccaccagcatccccattgcgagaatgaacgccgccagtgaaacccgctgcatcgtgccgccggtcatacccagcagcagaaacgtgccgatgacgatcgtaagcagactgaatccgatgattacgccgctgcggaaccccatcgtaatcatcagaatcgcgatgacgatcaataccgattcgaccagattgatgaagaaagtggagagggcccctgttacccgttcgggttgatagaagaccttgtggcaagcgacgcctgcaggaaaacgttcctcctgtaattcggcgagccgccgttcgaccgcattgccgacctttacgatgtcggttcccgaggcggcggctacggcgataccgacggcacgttcaccgttataggtcatcgaattgcgtacgggttccgtatagccgctctctacggtcgcaatatcccccagacgcaactggtcgtcttcatggccctgaatgaccatgttgcggatctgttcgaccgtacgcgacttatcggtgaccgttacgcgcacgcgttgatccccgttgtcgtagtaaccggcatagaaagtgccgttttgtccgttcagggtggcgagtacttccgttggcgaaatgccgagtgtcgccattcggtccgcacgcagcgaaatatcgatactctcctcgcgctttccgtaaagctccacccgggccacgccgtcgagatcggtcaattcgcgctggatcagtccggcatagtcggcgagctgtctttcgctgaagccttcggcggtcagggcgtaaaacataccgtaaaccagactgaagtcgtcctgaaccgtcacggacgtaccgccgggcaacgatgcttccgcatcggaaaccttgtgccgcagcatatcccaacactgttcgagccggtcatcgggcgtcgtacttttgagttctacctgtatgatgcataggtcgttgtacgaccaactctgcgtattgtccacctccccgacggtacggatcgccttttccagcgggtcggtcacttccagttccatttcgtgcgccgacgctcccggacgaaccccgaccaccatggcgatttttaccttgacttcgggatcttcgagttttcccatgtcgtaggccgatttcagaccgccgaccaacagtaccgccaacagaaaatagacgagcttgctgtgtccgaaagcccatttgcccaagtcgatcatagcagccctccttcattggttttcgacggagcaggaagcggtgcgacccgctggccttccgtcaatttatgaactccggccacgacgatccgttcgccttcgttcagaccatccgctatcgtcgccgttccgtccgtatgcagacgggctacttcgacccgtcggcgtgcgatcgtcccgtcctgtcggtaaatccacacgtaactcatcttgtcgccgttgctgaacagagccgatgcaggaatctctaccgatgcctccgtttcctgccgcatggcgacttcgaccgttgcgttcataccgggtgtcgccgcgatctccgtattcacgggcagtgccaaccgcacggcgtaaagctgattggcattggcgctcggatcgacatggagcagacgcagcggaattttttgcccttgcagaaaatcgaacaccgccgcaaacgaagcgatctcccgacggcgaatgtaagtcgatgccggaatgaaaagttcgacctcgggattcttgcccgacaggaacgtgatgaccggcattccggccgctacgaccgtcggaggatcgaaacgccgacgcttcacgtagccgtcgaaaggagcatacagtttcgtatcggccaattggttgcgggcgttctcgtatttcgccgtaatctgttgcagcccgtatcgcgctttgtcgtaagcatcggcggtagcgacgttttggtcgtaaagcgccattacacgttcggcttcggccttgatactcaaatattcggcttcgaccgcctgtaactgaagttcgtaatcgcgcggatccatttcggcaacaagttcaccctgacggacaaaagccccgtcatcgacataaatacgttgcaaggttccgggtatcttgaaagcgaggtgaacttctccggcagcctgtactcgggcgggaaattcgagaatatcacaggtattcgctgtttttacggtatcgatgcgcacgagcgttacctgttccgtatgttgccgctgcccgcacccgaccagaaacagcgttgccgcagtcattgctatcactaacttatgtttcatatgaaaaatatgtttttacaaaaatacaaaaatatcggatagcgaccgtttcggaaataactatttcgccgttagtttatccgatttgcaggattcgccaacgccttctgttcgttttttacactttttgaggggattttatttagggaaaggagaccgacatccgtccgaagactccgggaataggttcgaacgtctggcagatgccgtgaccggtccggctcgcaggctggaggatcccgcttttcgacctgctgcacctgttcttgccgggtattttggcatataacttgccacgtttcgggcaaataccaattgtctgacttccaaaatcgtaatatacatatatagatggcatccgccattatcggaataatttaattttattgcttatgaaaatttttcgacttttaatcgcaatgttgctggcggtttctgcggcctcggtttcggcccagacctaccagatccgtaaggacagcgtaaagaccggcgaatactctccgacggtttatttggtttccgtcaatgcacctcaaccgcccgcagacgaagaggccttgctcgaagcggccgtattgaaccaactggcaatcgacaatgccattcgggattatatcgaaacccatcatcccggtttccagcaggatgaactgcctcacttcatcttcgccaccaagcagaacaaattctctttctcgctcggcggccaggtgactttgcgtgcgtcgtatgatttcgacggaatctccggagcacaggatttcattccggccacgatcgccgttcccggcacctatgccacccgtcagaaattcggcctggacggaactacctcccgcatatttctgaaggccatcgccaattcgaaaaaactgggccgtgtcaccctctatttcagtacggacttccgcggcggaggaaccaacagttatacgccccgtatccggtcggcttacgtatcgttcaaagggttcacgttcggacgcgacgtaacgacgttctgcgacctgaacgccgctcccaatacgatcgacttccagggtcccaatgcctataactactttttctcgacgatgatccgttacgagcattcgatctaccgcgatattctgaaattcggcgttgccgccgagctaccgaacgtaagcggcacctacggcgattcgttcgcttcgattccgcagcgcgtacctgatttcccggtttatatgcaggtgaattggggccggaacaaggagagccatttccgggcatcggccgttttccgcgatatgtatctgcacaacgaatcgacgggtaacaatacttcgctcttcggctggggcgtccaggccagcggaaatatcaaagtagcgggtcccctgcaactcttcttcaacggtgtgtacggcgagggcatcactccctacatccaagatttatcgggcatcggactggattttacacccaatcctcacaatccgaggagtattcagactatgccgatgtacggttggcaggcggctgcgcaaatcgacctcgttccgaacaaactcgccatttcgggcggttattccatggcggaggtttgccgcaggaacggggcctatgccgatgacgaataccgtcgcggtcagtatgtcttcggcaatattttctgggatttggccccctgctgtcagcttgcggccgaatacctgtacggcacccgcgaaaatatggacggaatgaagggccatgccaatcgggtcaatctgatggtgcgctacaacttctgatttcggagggcggaattttttacgggcggctgccggatgcagccgtccgtaatttttttggtttttgaggcagatgtgaaagcgccgaaatgcttcggattgccggggagaaaagcgatgccaattccactattcatatatcgagcggaaaagtttcacaaaatacggttctcggaaagcacgtcttgcgcactggattcgaatacgggtcttgagcggcctatttcagaatttcttccggatctcgtaacgtttgcacggtcgatacgctctttttggcatttcggttgaaccggtagccgatcgaaaagaccagccgcagacttctgtgtccccgaggttgccgcaggacggaatagtaggagttgtcccagcgtaccgtttcctttttcagtttggtcgaaaggatattgttcacgtcgagggatatatacagtttgtctttacagaatgatttggttattccggcagctaaagcccaataggaattttgccaggtttccaatcttttttggggcagctcgacgcctccgtccagatagataatcatcgagggatgcggctggaacataagggaaaggctgaacatcccacctccggcactgtacgaagcctgccagtcgccatccacctctctccgataccaatatccgtgaatgaaagatttcactcggaaccatttggttaccaatgtcgtataatcgatccagatattatgcgccgagccgtgttccccgttcaccttcgtcgtatagacgatgttcggatcgtcggggtcatagaaagtcatcgtttcactgccgcgcgaccacgtacctccgtaagagatcgtcagtttgttgcgcagcgtatagctcaggtcgatgtcgtacccccagccgggttcgagattttcgttgcctacggtataactgtattgcgactgccagacccggcggggactcagggcgttgttgtcgggcagccggccgctggaccgatagaggtcgagattgatattggtgcccttttccgggttgaacgtgtaggccaggctgagttccgggaaaagccgccagtagtcacgatgttcgtagcccgtattttcggcatttcggtaagcgatgcgatcccattgcagtcgcaggcccgcctgataggagaacttgccgtaggcatcggcccattgggtgtaggcacccgtgctttgagtgcggtcgataaaccaggtactcatcttcggatccgggatccactcttcctcctcgaagcgatgcacgggagcgttgttgtccgcataccgcaaatcatagctcaaccccgcgctgaagctgcgctcttccgaaaaattcttgttcaggtcgagccgggacgcgaacagatgtcccagcagcttgtagcgctcgcgccgcaactccgtggagaagggttccgcatcctccggccgggaaaaatcgcgcgtgtcgtagtcgtaattccgatcgacgttctggtgcaggtagtcggccttgaaagagagccgggaacccaacgtgtcgaaacggaagatataattcagcgacccctgatactgccggttgtagagcgtgcccccgtagcggtagagcgtatatccggcttcgggcatctgcggcggcacatcgccccaggccaatcccgcagaggtcgtgtgcaccgtattggacgggtcgctcgctcccataaaaatctgtcccccgagaccgatcgaatggcggtcgtttatcttgtaaaccaggctcaaaagttcgcggatattccgggaggtgatccgcccccggtcctccgagtcgagcgagtatcccgaattgcgaaattcggaataggtgcggtcgagcgtttcgttctccccataggaacccgacacataattatatattcccaatcgtccgcactgggccgagaacggcagggcgagtcccgtagaatatccgtcgcgggaaacggacgcggagggagatacgttgccgtaaaaactgcctgcggcgagtttcttgagccggatacggacgataccgcccgaagtcgtggcggaataggccgctcccgtcttgttctggacctccacgcttttcacatcttcggcacgaagggcggaaagctccccgagatccgtcaccagccggtcgtcgatatagacgaccgacaccggagtccctttgatgaacaaggtgtttccggagactcggaggcccggcagcagatccagcacctgcatcacggaccggttgcggacgatcggattacccaacatattgacttcgtagcggcctgccctgtattcggtatttcgggctaccacgaccacctcgtcgatatgtcggctggccggacgtagaatcacatcgggcagggtttgcgcctccggaacctctaccgttcggtagcaggattcgtaggccagatgcagatagcggcccgcctgttcgaaatgcaggctgtaacggcctttcgtgtcggaaacggcgcctccgaggatcgtggagtcgcgcgattcgagaatgctgaccgaacaataaggaaccggagcggattccgcatcgagaatacggccccggacaacgaagcgttcctgggaaaaacagggaacatacaaacaggtcagaagtaagcagagagtaaggcgttttatcatagaaagcgttatagtatcaaataaaggcgtcatacatagtataaaaccatctttttatgactaaattaaatgaaaatcgacagttatgcaagcctgtcaagtgttatttattttttgattgtatatttcgattcaccgaatatcgacctgctctaccgcaacctgccgatatgcctcggcttttcctcaatctttgacttcgtcttagatacttggcctcggcaaaatgcaaataaaatttgcttttgcgctcggcttaatcgtaatctttgacttcgtcttagatacttggcctcggcaaaatgcaaataaaatttgcttttgcactcggcttaatcgtatctttgtcaccgacaaattctttccgttgccgatgaaactcttcattaagaatatggtttgtccccgctgtattctggtcgtgcgcgatattttgcggcaggcggggatcgaggcctcgtcggtcgttctcggcgaagccgtgctgcccgcagaactgactgccgagcggagaaaggagttggacgaagcgctccgcgccgtcgggttcgagttgatcgacgaccgccgcaagcagaccgtcgagcgggtgaagaatacggtcatcgagctggtgcgggagaaggacgccgctttgcggaccaacctctcggattatatcgcggaccggttgcatcaggattacggggccgtgagttcgctgttttcggagatcgaaaacacgacgatcgaacaatacttcatcgcacagaaaatcgaacgggtgaaggaattgctggcttacggcgagctgtcgctcggggagattgccgacaagctgaactattcgagtacggcccacttgagcgcccagttcaagaaggtgacgggacttacgcccagccatttccggaagatcggcgagaatcgtcgcaaaccgctggacaaggtgtagtccgccggtcgttccgaaatcttgtaaatagtatccggaattatataacgccttccgccctttttgtcccgatctttgtatcgaaaggacacgaagggcgttttgcggatattccatgctcgtccctgtctgtaaaaaaatcaaaaagtatgtcgaaaggtaaatatgtaaaacggacttttccccttgcggggctgcactgcgccggatgtgccgcacgtgtggaaaaaattctcaatgcccagacgggcgtcgtcgcggcttccgtcaatctggcggcttcgaccgcagcggttgaatacgacacgatgcagacctcgccggaaagactccggcaagccgtgcaggagggaggttacgatatgctcgccgattcggatgacgacacgcccgacgagttggagcggatgaaccgggagcgataccgggacctgaaacggcgggctttctgggctgtcgtgctggcgattccggtggtcgtgatcggtatgttctttatggatatgccctacggcggtgcgattatgacgctgttgtccgctccggtcgtcttctggctgggacgcggatttttcgtgaatgcctggcagcagttgcgccaccgtacggccacgatggatacgctggtcgcattgagtacgggcatcgcctacctgttcagtctgttcaacctcgtttttccggagttctggctctcgcggggagtggaatctcacgtctatttcgaagctgcggcggtgatcgtcgccttcatcctgctggggcgcacgctcgaagagaaggccaaaggcgataccactgcttcgctgaaaaagttgatcggtctgcaaccaaaaaatgcgatcgtcgtcgctgcggacggtacgcagacggagattccgatcagccgcatccgggtcggcgatctcctggccgttcgacccggggagaagatcgctgtggacggtgcggtttgcgaaggcgactcctatgtcgatgaaagcatgttgagcggcgaaccgcttcccgtgcataaggagcccggaacgaaagttttcgccggaacgatcaatcagaagggcagcttccgctttcgggcggagaaggtcggagccgcgacgatgctggctcagatcatccgcatggttcaggaggcgcagggcagcaaggctcccgtgcaaaagctggcggacaaaatcgccggcatattcgtccccgcgatcatcggcatcgccctgctctctttcgtcctgtggctggttttcgatccgtcgggaggcatgacgcacggaatcctggcagctgtgaccgtactggttatcgcctgtccgtgtgcattgggactggctactccgacggccgtcatggtcggcatcggcaaaggggccgagaaaggaattctgatcagggacgccgtaagtctggagacggccggaaaaatcgacacggtagtgctggacaagacgggtacactgaccgaagggaaacccgtcgttaccgacattgtttgggcgaacggggacgaccgggcgaaagccgtctttttcagcctggaaaaactctcggaacatccgcttgccgatgccgtcgtgcactattttgcaggtgtgccgacgctgaacgtcgaacgattcggaagccttaccggaaaaggcatagaaggtacggtcgatggcgtgcgttacttcgccggcagccgccggctgctcgacgagcagggaatcgtcgtcggcaaagagttgaatatcgaagcgcagcggttgtcggcagaagccaagagcatcgtctggttcgccgattcggagcaagccctggctgtcgcggcgatcgccgaccgcatcaaggagagctccgtagaggccgtgcgcgaactgcaagccgccgggatcgacgtttatatgctgacgggcgatagccgggctgcggccggtcatattgcggaaaaggcaggcatccggcatttcgaggccgaaatacttccgcaggacaaggccgcgttcgtcaagcgtctgcaaaccctcggtcataaggtggcgatggcgggcgacggcatcaacgacagtgcagcgctggctcaggccgacttgagcatcgctatgggcgggggcagcgacattgcgatggacgtggcgcagatgaccatcatctcgtccgacctccggaagattccggaggcgattcggctttccaagcagacggttcgaacgatccgccagaacctcttctgggcctttatctacaacctcgtaggcataccggtcgctgccggggcgctctaccctgtcagcggctttttgctgaacccgatgatcgccggggcagccatggcgttgagtagcgtcagcgtggtagccaacagcctgcggctcaaataccggcgttaggcagcgcatctcgatataacaccccggtcgaacaaaccaattttgttttgccggggattatattttgagggcgacggataggattttggcccggaaatctttacgtgcaatcccgcatctatctttgtagaagataggatgcgccccggaaaactgtgaacaaattcccgttttctctcggctttccgtatctttgactccgtcccgcttcggcaaaatgcaaataaaatttgcttttgccgaagcttaatcccaatctttgacttcgtcttagatactccgcctcggcaaagtacaaataaatttgtttttgccctcggcttaatcgtatctttgcagcgaacgaactgctcatcgacgggacatttcctgcagcgtgttccgtgtctgtctttccgacggggcacgtattttgttcggaaaaacaaagaagagttgaactatggaatttttgatggaatatcatctggccggcatcatgatcggtgtcgccacgtttctcatcatcggtatttttcatccgctggtgactaaaggcgaatactatttcggagtgcggatctggtggattttcctcctgatgggaatcgcggcggtcatcggttccgtactggtcgaaaacatcgtctggtccaccttgttggcagtctggggcgcctcttcgttctggagtatcggcgaattgttcgaacagcgcaagcgggtcgaaaaagggtggtttcccaagcggcctgaaaaaaaggagcggtagtccgtcgctccttgtcggaaggtttcctccgcagccgttactgccgaagctaatggatgctttcgtgcgggagggtttgcggatgttcttttttcttggcctgaagaatgacgatgatgaccgccgtgataatcagtatcaggcccgaggcactgtcgaggccgaacttctccccgaaatgcagcaccccgacgagtactgccgtcagcggctccatcgaaccgaggatcgatgtcatcgtagaaccgatctccttgattgccagaacgagcgtcaggttggatacgacggtcggcaccagggccagcaacaggaggttttgccagagatgccacttgccgggcagcggagcaccggtcgtggacagagcgtacacgaggaagaagcaggcgctgaaaagcaggacataaaaagcctggatcatcggatcgagccgggaaatacggctttttttcacaccgacgatatagatcgtgtaggtcagcacggtcgctcccgcgaacccgacgccgacgatggcacggtcgctctgcggaccgccgatatcgccccacgaaagcagcgccacacccaccagtgagatgaggatcgcaaccagcagccagacggaatttttttcgcggaaaaacagcgtcatcacgatcgccacgcccagcgggtatagaaagttgatcgtcgtggccacactgctgggaatgtaggtgtaagaacgcaacagcccgagggccgtcacggaatacatcgcacccagaagcaacagcgtgccggtttgcggccacgtaatacgaagcggccgccgggtcgcaagggcgatcagccccatcatcgcggcggccagtccgaagcggtagaacaggatcgccggggaggacatacctccttgcagcagcggaatcgaaaacagcgggatcaacccgaacgtagccgacgaaacgacggcatacagcacacctcgcaaattattcataacaatctattttcggaatgcgcccatcaacgccgacgcaaatctacggagttttttggataattctgccccgtatcgtatttttgacgggaaatggagaaattttcgaaaatcatcgttctgacaatcatcggattgtctgcagccggcgccctttacgtctgttgctcccacacgctgtcgcatcggagccggacagccgaaatcgacataccttccaagccatccctcccggaggtacggcgtgcccggctggtcttcgccggggacctgatgcagcatacgccccagctcaccgcagcgcgtacgccggaaggcgatttcgatttcaatgcctctttcgactgggtgcgggagcgcttccgtgcggccgatgcagcgatcgtcaatctcgaaaccaccctttccgaatccggaccctatacgggttacccctgcttccgctcccctgcggctttggccgaggcactcgactccctgggcgtggacattaccgtactggccaacaaccactgctgcgacggcggatcgaaaggcatccgtacgacgatccgggaactcgaccggcacggcatcgaacatacgggcgtttttctggacagctcggatttccgggcgaggcatccgctccgtttcgaagcgggcggcatacgtttcgccctgctgaactacacctacggtacgaacggtcttccggtcccttccggattgtcggtcaatcccatcgacacggtgcggatcgccgcggacctggcggcggtcgagcacgacggcgtggattgcgtgatcgcctgcatgcactggggcaacgaatacgaacgtcgaccgaacaaggtgcagcggcagttggccgggtttctgcgaagacacggggtcgatctgattgtcggcagccacccgcatgtcgtacagccttacgaacaggacagtaacgggatcgtactctattcgctcggtaatttcgtgtccaaccagcggaagcgttattgcgacggcggaatcgtggcgaccgtcgaggtaacccgttctcccgacggttcgctgcgctactcgctcgaactgacgccggtgtgggtcctgacacccggctaccggatcaccccttcggaggtcggcgacaccctctccatgccggccgattcacggctgcggtacgagcgattcatgacggatacccgcctcctgttggggttgtaaccgtttccattttggattttccgttcccgtttcggtggataatgccttattatcgcttttcatccgcatatctccggtacgacctgtccaaccgaaaaaagccctggattgtataaaaagcccggatccgctgaacggatccgggctcgttcgataaaagaactccgttaatagttgtctttcttgggttcgaagtatgcctgcgggtgctggcatgccgggcagattttcggcgcttcctccgcttcgcagataaatccgcaattgcggcactgccaccagatcttgccgtcgcgcttgaagaagttgccgtccgtaatgcggctcaacagcttcagataacggcgctcatgctccgcctcgactttggaaatctgcttgaatgcattggcgatttcggggaagccctcctcttcggctactttggcgaagtcgggatagagcacgtcccactcctcgttctcccctttggctgccgccagcaggttttcagccgtggtgccgatccggccggccggataactggccgtaatctccagatccccgccttcgaggaatttgaagaaacgcttcgcatgctctttttcctgatccgcagtttccgcaaaaacacctgcgatctgctcgtaaccctctttcttggctacgcttgcgaaaaacgtataacgagtccgtgcctggctctcgccggcaaatgctttgagcaggttctgctccgtcctggtacctttaacacttttgctcatactgaaaataatttatttgtttgtgtggttgatttctctctacaaatatacgataaacgaacgggaaaagccatcgataaccgttatttatttcttatgttcgcattggaattttttatatccgttgcattttgccgcaggaatatttggaccgcgacgaattatgtcgtatttttaatcaaatattatacccaattcccatgaaaaagatcctgctcttgtttttatcctgtttttcgtgcacgattgcggaggcccaaaccactcctcccctatttcaaggttcggacgatgttcagctgttccggcaagcgcttatggaacgtgtgactgaggtttactatagcgacggctatactcctgatgaccttattcactacttctggatgaattttaccatcgatacgctgggacgctgcatcgatctggaaattcccgacacctgtcgccgccaaacgattatcgtgaaagaacggacattggagttgcttcgcacggcgttggccggaatcgattcttttcagcccgcgacggaaaggggcgaaaaagttccttaccgacagacgatggaatacaattttgcctatatccctgaagtaactaccccggcttgttttaaaaagagcgagccgaatgatttgactgtgtttgaaaaatatattgcaaaaagagttgaatatcccgaagagcttcggccatggggtgtttccggccgggtaatcatcgtctttattgtcaatacggacggttccgtcgaaatcgataaagtattggaatcgccgcatccgaaaatgagttatcgtgttaagaaaattattttatcgacttccggcaaatggacacccgcgacctattttggcgctcccattcaacagaggtttagtattccggtcgatttcaggttaagataaaacatttacattatgagaaaaataatttctctcattgtatattaactttagttattctaaatttgagtaattaagacatcagagtatggaataagtccgatctctcattggtctgcgagaccgaaaagcatgttccgaccccatactctttacatcagaatccggatagttcgtaaggtgcatgaacccgtatttgcaatgagggatcaagatgtaagcgatgtcattaaaactaaaaaccgaacggccatgcagtacattggaatcgacgtgagcaaagctacattcgtggtggcttactcctccgacaagggcggggaaatccgcacttttaacaacacgaccgcagggatcaagcagttcatcggaactctgcccaaagacggtagtatccactgtgtcatggaagccaccgggaactacagcgcattgctgctgtatatgctcaatgtcgcagggattactgtcagcatggaaaacccgctgaaggtaaagaacttcgccagagccatgctctccacggtcaagactgacaagatcgacgctcggctcatagccctgtacggtgagaaaatgaacccgcagcctttcaaggtacaaggagaagccatcctgcggctccgacagaagagaacggtcatacgtcaacttaccaagcagattaccgccatgtcgaaccttcgtggctctctcgcttgtctgcctgttccggacaaaggggcgacccataccgtagacgaaacgatcaagttccttgaaaagaggcgcgacaggcttcaatcggaactcacggatcttgtcgaagtcgagttcagcaggcaacttgcactcctgacgactataaaggggataggcataacgctcgccacggcacttatcctcacaacaggtggtttcacctacttccaaaatgccaagcaggtgtcccgatatctcggtatctgtcccacttacgaacagtccggtacgtccgtaaacatcagaggacacatcaaccgaaacggagacgcatacaccagaggtcttctctatatcgccgcttggcctgccagcaggttcaatgcccaatgcaaagagacttacacgaggctcaggcaaaacgggaagcccggaaaactcgccatgatcgctgtagccaacaagctcgtcaggcaggcttttgcggtcgttgcccatgacaaagagtatatcgacggctttgtttccaacagaccttagaataaaccatcctccgatatttttacctttttttcgcattttttaatatagttcgtgctttgcctgataagtttgccggcagcagcgcagattattccgccgcgatatgcagggtcggacgacccggatgtttttcgcaaacaattcgagaaaaaggtgacgaaagtcatgaagcgggacggctaccgaatcgaagaactctcgcatgaattgcttatgaagtttacgatagacacgctgggacgctgcgtcgatgtacaatatcccgattcgctgggcggagtgcgattcaatccgacccagcgcagccgggagctgttgaatactgccttatcggaattgaaccctttcaccccggcatacaaggacggccgaaaaatcccgtatgtgcgaaaaatgctgatcaatatgaatttcctgccgggagctttcgtcaagccgacattccggggtaaaaaggacggattgatggctttccgcgaatatttgaaccgaaatctcgtatatgatacgaagttgtacgaagcgggtgtgtacggcaccgtacgtgtcgagttctatatagagcctgacggcacaatcactttggtcggcgcatcggaatcacctcatcctgcactgacggaacacgtgcagaaactgattctcggcacatcgggacaatggacgccgcttctcgaaatgggacacccctgccggtatctgatctcctttcccgtaaacttcgatccgggcgaaagcaccagttatgccacaggcattccgttgtagtttttcaacaagagggcaacggtcgcactgcgatttgttcgcgtgcctttgcggaaaagccgtatttctgcggagaacaaataaatttggcgctccgcccggtttgcgttatctttgttcccaaatagattcggacccggacagatcgcgtttcggacaagtcgaaacaggttggcttgtagcgcgacctgcgttattccggtgtaactccgcaaataattcaaaaagaaaaatatggcagacgaaaaaatcatcttttcgatggtcggcgtaagcaagaccttcaccaaccagaaaaaagttctcaacaacatctacctctcgttcttctacggcgccaagatcggtatcatcggtctgaacggctcgggtaaatcgactctgatgaagatcatcgcgggtatcgacaagaatttccagggtgaagtggtcttctcgcccggttatacggtcggttacctggaacaggaacccaaactcgacgatgccaagaccgtgcgcgaagtggtcgaagagggctgcgcctcgaccgtagccctgctgaaggagtacgaggagatcaaccagaaactctgcgagccgatggacgacgaagagatggcccgacttatcgagcgtcagggcgaactgtacgaacagatcgaccacgtgaacggctgggagctggacagcgtactggagcgtgcgatggatgccctgcgctgtcccgacccggatcagagcgtcaaggtactctcgggcggcgaacgccgccgcgtggccttgtgccgcctgcttttgcagcagccggacgtcttgctgctggacgagccgaccaaccacctcgacgccgagtcgatcgactggctggagcaacacctgcaacaatataagggcacggtgatcgccgtgacgcacgaccgctatttcctggataacgtggccggctggattctggaactcgaccgcggcgaaggtattccctggaaaggtaactattcgggctggctggagcagaagacgacccgtatggctatggaggagaagcaggaatcgaagcgtcgcaagaccctcgaacgcgagttggagtgggtgcgtatgtccccctccggacgtcacgccaagtcgaaagcccgtctgtcggcctatgacaagctgatgaacgaagataccaaacagaaggaggaaaagctcgaaatattcatcccgaacggcccgcgtctgggcgatgtggtgatcgaggcgcacgacgtatcgaaagccttcggcgaccgggtgctgtacgagggactgaacttctcgctgccgcctgccggtatcgtcggtgtgatcggccccaacggtacgggcaagactaccctcttccggatgatcatgggactcgaacagcctacttcgggaactttcactgtcggtcagacggtcaaactggcctacgtggatcagcagcacaagtccatcgacccggaaaaaaccgtttacgaggtgatttcgcagggtaccgacctgattatgctgggcaaccgccaggtcaatgcccgcgcttacgtggcccggttcaatttcacgggcgccgatcaggagaagaagtgcggcatgctgtcgggcggcgagcgcaaccgcctgcacctggccctcgcactcaaggaggaaggtaatgtgctgcttctggacgagccgaccaacgacatcgacgtcaatacgttgcgtgcgctggaggagggtctggagaatttcgccggctgcgccgtcgtgatctcccacgaccgctggttcctcgatcgtatcgccacgcacatcctctccttcgaaggcgattcgaaagtggtcttctacgaaggttcgtacagcgaatacgaggagtggaagaaagcgcagggcggcgatacgcagccccatcgtgtaaaatacagaaaactggtggaataaaatggcacaaaaaccctccatacccaagggcacacgcgacttctccccgctggagatgatgcgccgccaatatattttcgacaaaatccgggacgttttccgcaccttcggcttcggcccgctcgaaacgcctgcgatggagaacctctccaccctgctgggcaaatacggcgacgaaggcgacaaactgcttttcaaaatcctcaattcgggggattacgccgccggactgaatgacgaagagttgcgcacggcctcccgaatttgcgaaaagggattgcgttacgacctgacggtgccttttgcccgttatgtggtgcagcaccagagcgaaatcgccttcccgttcaaacgctaccagatacaaccggtctggcgggccgaccgtccgcagaaaggccgctaccgggagttttaccagtgcgacgtggatgtcatcggcacccgatcgctgctgtgcgaagtggaactcatacagatcgtggaacgggttttccggacgctcggaattaacgtatcgctgaaggtaaacaaccgcaagattctgtacggcattgctgaaaccatcggacatgcggacaagatgatcgacattacggtcgccatcgacaagctggaaaagatcggattggaggctgtcaaggctgaattgacggaacgcggcatcggctccgatgcgatcgaaaagctgcaaccgatactcgaattgacaggcgataatgaacggaaactggctgtgttgcgagatgtcattggcgcctcggctgtcggactggaaggcatttccgagatggaaacgatcttcgggtacgtgaaccggctgggggtggagctgccgatcgagctcgacttctcgctggcccgggggctcaattattatacgggagcgattttcgaagtcaaggcgctcgatttcgccatcgggtcgatctgcggcggcggacgctacgacgacctgacgggcatcttcggaatgccgaacatgtcgggtgtcggcatttcgttcggtgcggaccgcatctacgacgtgatgaccggcctcggactcttcccggccgatctgggctgtgcggcccgggtgatgttcgccaatctgggcgaagcggaagagcatgcctcgctgaaactgttgcaggaggtgcgtgccgcaggtattccggcggagatatatcccgaaaacggaaagatgaaaaaacagatggagtatgccaatcgccggggaatcccctgcgtggtaatcgtcggcagccgggaactggaagaacgggtggcgacgatcaaggatatgacctccggcgaacagacccaggtgccgttcacccgactggccgaagcactccgttagataattagttatagataatccgaagcgcctgtccgagcggacgcggaatagccgccccggcggtagttgagagagcagagttatcggcggatacgccccgttccgaatgtgggtgcatccgaggcggtatctatggctctaccgaatcgccggaaagaagacggggttcacgcctttcctccctgctcgcagtcggaaatcatttcccggtgtttcgcggtacctgcttgggaggacgccggacggaaaaatatgcaatcatgtaattcgatatgaagcggagcatgtggtttttcgggctgttgctggccgtggcgggattatcatcgttccggacggccgatatcgccgtttcccggcccgaccgggcacagcgacggtcgctcgccaagctggagcggtcttacgaatatatccgcaagatgtatgtcgattcggtcgatatggcgccgctggtcgaggaggcgatccgcagcatggtacagcaactcgatccccataccgaatatgcctcggctgcggagatggctgaattctggagcctctatcggggtaagttcggaggaataggcattcagacccaatggatccgtgattcgctggtcgtaacctccctcctgtcgggaggggccgccgaagaagcaggcatccgtcccgacgaccggatcgtccgggtggacggacgcaccgtgaaggagatcccggcctccgagctcatctccgtcatgcggggagatgccggatcgaaagtaaaaatcctagtgattcgacgaggagtctgccaaccgattctgtacgaaatcgtccgacgggaaatacctctcccctccgtcgagctggcctaccgcgtcgattctgcggtgggatacatcaaactgatccgtttcggtcagaccaccatgcgggaggtgcagcgggcttacgaagagctggaccgtccgaaggagttgattctcgatcttcggggcaatggcggaggactgttggatcaggcgatcgctttgtccggctttttcctgcccaaaggctcgcggatcgtttcgaccgaaggccgcagcgtaccgtccgtagtccattccgcccgccggaatccggtatttccggccgaagggcggctcatcgtcctgatcgacgaacggtcggcgtcggccagtgaaatcgtgagcggagcgttgcaggactgggaccgcgcggtaatcgtcgggcgccgcagcttcggaaaagggttggtgcagcgccaatatctgcttccggacgggtcggccctgcgtctggtcgtcgcccgctatcatacgccttcgggccgggaaattcaacgtccttacgtcaaaggcggggatcgcacggcttaccgaactcatccgctgcccgacacgattccgtcgccggcctaccggacactccgcacgggccggacagtttacggcggcggaggcatagcgcccgacgtgtgcgtaatacaggatacggtgcaggcatcttatctgaacgccctgctgcggaaaaatatctttcccgaatttatgctgcactatctggaccgcaaccgggcagccctggaacgggattatccggagttcgcatcgttcgaggagcggttcgaagttcccgacgaaatgtatgaggagttgaccggactggggctggaacagggcgtaacacctccggcggaaggttccgatctcgaagcggggaccaggcgcctgctcaaagcattgctggcagagcggcttttcgaccggggagctctgttgcggatattgcatgcaagggacgatgccgacttcatccgggcgctcaatttgctgaaaaactgggaggcagaggggctgccgctcctggaagcgcagcatgagcggcaataagcggttgcatcacgttatttccgagagtcgcgtattcacgactcgtaattgagtttataattcggcctgccccgaaattcccttcccggaaggggtttgaatcgctgcacgcccaaagagtatataatcacggacaagaatttgcaggaaaacgaaatttgttttatatttacgtatggaacaaacgaataaccctcaaaatattaccttgtatggctgctctgaataccttccgcacggacggagaagatttcggcgaacagatcctgtcgaaagtcgtaaaagccggccggcggacctattttctggacgtgcgcgctacgcgtgcgaacgattattttcttaccattacggagagccggaagaaaacggcgccggatggaacggtcagttacgaccggcataaaatattcctttacaaagaggatttttccaaattcctcgaaggcttggaagaggtgatcgggttcattaaacgggaaaaaccggaattcttcgaagaagaacacccgaagccggaagaatatgcttgacagaaccggctgccgaaatttcggcagccggttctcatgaagacaggagtttatgaaggataatcgggtattgttgggtttcagcggcggaatagacagcttcgccgccgtcggattgttgcaggcggccggatatcatgtaacggctctgacgctcgacatgagaggcgattccgcattgttggaaaaggcgcgtctgcgtgccggagcactcggtattccttggcgaatgcggtcggtgcgggagcggttcgaacgggaggtggtggactattttaccgacagttacttccgggggtgtaccccggctccgtgcacgcgctgcaacagtcggatcaaatggccctgccttgcggcagaggccgacgcactggggattcgccacatcgctacgggacactatttccgcattacctccgcaggcggcaaacgatacgtcacccgtgcggccgacaaccgcaaggaccagtcctactacctgtgggacttgccgcaggagatcctcgatcgggtgctgactccgatgggaacggtcatcaaacgaaatatcgtcgaagaactcgccgaccgtcgggagagtatgggcgtctgttttctcgagggacgcccgtgccgcgacttcctgcgaagccgggataaaacggaagcgctccggcccggccccatcatcgactctgccggacatcggctcggcacgcacgacggggcggccctctacaccatcggccagaaaaagggcctcgacctgccgccgggctgggcggtggtcgctatcgacacggcggcaaaccggatcgtagccggagaagagaagctgttgttgcatcgtacgctggaagtcggggaatgtcgcctgatagagagcgacgaggtattcggtgcccgcgatatccgtgcggtgatccggggcatcggccgcaaccccgagggatacgcagcggtcttccctgccgcttcggggattcggatcgaactggaggatcccgcgtgggccccggccgccgggcagcccgtcgttttgtaccgaggggaacgggtcgtcggaggcggaatcctcgaacggtattattaacgaattattaaatcttcgttcgggatggattttttcagggttttatcccgaaaaaatcttgcgatgtttcccgcatatactatctttgcacaagcaaaacatcgccggaaacggcaatacccatgcggtgttattataatgccgtttttgcgaaacgtcgtgttttcgacgaacgagataacttttcgtgattatatactttagtgtacctctttgggagtaaagcgccttaagtcccttccgggaagagatttatgggcaggagcattactaatacaaccgggaacagcgaacagacacctctcggaattgtcaaaaggtacattgaaagatgaattgcctaactttttattagagcggattatgttcagatacgtgctgttggcgctgaaaggctgcgcaatgggaatggcggatgttgtcccgggagtatcgggcggaacgatcgcctttatttcgggaatttacagcgaactgatcgagtcgatcaaaagtttcaatccgactgcgttgaaattgctcggccggttcgaattcaggaaattctggcgccacatcaacggcagtttcctcttctccgtactgctgggtatcggtatcgccatcttttcgctggcacggttgatgacttacctgctggcgcatcacccgatcgaaatctggtccttctttttcggactgatcgtcgcttcggcggctttcgtcgcccgggatattcggaagtggaacctcacttcgctactgggactgcttgtcggcaccgcgctggcattctggatcacgatcgcctccccgacgcaaacgcccaacgactggtggtttatcatgctttcgggagctgttgccatctgcgcgatgattcttccgggaatttcaggcgccttcatcctgctgctgctgggaaaataccaatacattttacaggctgtcagcgaattccggctgggtgtcctgctgcttttcgcagtcggagccgtcgccggtatcatcagtttttcgcacctgctttcgtggttgctgcgcaagcatcacgacctgacgatctccctgctcatgggtttcatggtcggatcgctcaataaagtctggccctggaaagaggtcgtggaaacttatacggatgcccagggtgccgttcacccgttggtggaacaaaacattacaccgggacatttcgaggcgatcggtcagaccgatgcccacttgtggcaggccgtagcactggcgctggcaggatttcttctgatctatgtcatcgaattcatcggcaagcgggtcgctcaaaaaatctccgctccccaaaactaaaaccttatgaaacgctacggtctgataggctacccgctgggacactcgttttcagcccggtatttcgccgataaattcgcacgcgaaggcattgcggattgccggtacgacctttacgaattgaaaacgatcgaggagttgcccgctttgctggaagcgcagcccgaactgcggggattcaatgtcacgattccctataaacaacagatcataccctatctggacgatctttcgccggaaacccggatgatcggggccgtcaattgcgtgcgctgtgaaggcagacgtctgacgggttataatacggatgtgacgggacttcgcgcctccctcgaaacatttctcggcggggagcgtcccgaacgggcattggtactgggcacgggcggggcgtcgcaagccgtgcaatatgtattggcacagatggaaattccgttcgatctagtatcgcggaatccggcaacgggaaattatacgtacgacgaagtatcggatgaagtaatcggttcgcatcggctcattatcaatgcctccccagtcgggatgcatccgaatgtcgaagaggcgccccgcattccgtacgctttcgtcacgccctcccactatcttttcgacctgatctacaacccggccgaaacgctgtttctgcaatacggagcgcaacggggagcacacacgtgcaacggactcgacatgctcgtagggcaggcggaagctgcctgggccatatggaaccgataagggatcctccgacacggctcgaccgatcttatcgaagccggtttcatttccgacgacttcgttctccggacctgaagctatgaatcgacgttttcggtacgcagtttcgccccttctccgaaccgttcgaaagtcgcaagcaacagaggttgttccgagccgttcataaggaattcgggggcttctttaagagcttcccgaactccttgaatagctgcaaaataataaattacggcattttgtcgagcaattcggcagcccgcttcgcatcttcctccttgaccacgagctgtgccggcatcgtgccgatgggatagatcgccgacatatattcgttgcggatcgtcgaaaaaattccggctccgtccagaatcgatttggccatttcggcttcggtgacagagttccactctctcaacacgactaatttttcatctttcataatcatcgctgtttaggtgatatatttattcagccattatatctttcgatgtaacagtttgacaatcgcagcatcgaatccgaaggacatttattcgcatcctctggccgcattaaaattcagacctttcctaaaatgcgggtactcggagtaccgtatttccaacgaggtccacattttttattaaatctttgcatcccgtcgtttttcggttcttcgaacttccgtgctcccggttccgaactccgttcgtacccggcgaaaacgggcgatgcaggaccggataaatccggctatcaacaagatacgttttttttcggaatgctgcaagatttttgccacatatttcctatcccgtcattttcaacaacgtagaatcgttcgggcaatttttacttggaaatacggaaattctttcatattttttcattacctttgacttcgccttaagcatcggcaagacgcagataaatttgcttctgcccgcgactttttcgtaccttcgcaaaggatggcccaaaaccataaattttcgaattatgccggatttcgtccatttacacgtacatacgcaatattccatcttggacggcgcagcggccatatcgccgctcatcaaacgagccaaagccctcggtatgaaggctctggccatcaccgaccacggcaatatgtacggcgtcaagaacttccacgacgtcgccaccgatgcgggcatcaaacctattttggggtgtgaaacctacgtcgtgcgcaaccgcttcgaaaaggacaaggacgagaaggcgggcgatcacctgattctgctggccaaaaacctaacgggttaccacaatctctgcaagatcgtatcctactcctttaccgaaggattctattacaagccccgtatcgacaagaaactgctggaacaataccacgagggattgatctgctgctcggcatgtctgggcggcgaagttccccaggccatcatgcgcaacgacatggaggaggctgaacaggtcgtgcgctggttcaaaagcgtcttcggggacgactattacctggagttgcagctccatccgtcgggcgatccgcgcaaggacgccgacgtgtacgagaatcagttactggtcaataaggccctgctggagctgtcggccaaatgcggagtcaaatacatctgctcgaacgacgtgcatttcattctggccgaagacgccgtggcgcacgatcatctgatctgcctcaataccggccgcgacctggacgatcccaatcggatgcgctatacgttccaggagtatctgaaatcgcccgaagagatggcgcagctcttccccgaccatcccgaagcactcgccaccacgctcgagatcgccgacaaggtcgaggagtacaaactcacccatgcgcctctgatgcccaacttccctccgccgccggagttccacatgcctttcgaggagttgcgcgaatcgctcgtcaagaagatcgaagatcaggaagagctggcgcgaatcgatgcctgccacagcgtcgaagaactcgatgcctgggcggaggagagcaaggagcgcagcgaaaagctgatgacggccaaacagttctgctacctgaaagacctgacctacaaaggagcccacctgcgctatggcgccgaattgagcgaagaggtcgagaaacgcatccggtacgaattgagtacgatcgaatggatgggattcccgggttacttcctcatcgtatgggactatatccgcgcggctcgcgaaatgggcgtgtcggtcggaccgggccgtggttcggcagccggatcggtcgtggcctactgtctgaaaattaccaacatagatccgctgaaatacgacctgctgttcgagcgtttcctgaatcccgagcgtatctccctgccggatgtcgatgtcgatttcgacgaggacggccgcgacgacgtgctgcattactgcgtgcacaagtacgggcagaaacgcgtggcccagatcgtgacgttcggtacgatggcgcccaagctggcgatccgcgacgtggcccgcgtgcagaagctggccctctcggagagcgaccggctggctaaactggtacccgacaaggttacgcccgacaagaaggccggagaaacgcctttcgacttctgctacaaggagtcgccggaactggccgccgaacgggaatccccgaaccagttgatccgcaatacgctcaaatacgccgaaaagctcgaaggctcgattcggcagaccggtgtgcatgcctgcggcgtaatcatcgggcaggacgacctggagaatttcgctccgatggctatcgccaaggacgccgatctgaacgtcgtggagttcgagggcaaagaggtcgagagcgtcggcctgatcaaaatggacttcctgggactgcgcaccctctcgatcatcaaggatgccgtaaccaacgtcaaaaacgtgcacggcatcgatgtagatatcgacaacattccgctggacgacgccccgacctacgaggttttcagccgtggcgatacgaccggcctgttccagttcgagtcccccggtatgaaaaaacatctgcgcaatctgaaacccaaccgtttcgaggacctgatcgccatgaacgccctctaccgcccgggaccgatggagtacattcccaacttcatcgcccgtaagcacggactggagccggtgacgtacgacatcgccgatatggaggaatatctgagcgacacctacggcattacggtttatcaggaacaggtcatgctgctctcgcagaagcttgccgggtttaccggcggcgaagccgatacgctccgcaaagcgatgggtaagaaacaacgtgcggtgctggacaagatgaagcccaagttcatcgaaggatgcagcaagcgggggcacgacgccaaaatttgcgaaaagatctggggcgactgggaagcgttcgcatcgtatgctttcaacaagtcgcactcgacctgctacgcttacatcgcctatcagacgggctatctgaaggcgcactacccttccgaattcatggccgcgctgctcagccgcaacctttcggacatcaagcagattacgctctacatgaacgagtgcaagcgcatgggtatccgggtgctcgggcccgatatcaacgaatcgctcaacaacttctcctcgaacaaggagggcgacgtgcggttcggcctggctgcggtgaaaggcgtcggcgaggcggctgtggagagcatcgtcgcggagcggaacaagaacggcaaattcaaggatatatacgatttcttcgaacgggtgaattatacggtcgtaaaccgcaaatgcctcgaaaacatcgcctatgcgggcggcttcgactcgatctccgggttccaccgctgcaaattcttcggcaccgatctgcgcgactccagttcgacgaccttcatcgagcaactggtacgctacgggcagcggttccagagcgagaaagacaatgcccagcaaagccttttcggaggcggcgaaggggtcgtggatattcagcatcccgtgattccggcctgtcaggactggagcacgctcgaaacgctgggcaaggagcgcgagatgatcggactctacctctcggctcacccgctggacgattacgcggtgattatccgcaacatgtgcaagacgcagctttcggatctggacaacctggaatccctgcgcggacaggagatcgccgtggcggggatggtgatcgccacgcagaacctcgttaccaagacgggcaaaccctggggaaaattcacgcttgaagactacaacggcacgcacgaatttgcgcttttcagcaaggactacgaaaatttccgcaaatacctgttcaacgactatttcctcttcatccggggcaaggtccaacccaagccctacaacgacaaggagctggaattcaagattacttcgatggtacagctctccgaaatgcgcgacacgatgattaaggagatgtatatccaattggcgatcgaagacatcacgcgtgaaatgatcgaggagctgacgcaccgcatcaaagagtccgaaggatcgaccacgctgcgggtgaatgtctatgaccgggatgcgcaggtaagcgtgaatatgttctccaaacggcacaaggtgagcctcacgtcgaacctcgtttcgttcctcgaggacaatgaaatcaaatatactatcgtttaatttataatcaaaacatctaaaaaattatggcattagcaatcacaaaagacaatttcgaggagatctccgcatcccagcttccggtagtcatcgacttttgggcggaatggtgcggtccctgccgcatgatcagcccgatcatcgacgagctggccggcgaatacgaaggccgtgcaatcatcggcaagtgcgacgtggataacaacgacgacatcgtgggcaagttcatggtccgcaacattccgacgatcgtgttcatcaagggcggacaggtcgtggacaaacaggtgggtgcctgcacgaaagccgacctggtaaagaaactcgaaaaattgctctaatactttcggcagacgagccgacgaaacacgtacggcggcggggaggattccctgccgcctttattttgtcaggaagcgtatgacagaatgtcatatcggaggaggtggcacaccgtttgttgaatccatgcgagagaatggctctcttcggcagcggcaactaaagtccgctggatcaggaaacgataaataattcaataaaaaaaataccataatacgatgaaaaacggaaaaatcggggttaccaccgaaaatatcttccccgttatcaaaaagttcctctattcggaccacgaaatcttcctgcgtgagctgatctccaactccgtggacgccacgcagaaactcaaggccctggcctcgatgggcgacgtaaaaggcgacctgggcgacctgacgatccgcgtttcggcggacaaggatgccaaaaccctgacggtcaccgaccgaggcatcggcatgactgccgacgaggtggagcgctatattaaccagatcgccttttcgagcgccgaggagttcatggagaaatacaagaaccaggcgattatcggccacttcggactgggattctactccgctttcatggtcgctgacaaagtggagattttcacccgctcctacaaggagggcgccaagacggtacattggagttgcgaaggatcgcccgaatacgaaatggaggaaacggccgagcagcgcgaccgggggaccacgatcgtactgcacctttcggccgatacgctcgaatacggcgaagattcgaaggtcgaagaactgctgcgcaagtactgtcgcttcctgcccgttcccatcgctttcggcaaggtgaaggagtggaaagacggtaaatacgtcgataccgacaaggacaacatcatcaacaacatcgccccgctgtggaccgtaaaacccaccgagatcaccgccgagcaatacaaggagttctaccacgaactctatcccataggtgaagagccgctcttctcgattcatctgaatatcgactatccgttccacctgacgggtatcctctacttcccgaagattcggaacaacttcgaaattcagaaaaacaagatccagctctactccaatcaggtgtatgtgaccgaccaggtcgaggggatcgtaccggaatacctcaccttgttgcacggcgtgatcgactcgccggatattccgctgaacgtatcgcgcagctacctacagagcgattcgaacgtcaagaagatttcgaactacatcacccgcaaggtggccgatcgcttgcaggagctcttcacgacgatgcgtgcggactacgaacagaaatgggacgatctgaagatcttcatcgaatacggcattatcaccgacgaaaagttcgccgagaaggcagagagtttcatgctgtggaagacgaccgaaggcaagtatttcaccgccgaagagtacaaggaggtcgtcaaaggcaaccagaccgacaagaacggtacggtcgttttcctctatgtggacgatcccgtagagaaaaattcgttcctcgaatcggccaaggccaaaggttatgacgtgctggttatggacggacaactcgacaaccactatgtcaattggtacgagtcgaaacacaaggacgcccgcttcgtgcgcgtggacagcgacgtgatcgacaagctcatccagaaagacgaaacgctcaagatgtccctgagcgaggcccagcaggagatcatgcgtcccgtattcgaaagccagatgcccaaggacgagaagatccactacaacatttcgttcgaagcgatggcggccgatgctgcgcccgtggtgattacgcagaacgaattcatgcggcgcatgaaggagatggcagccatcagcggcggaggtatgagccaattctacagccagatgcccgataacttcacgatcgccgtcaatggcaacaaccccatcgtgatcgacatcctggccgatgtggagaagagctacggcgacaagctgaagaccatcaccaaaaagatcgatgctgcggtcgccgaagagcgccgtttcgacgaagtggtcaaaggcaagaaagaggaggaactcacgcccgaggagaaatcgacacgcgaggagctttcgaagaagatcgtcaccctgcgcgacgagcgcgatacgcgtctgcgcgaaattggcggagagaacaagctcgtcaaacagatcatcgacctggcattgctctccaacggattgctcaagggcaaaaacctgacggagttcatccaacgcagtatttcgctgatcgagaaatagcagtaaattaccgtatatcgaagcggcggccccgaaaaggagccgccgctattttatatcggataaaatcgtacggaactctcatccggattcctccatcgacgaaaatccgaaatatcttcctcttgggaaaaatcgatacgatcaaccggcgattcgtaaaaaacagcgtgaattacaggtttttttccaacagctccataaatcctttcggagcccgacagggacgccgcgtatcgcggtggatgaaacccagaaccgtagaacccgtattgagcagctcgcccgcttcgttgtaaatttcgtattcgaacgtaatacgcgctttcggcaactcccggagggaaattcgaaccgtgatcaattcgtcgtaatgagccggacgcaggtacttggagtgtacctcgagaatcggcatcatcacgccgtccttctcctccatatcggcatacgaagagccgaaactgcggagcagctccgaacgggccgcttcgtaatagcagatgtaattcgaatggtgtacgatacccatctgatcggtatccttataccagactctgaatttgaaatctcttgtcagcatggcgttaaaactcgattagtatatggcccgacggcatttttcccgccgtcctcaataattccggagtacctttggcggttatccgaagcacaccgggcctaccttcgatccgcacgggatattcacccggaggcggaagcagcttgagagcctctcccgaggcgatatgtcctgcgcagtccacatcgcctgccaacagatacggatgcgacagcatccgggcagctttattcatctctccccgctcgatcagacgacgaatgaccgtcgaactcaccttctcggcatcgacatcctgtttctcgatctccgtcacacggaagccgaactcgtcatgcaatccgttgagcagccggtaatctccctccttgtcgtggccgaagcggtggttgaaaccgacgaccagattcttcacccccaccttcccgatcagatagtcctttacgaaactctcggaaggaatccggctgaaggcccggtcgaacggaatcacgatcagattgtcgattccgaaccggtcgagcaggtatatcttctcttcgagcgaagtcagcagccgcagccgctcctgtgtaccgagcgtcacgcggggatgcgggtcgaaggtcagcacgatactttctcccccgacagcggccgcctcccggcgaatccggtcgagcaaaacccggtgtccgctatgaactccgtcgtacgatccgacggtagccgccggcgaacggaacgaaggcagattttcgaagccgtggaatactcgcatcgacaccttaattattgtcgttattctcttcggattccttgacgcagtaagcaaccttttccagaagagtcgtaatatcgtaattctccacgtagataccttgcgggaaattcaggcgtgtcgaggtaaagttgagtacgcccttgatgccggcgttgatgatcggcacgaccagttcgggggcgactttggtcggcgaagatacgatgacgatcgagatgtcgttctcctggacgaccttctcgaaacactccatgtggtagcacggaatgttgtcgatcgcagtatccacttttgcgggatcgacgtcgaacgcgaccgtgatccgcagcttcaggctcttcccgttgaaatatttggtgatggcctgccccaggtgacccataccgattacggcgatgttcaccgggctttcgctgtcgaggatgttgctgataaaatcgatcaacacctttacatcgtagcctttcttggtatcgctcgagaacccgatcaacatcagatcccgacgcacttgcacagccgtaatgccgtgaatcccggccagcacgtgcgaaaaaatgtgggtaatgccctccctgtggcaggcgagcagcgtacggcgatactcgctgagccgctcgatcgttttttcgggaattccgttgggtattaaagccatttcaatctacggtaatggtgaagtccggtcggtagctcacacgcatccagttttgattgacgtggttggaccctccgggcatttgctggaacgtataagaggtttgcagcggcgtgtagcggcgtccctccatatcgtactggatgtcggaatacatcgccggaacgaagatcatcgccgcatcgtaaccccggtaagagtagagcgacggcaacgccccgaaagctttgatgtagtcgctgtcgaaagtcttgattacctcggcatcgcgtttggcgtgataagtcgagaagagcacgagccggtccttgaagtagagcgcccgatcgaggttcccgaagcggttccaacgcgaattgccgacgatcgtgaaacggggaggcgtcttgccgcgggctacgaggttggtattggccgaagcgatggctgccagaatacggtccacttcgagcccgctgtcgctcaaaacgatcagcaggttgtccttgccgttggccagcagcgacgaaagcccctggtcgccctccttgacagcgtaacgataattatgccgcgcgtaaggtacaccctgcagtgcagccagaatttcccgttcgaactcccggtcgttcttctctccgtagatcaaggtaacctgcttgtgctcaccctgagtcagttcttcgattttggcatatttccgtatctggggcggtgccatctgaaacaaaacatcgctatcgacgttcttgacatcggccagaggcgatacgaccggcacggcatactcctcggcatacccgattacggcaggaagttcctcttcgtaaaccgggcctacgatcaagcgggccgcccgaaaatcggcgtcgtccacaatcgtacggagtcggtcgctttcctgccgggtattgaacagatcgacccgaacggagtatccgtattgggtctttatcttttcaagccccaggagaaatccctggtagaaatcgagataattcggattctgtttgtcgccatcggtcatcggcaacaacagcgccacacgaagcggctctccactgctcaatgccagaaaatccacctctttcacctggggttcgaccgtcgtcaaggtatcgctctccgttggctcgggctgtccgaatcgctcttccggcgccggctcggtcacggactttgcatcgccggggactttcagcatacttcccgaacggaggtcttgcgctgaaataccgttcagtcgctccagattttcgaccgtcgtaccgaagcgacgggacagcgcgtacatcgtctccccgggagcgacgatgtggtacatataaccctcctcggcaaccaggttcaggcgatccttgtactgctcccaggccgccgtgttttccgctgcgtcggtcttgccgaccgcctttttgcgaatcaaaatgaccgaacccggtttcaggtgaatcggatccagaccgggattgtcctccatgatggtttcgaccgagatcgcatagcgcttcgaaattccataaagagtttcgcccttctgcaccgtgtgctgatcgaaggtcttcttcagctttttaggagaaagctgctcctgtacgacgacacccgtttccacgaccgggattttaaggctctggtcggctttgagcccttgagcgagctgcggattttcggcggcgatcacctgttccgccactccataggttttggccagcgaatagagcgtttccccgtgccggacgttgtggacatagtattttgcaccgttgatataaacgatcgtctgcgatttctcgatagactgcggctcctgggcataaaggttcgccccggccgtcagcaacatcgcggtacaacacagttccttcagcatagtctattgtttctcgtttttctcccggcagcggatttcggtaataattttcttggtatagagcgggaaatcgccgttcatcatccaggagtaatagctcggctcgacgcggaaaacctccgcgaccgaacggcccttatatttgccgaatccgaagacctcttcccctttttcgttatagaggatgcgtcctgcaaagtcggcggattccgcccgcgtggaaaattcagccagagccgcgacatcgttctgcaactccccgtaacggtccaactgggctttcagcacttcgtacgtcgccaacgtatcggcttcggccgaatgggcatccgcgagatccttgccgcaatagaacttataggccgccaccagcgtccgttgctccattttgtgaaagatattctgcacgtcgatgaatttacgtttgcggaaatccacgtccacaccggcccgcatgaactcctcgaccagcatcggcagatcgaagcggttcgaattgaaaccgccgaagtcgcatccctcgataaactgggccaacgacttggcgatttgcggaaaaagcgggcaatccttcacgtcttcgtccgtaatgccgtgaatggccgtagcttcggccggaatcggcattcccggattgatccgccgcgtacggacgatctcctcgccgtcgggcataaccttgaccatcgatatttcgacgatgcggtcccgtgcgatgtcgatgccggtcgtttccaagtcgaagaaaatgatcggccgcttgaggttgagctccatccgggttatgcgttaatcatcatcggcataagcagcatgagcgtcgcgctcgactgcttgtcgtcatagacgggtttgaatacgccggcacgggtcgaatcggccaattcgatgacgatggtcggcgtatcgatattggagaggatttccaccaggaacgtcgatttgaagccgatcgtgatattctgaccttcgtagctgcaactgatcgtttcgttggccgataccgagaaatcgatgtcctgcgccgtaaggttgatccggttgtcggcgatgtccatgcggatcaggttggtcgtggggttcgagcagacggccacacgcttgatgccattgaccagttcgatacgatcgacgagtaccttattgggattcgcggtcggaatcaccgcattgtaattcgggtaattgccttcgatcaggcggcacaccagcgtatggttcttgagctggaacatggcgtttttcgaatcgaagctcaccttgatcgcgtcttcctccttgagcagcaccgatttgagcaggttggccggcttcttgggcaggatgaacgacgaagccacttcattagcggtttccacctcgtatttcaccagcttgtgggcgtcggtacccacgaatgtaagcatcgaaggggccaggttgatatagacgccgttcatcacgggacgcagctcgtcgtcggccgtggcgaaaatcgtcttgttgatgccgttcaccaacacgtccacatcgagcgtcagctccttgcagtcggccgaaagagccgggatcgccggatagctcacggcgctggcgccgggaatcgagagcgaaccgcttttccaactcaaacggatctcccagttctgatcgttcacttcgatcgtcagaggcatttcggcgaactccttcagcgaatcgagcatcagcttggccggagctgcgatggtgccttcgctttcgactccatccacgcgaatcgagcccacgagcgtggtttccagatcggaagtggtcacccgcagctcatcccccttgagctccatcaggaaataatccaaaatgggcagtgtatttttattgctgattactttgccggtcgtagccaggagagagagcaatgcagaacttgatacggaaaatttcataggttttaatgtaatttattttctgttagtcttttgaatccttttgtttattggttgggtattccgacgcaggaaggatgtccgaatcattccgaggcagcctccgcgtctgaagtttcctatttcgtttttgcagcctgaaggaatcggtaaaccgtcctatcccgcgtcgctgcccggaaccattcccgaaatccggtcgattacaacgtcgccagtttgtcgagcgccgtctggatcatctttctgacgaaaggtttataatccgtgcaggcgtccagcgcgatccgctgggcgatgatcgtacagatcgtggcggctttgtgtcccatcagggccgccagtccggccagggcggaactctccatctcgaaattggtgacccggcgcccgtgatagtcgaacgactcgatcttctcgttcagtcggatgtcggccggttcgaggcgcacccagcgtccctgcggtgcatagaagccgggggcggcgatggtgatgccttcgatggtcacgtcgcggaaaagttcggccagcgaaggatccgcatcgatgaaatagggcttcggaagcaaatcgctccaacccgtatgtttcatgaaagccttttcgatctccaggtcgcaaacctcgttacgccccttgtagtaattcaacaggccgtcgaagccgaccgaagtgcgggcgaagacgaactgccccactttgatgtcgggctgaatggcacccgaagtacccaaacgaaccaatgtgagctgccgcttctgcgccttctcctgccgcgtggcgaaatccacgttggccagcgcatcaagctccgtaaccgaaatgtcgatgttgccaatgccgataccggtcgaaagcacggtcatccgcttgcctttgtaggtacccgtcacggtattgaattcgcggttggaaacgctgcactcctgcgtatcgaaaaaggaagcgaccatggctacgcggccgggatcccccacgaggatgacgatgtcggcaagctgctccggcttgaggtgcaggtggaaaatcgatccgtcgtcgttgattatcaattcggaagaaggtatggttctcatagtgtcggtttttatattttcataattggcataaaagtactacatttacctcgaatttcaaaaaatacgccacgataaattttccataaatatattgtatcccgctcggcggactacaagaaaagagatatttgcgacatgactctcatcaaatccatttccggcatccggggaacgatcggcggccctgcgacggagaacctcactccgctcgatatcgttaaattcaccaccgcctacgtgcgtttcatcgccgaatccgcacccgggaaaaggctcaaaatcgtcgtgggccgcgacgcccgtatttcgggcgaaatggtcggcgacatcatcgaaggcacgctgctcggctgcggtgcggatgtagtaaacgtcgggctctgcaccactccggggaccgaactggccgttacggcgcaccgggccgacggcggcatcatcatcaccgcatcgcacaatccccgccagtggaacgccctgaagctcctgaatgccgatggagaatttctgagcgacgccgagggcaagcgggtgctggcactggccgaagacgaaaacttcgttttcccggatgtggaccatatcggcaaggtcgtttcgcgggaatcttacaacgacgagcatatccgtcgggtattggccctgccgctggtcgatgcggaagccgtgcggaaacggcacttcaaggtggtcgtggatgcggtgaactccgtcggcggcatcgtcatacccaagctgttgcgggagctgggatgcgaagtcgtggagctcaactgcgaaccgaccggagagttcgcccacaacccggagccgctgcccgagaacctgaccgaaatatcgaaggcgatcgtccgcgaacaggccgatctgggcgtagtggtcgatcccgatgtggatcggctggccttcgtcagcgaagacggctcgatgtttgtcgaggaatatacgctggtcgccgtggcggactatatcctctcccgcaaaaccggcaatacggtgtcgaatctgagctcttcgagagctttaagcgatgtaacgcaaatgcacggaggagaatattttgcatcggcggtaggagaagtcaatgtagtcgccaagatgaaagaggtcggggccgtcatcggcggcgagggcaacggcggagtcatctaccccgaactgcactacggccgcgacgcactggtcggcgccgcgcttttcctgacctatctggccgaaaaaggtatgaccatgaccgagctgcgcaagacttatccggcctatttcgcctcgaagaacaagatcgagctgacaccggccatcgacgtggataaagtattgcgtgagatgaaatcccgttatgccaatgaaaaggtgaacgatgcggacggtgttaaaatcgatttcccggagaattgggtacacttgcgcaaatcgaatacggaaccgatcatccgcgtatataccgaagcgaaaacgatggcggaggccgatgcgctggcccggcggatcattgcggaaataaaacaaatttgtaatatataaatcgatgaaaaacattttattgatactcgctgccgcaattatgctgacagcctgcggaggaaactcccgccaaaagacgactgccggggtacccgacatgcacaatgccgaaaacgcactcgactaccagggaacttacaaaggggtttttcctgctgcggactgcccgggcatcgagattgaactcacgcttcacaacgacaacacctatacgatgaattccagctatatggatcgttctgaagagccgattcaacagacaggaaactatacggtaaaaggcaacctgctgacgctgcgcgccaaagtcggcatagggcttcccgcccccgagtactacaaggtggaggaaaaccgcctgcgccgtcttaatgcaaagaagcagcctatcaccggagaactcgcagaccaatacgtactcaccaaataatcaaattccatggataaagtaaagagttacatagagaagaacaaagaccgttttctcaacgaattattcgagctgttgcgcatcccttcgatcagcgcgcaatccgatcataaacccgacatgacccgatgcgccgaatggctggccgcttcgctgatgaaggccggtgccgaccatgccgaggtacttcccacggaaggcaatccggttgttttcgccgaacgaatcgtcgatcccaaagccaagaccgtattggtgtacggccactacgacgtgatgccggtcgatccggtggacgaatggcgcacctcgccgttcgaaccggtcgtgaaggacggacgcatctggtgccggggtgcggacgacgacaaaggccagcttttcatgcacgccaaggcgttcgaagcgatgtgcgcgaccgacagcctgccctgcaatgtgaaattcctgctcgaaggcgaggaagagatcgggtcgcccagcctctacaagttctgcgccgacaacaagaagatgctcaaggcagacatcattctggtttccgatacatcgatgatctcgatgcagataccttcgatcacctgcggtctgcgcggtctgacttatatggaggtcgaagtgacaggccccaacaaggacctgcactccggcctgttcggaggtgcggtggccaatccggccaatgtcctggcccgcatggtggcttcgctcatcgatgaaaacggacacgtgacgattccgggcttctacgacgacgtgcgcgagctgacggccgccgagcgcaaagccttcaacaaggctccgttcaaccttacagaatacaagaaagcgctcgaaatcggcgatgtcgagggcgaagcgggctttacgaccatcgaacgcacgggtattcgcccctcgctcgacgtgaacggcatttggggcggctatatcgaggaggggaccaagacggtgatcccgtcgaaggcttcggccaaaatctcgatgcgtctggttcccggacaggatttcaaaaagatcgccaagctcttcgagaaacatttcaaggcgatcgctcccaagagcgtcaaggtgaaggtcaagttcctgcacggcggtatgccctacgtggctccgaccgatatgccggcttacaaagcggcggaaaaggccatcgccgacacgttcggcaagaaaccactgccgttctattcgggcggctcgattccgatcatcagcggattcgaaaatatcctgggaatcaagtccctcctgatcggattcggcctggcggaggacgccatccattcgcccaacgagagctacggactcgaccagttctacaagggggtcgaaacgattccgctgttttataaatatttcgctgaaaagtaaacaggcaatacgatttcaaaaacgggacaatatccgaaggatatatcccgtttttcgtacattacagatacgtttgttcaaaaagataggatctttgatttcgttgtagatacttcgcctcggcaaaatgcaaatgaaatttgcttttgcgcccggctcattcgtatctttacaaaaaaagaagatggaaaggttcgaacgagttcaaacaacccacgctcgaagcatacgcggagggcacttgtgaactctacgatgcaaggagtaggaaaacagaaagttaagtttggctctcactcaccttgcactatttttatagaagataggattcggttcagcaatctttgcgtgcaagttcgcacgattgctcttccctttcactatctttgacatagtcttagataggatgcgccttggaaaattgagaacaaattcccgttttctcccggctttcactatctttgcaaatcgcaaaaagaatacattatgtgtggaattgtaggttacgtgggtaaacggcaggcttaccccattctgataaaaggacttcaccgcttggaatatcgcggttacgacagcgcaggactcgcactggtcaatcgggaaggagttctgaacgtgttcaaaagcaagggcaaagtcgccgatttggaacatttcgtcgaatccaaggatctggacggaacgatcggcatcgcccacacccgttgggcgacacacggcgaaccgaacgacatcaacgcccatccccactactccgattcgggcaatatcgccctgatccacaatggtatcatcgaaaattaccgggtgttgaaagaggcgctgatcgaaaacggttacacattcaagagcgacactgacacggaggtactggtcaatctgatcgaatacatccgtacgtcgaacaactgcacgttgctggaggccgtccagcaagcattgaagcaggtgatcggcgcatacgctatcgccgtagtggagaagggcaaccaagatcaaatcatcgcggcacgccgcagcagcccgatggtcatcggtatcggcgacaaggagtttttcctggcatcggacgcggcgtcgatcgtggaatatacggacaagatcgtctatgtcaatgacggcgaggtggtggtcatggaccgcaaccacccgctgaagatcgtaacgctcgacaaccaggagagcaagatcgacatcaagaagttacagctcagcatctcccaactcgaaaagggcggctatccgcacttcatgctcaaggagatcttcgagcagcccaagaccatcgtggactgcatccggggccggatcaaccccgagacgtacgacgtgatcctgtcgggcatcatggacaaccgcgagcggtttctcaacgcccggcgcatcatcttcgtggcttgcggcacctcgtggcacgcatcgctcatcggggagtacctgatcgaggatttctgccgcattccggtcgaagtagaatacgcctcggaattccgttaccgcaatccggtgatttatcccgacgacatcgtgatcgccgtctcgcaatcgggcgagacagccgatacgctggccgccatcgagttggccaagcagaacggtgcgttcgtctatggtatctgcaacgtcatcggctcgtcgatcgcccgagcgacgaactccggcacctacatccatgtaggacccgagatcggcgtggcttcgaccaaagcctttacgggacaggtgacggtgctcacgatgctggcgctgatgatcgcccgcgtcaaggggaccatcgatcaggagtgctcgcgcaagatcgccaagcatctgctcgatctgcccgccgtgctggaagaggtgcttcgcctgaacgaccggatcgccgacttctcgaagatattcacctatgcgcacaacttcatctatctgggacgcgggtacaactatcccacggcgctggaaggtgcgctcaaactcaaggagatctcctacatccacgcggagggttaccctgccgccgaaatgaaacacggtccgatcgccctgatcgatgccgagatgccgaccatcgccatcgcgacgccggatcacacctacgagaagaccgccagcaacatcgaggagatcaaggcccggggcggcaaggtaatcaccgtaatcgccaagggcgacgagcaggtacgcaagagttcggactattatatcgaagtgcccgtcgtggcggagtgtctgatgccgatcgtggtatcggtgccgctgcagttgctggcgtatcatatcgctgtcaataaagggcgcgacgtggaccaaccccgtaacctggccaagtcggtaacggtggagtaatgacaagacctatacaacaagaatcagccgcaacctaaaggttgcggctgattctatattgatgatttcggaaggtgcgttcgccgatctattcccgactctacccgcaatctgaacagcggcggaaactccatacggaatattctcgacagcaatccgtcgccaaaccatcaccgagcatactcatcggacacatcgcatcatcgtccagccggcataaatcgaggccgattcgaaccgtaagcacacacctccgcatcctttttacatgaaattcgatgcgatgtattcggccaacgtgaaatccttgcggacttcaggggcgccgatcgtcgtttcgtcggtttcgatcatcagcggctccttatccacgacgagtttcgagaggaaagcgtcgatcgcatcccggttgtcgtccatcggcgccgtagcgatgacgtgcgaggcattctcgaccgaatagaaatagtacggggagttcatcgtgcggagctgcccggcgatatatttcgagccgaagaaaccgacgccgctctcgcggatcacattatacggtacgttcgcatccgcatcgccgtgaaaaagcatcatcggcgcgggctgcgatgcccaaacgagctcctcgcccatttcgaagatcgccccggcgaaagaaacaatacccgcgtagcggaagccagcaggcaagtgctgcaccaatggcgaagcgttgcagagggcgtactctccatgcagtacggtgatcgctcccgcactcgatccgcaggccacgatctgcgaggagtcgataccccactcgtctgccttgtccacgataaaagcggtggcgtcgtagaggtcctcgacagccatcgaaatcgtccgggccataccgagcatcatattttcgggcgaaaggtcccccgaagcgacgacctgcttcaaacccaggcggtagtcgatcgataccacgtcgtacccctgattaaccatgtaatgaaagaacgggaggtatttttccgcatcgcgctccccggcgatgaagccgccgccgaaaacgaagaccagacagggccgggcatcgttctgctcgaccgaaacagccgtatagcgatccagaaagaggctgtccgcacccttcacggcatagagatccgtatatttggcgatccggggcgcctgctccgtacaggcggtaacgaacagcaccgaagccaacaagaggtaaattgcttttttcatattttctaaaattaaacgtagtcgtatccttcggtgcatctattcgggaatataacgatccacattcccaccgaaaagaggattcgggaaagagtcagccttacggacaaggccacgaaccgcagataagcacgtccttcggttcgatactgcgaccgtcggataaagtaataattatcaaatcatctcgtcataggcgaactgcacagcacggttcagaatatccgaaaaatgtttcgtcttgcggaattcgtgcagcgtgttcttcaataactccttgtccaacataaactccggcgcgaggcgttcggtgatatagacatccttgagtttcagccattcgtcgtacggactgccgggggcatagcctttcggcagacgcttgagtttgttcgactcgtcgaggacgaatcctttcgcctcacggatggctgcttcaatttccgcgccattgtccaggatctcgtcccgcacgctgcgcaacacctccggcagcggacagtaaagccccgtagtgagctgatgcccgtgcgaccaggagcgttcgtcccacaccggttcgacgtggaaatagtagcccgaatagccgcctttcttaccgcgtggagcgacgaaggcacccatgtgggtcttatacggcgtcttgtcggggctgaagcgggtgtcccggaagatgcgccacgtacagtccttgaccgtgagtccgcgcacggacggatcgaaagcggcgatgccgtcgatcagcttcgccgtgaactcctcgaaacaggacaaggcccgtttgtacatctccttgtgagagtcaaaccaggccttgtcgttgttttcgtgcaggagcgtgagaaattctactacctgcttcatgttatgctaccatgcgaagagcggatagttagccatcatggcattgacctccttgcgaacggcggcgatgttcgcctcgttctcgggatcgctcaatacgcggtcgatcagcgctacgatctcctccatcttgtcctccttcagaccacgcgtggtgatagccggagtaccgaaacgcagacccgaggtctggaacggagagcggctgtcgaacggcaccatgttcttgttggtggtgatgtcggcggcaaccaggcacttctcggccagcttaccggtcagttcggggaacttcgtgcgaagatcgacgagcatcaggtggttgtccgtaccctcggaaacgatcttgtaaccgcgcttggtgaaggcctcggccatcgccttggcgttcttctgcacctgcttctggtactccttgtagctgggatccagcgcttcgccgaaagcgactgccttggctgcgatcacgtgctccagcggaccgccctggataccggggaatacggccgaattgaggatctgcgacatcatcttggtcacgcccttcggagtcttgagtccccagggattctcgaaatctttgcccatcaggataataccgccacggggaccgcgcagggtcttatgggtggtagaagtcacgatgtgagcatacttaaccggattctcgagcagaccggcagcgatcagaccggccgtgtgagccatgtcgatcagcaggatggcgcctactttgtccgcgatctcgcgcatacgcttgtagtcccactcacgcgaataagccgaagcaccgccgacgataagcttgggtttgtgctccagagccttgcgctccatatcgtcgtaatccacgcgctcggtcttcggatcgagctggtaaccgatggctttgaaataggtacccgacatattcaccggcgaaccgtgcgaaaggtggccgccgtgcgccagatcgaggcccatgaacgtatcgccgggtttcagcacggcgaagaaaacggccatgttggcctgtgcgccggagtggggctgtacgttggcgtactcggcgccgtacagtttgcaaacacgttcgatggcaaggttctcgaccttatccaccacctgacaaccgccgtagtaacgtgcggcaggataaccctccgcatacttgttggtcagtacggagcccatggcctccatcacctcgtcgctgacaaaattttcagacgcgatcaactcgatgccgtgcatctgacggttccgttcctcagaaatgaggtcgaatacttgagaatctctcttcatgatcgatatatggtttattaagagtttttttcggattccaaaggtagtaacattttacgaaactacaaaaactaaatatttctaaatatttttgctatatttggcgacagaaaaatacaacgcatccgacaaacggaacatttttcatcggaacgggcacctctgcgatacgggcagccgacgcgggccggatttccgacagaaagatcgaatattacggataaaacgaaaaatttaaccatcaaaaaacatttcagcaagatgaaattactcgaaggaaaagtggccgtcgtaaccggcgcagccaggggcatcggcaaagcgatcgccattcagtttgcaaaagagggagccaacgtcgcgttcaccgatctggcgatcgacgaaaacggcaagaagacggaggaggagctgaacgccctgggcgtaaaagccaaaggatacgcctcgaacgccgccaactttgaagatacgcacaaagtgatcgatcagatcatgcaggatttcggccgcatcgacattctggtcaataatgcaggcatcaccaaagacggcctgatgatgcgcatgagcgaagcgcagtgggacgccgtgctgaacgtcaatctgaaatcggctttcaacttcattcacgccgttacgccgatcatggcgcgccagcgcagcggttcgattatcaatatgtcgtccgtggtgggtgtcagcggcaatgccggacagtgcaactattcggcttcgaaagccggtatgatcggacttgcgaagtccatcgctaaagagatgggaccgcgcggcatccgtgccaacgccattgctcccggcttcatcattaccgaaatgaccaacgccctgcccgaagaggtaaaacagggctggtaccagcaaattccgctgcgccgcggcggtacacccgaggatgtggcgaaggtggctctgttccttgcctccgacctctcctcttacgtgagcggacaggtaattcattgctgcggagcgatgaactgttaatctctctgcgatttcatacaagagagggaggttgacaagagtcggctttcctccttttttctaaaaaacatacacttatgaagctgaaaaatctacttttcgttttttgtctggcgctgctcgccggttgccagaaagatcccgacacagaaagtactccgacgcaggataccaataggaccgaaggagtgatccgcatgaagctcgaccgggaaacggccgaagcgctgaacgtgacccgcacccgcagcggcagggtactgacgggcaacatctctttcgatgaactttgcaatcggtacgaggtgaccggtatggagcggttgttcgccgacaacggctgcgccgagcgaacacgtaaggcaggactcgacctgtggtatgtcattcgtttcaaaggttccgccgagcagatcgccgaagacttcggggagattgccggcgtgaatcatgtcgaaattccgcgcaaaatcaccaaagtcggtgatgtgggccgaaagagcgcgactccatggcgaaaactgatggccctgccgaaggccgttccggcgaactaccctttcaacgatccgctcttcgcagagcaatggccgctttacaacgacggatcggtttctgaggaagccgtcgccggtgcagacataaacgtgattcctgcatggaagaagacggcgggccgcagcgatgtaatcgtcgccgtattggatgagggcgtggaatacacccaccccgacctggcggccaatatgtggagcgggatcggtaagaatttttgcagcggatacaacgaagacatcacctggggccaaggacacggaacgcacgtagccggtacgattgctgcagtaaacaacaacgatgtcggaatctccggcatggcaggcggaaccggaagcggcgacggtgtgaagatcatgacctgccagatcttccacccgacggacggacgttacgatgccagctcgaacgcgacggccgacgccatcaaatatgcggcagacaacggcgctgtaatttgtcagaacagttggggatacgcggccggctccatgtctctggaccagtggatcaaccaggatcgggcggtcaaggaggcgatcgactactttattcaatatgcgggcatgtcgcccgacggacagacgcagaccggccctatggcgggtggcgtcgtgatattcgcggcaggtaatgaaaacagcggacagcccggatatccggccgcttacgagccttgcatcagtgtggccgccgtctcctgcacttatgaagccgcttggtacaccaactatggtccgaccgtcgatatatgtgcgccgggcggaggagacgcagccgatttttccaggcctatccattataacgaaggttataacctgagcacgcttccgaccgacctgcaaaacgggatgactttcgtctatacaaatttcagaggagaggtggagacccacacgatcgactacgtctcggagactctcgggtatggctacatgcaggggacctcgatggcctgcccccacgtatcgggtgttgcggccctgatcgtttcgcaattcggggcaccaggattcacgaacgaacagctcaaagagaagcttttctcgacagcacgcgacatcgacagctatcagggaccaatatacaatggtcggggtacctatgccggaaaaatcggcaagctcgtcgatgcgggtgcagccctggattcgggcgaggtgccgcccgtttccgaccagccgacgatcacgccagccacaggacagaacgacaccttcacgctcggcgcctccgaacggaaaacgctgcaatatacgctggccggctacacggaatggcgtctggacgacccctcgggcaagatcgcgaagtcgatcgacggtaacgtagtcacgctgactatcgacgcatcacaatacgcagcaggaagctatacggcagaattgctggctgtgaacggaacaaagacagcaaaacgcaccatcgcctataccgttagcgagggcgacaatccgaccggtatttcaatggacttttaccccaacccatgtaccgacgtactgaacatactgccgaactactcgggagaaagcacgatccgtatccgtaactcaatgggaacggaggtaatgaacataacacttggacttatcaacgaggaacctgtcaaactcgacgtatcgggactcgcttcgggaacctatctggtacaagtaacctacaacggcattcaaattacccgcaccatagtcaaacgctaaaaacagacgttacaaattatgaaaaagatcttcattctcgcaataatcctcctgtcgggcacagcggcggcatcggctcaggagttcctgacgatcaaccccgatgtccgcacggcgggtatggccaacgcttcggtagcgactaccggcggagcttactccgtattccagaacgcggcctcgtcgctcttcagccacaacctgttcgaggtgggattctcctactcgccctggatgcgcgacgtgaaaaagggctacgacctgatggccttcggcggattctactccttcaaccacaaacattcgatctcgttcggcacccgtttttaccgggagccgaagctcagtccggacgacgaggactaccctttcattcccaaagacgagaataataacccaatcgtcggcatcgaagcgttccggccgctcagcgtttcggcggatctggcctacagctatcggatcggccgctatctgggtctgtcggtgacggcccgctacatccgctcctcgtacggagaactgttcacgaacaacgccctcgggttcgatgtcgcggcatacgcgcggattccgcttaaccggatgctcgaaggcgcctgggtgagtgcgggtgcgaaaatctccgacttcggcttcacgttcgacgattcgaattacgacctgcccaccaaattcagtgtcggcggttcgctcttcgccccgatccgggattcccattcgctcgaagcttcggtcgatctgggctaccgctactcttcctcggagaacaagtccttcgggatgggcatcggcgtggagtatgtgctgatgcagatgatcgctgtccgcggcggctaccacgtcgccgacagccacggatacgactacggtacaatcggtgcgggactgcggttcatgcatctggagctcgatttctcctacctgttcgccgccaagaagtgcccttggcgcaacacctaccaggtgggagttggactttacttctgattcggacgttcgacggaccaaatattccggatcgcaccggcatacagactcgattcgacgaaaaagagtgcattgaaaaatgcactctttttcgttctctgcgatttcgagctacctcttctccaactcgtcgagcagcgtgcggcagccgtcctcgagcatatcgagcaccagctcgaacccttcatgcccttcgtagtaggggtctggcacatgggtccatttcggatgttcccggaaaaattcagacatcctgtaaatacggtttcccgcttcacgggaaggggccagacgataaagattatggtaattggtatcgtccatcgccacgatgcgatcgaactcctcgaaatcccgcaaccgcacctgccgggcccggtgcgtcagcagatacccccgggcataggccgcattccgcatgcgggaatcgggttgttcgccggtgtgtccggcataggttccggcggaatccgcctccaacttctcccccagcccccgtttttcgaccatttgccggaagatgccttcggccgccggagagcggcagatatttccgaggcaaacgaacagtatcttatacttatcactcataatcaacaaattataatcacaaaaaaaatcagctcacaggcattttacaatcgatacgctcaacaattgtgcaaagatacgattaagccgagcgcaaaagcaaattttatttgcattttgccgaggcgaagtatttacatgcgtaaccgaaatatgaaaagcctgcgaacagatcgcaggcttttactattgtatctatcgagcgctacgcttacttcaaatactcccgataaaatgctgctatttcgtcgaacgggattatctccatcttgtcgtaaaggtcggtatgattggcaccgggtacgatgagcaatcgtttgttgtcgccttgcaatttcttgaaagcgtcctctcccatatagcgagaatgagccttctcaccgtgtaccaccatcactgcactgcgaatctctgcggcataggcaaggataggtgcattcaaaaaagcgaggttggaggtcgcattccacccctgcgtggaattgagcgaacgggcgtgataacctcgggaagttttgtaataagcatgataatcgcgtacaaactgcggcgcatcggccggaaccggatcgaccacccctcctgcacggacatacgaaccgttccgataatcttcggtgcgctgggcattgagccggcggcgcatctcataacgtgcgtcggcgttgtccgcctggtcgaaatatccgttggccgtacaacggctgatatcgtacatagtagatgcgacggtaaccttgatgcgcgtgtcgttagcggcagcgttgatggcaaaaccaccccagccgcatataccgaggatcccgatacgttccggatccacacggtcttcgttggcgagaaaatcgaccgctgcgctgaaatcttccgtattgatgtcgggcgaagccacgttgcggggcacaccgccgctctcccccgtgaacgacggatcgaaagcgatggtaaggaaaccgcgttcggcaagcgcctgtgcataaagccccgacgattgttccttcacggctccgaacggtccacttacggcgacggccgacaacttgccgacaacctcttttgggacatacatatcggcggcgagcgttacaccgaagcgatttacgaaaaccaccttgctatgctcgaccttgtcgctcttcgggaacgtcttatcccactcctgtaccagttccaactttttcatatccatattcgttttttggtttgtctgtgcaacggcggaaagaccgacaaacgccaatgccgccgcaattattccgattttcataaaacttaattttattccgtttttatacttctcacgatacgagccggattgccggccacgattaccccggcaggcacgtccttggttacgatggctccggctcccacgacggcatgctcgccgatcgtcacgccgggcaatatgacagctcccgcacctatccagacaccgtgcccgacgacaatgggtttggcatatacgttacgccgaacggccggttgctccgggtggttttcagtaacgagcagcactcccggccctatgaacacaccgtcttccagtgtaataccgccccggtcgaggaaggtacaaccgaaatttatgaacacacccctgccgacacgggtaaacttaccgaagttggtatagaacggcggaaacatacgtaccgattcgtccaatggctgtccccaaatacggccgagcagatcccttatctcttccggtgtatggtaaccgctattgagttgagccaccaacttcatcgtcttctcgaattctgcatagagcgacggatattcagggtcggtatcgaaaatcaattcccccgccctcattctttccaatatattcatacgattcatattttttacaaggcaaagttacacaggccccacttgccggtcagtatatgaattacggaatctataacccgaattacggatttcccgactctctgtcgttcggaatgaaaagactctttgcggctcgaccacacccctgttatggatcgtatttatccctcgatccgcaaacatcgaaaacccgcgatattcgactcgctgtcccactcgggatttttctcctcaaaaacaccgaaaaatcatccgatcaggcagaattacctgcgctgaacacacaaaatgattttttggaatacgaattgcttgtattttttcaatcggaattagttatacatatggaaaataaactgcaaacctggttcaaaagccacgaaggagccgattgggcgattctctatctgcgtctgttcatcggtacgatcattctcctgcataacgtaggcaaaatgcaggcctacaatgaaattatcaactattacccgtcgtggggaatattcggcagcgctttcattttcgttgcgatcgccacgatcgaagtgttgtgcgccatttcgctcatgctgggctacaaagtccgcctgtccgccgcgatcatggccgccagtctgctcatctcgctgttattcctcttccccggcaaaggattcggaacctccgaactgctgttcgtctatctgggaatccaggtagccctggtaatttcgggcggcggagtctattcgctcgacgccctggcttcggccaaaagagcgaagtctcaacgaacccgcaactcttcccgacgaatagaagattcaacaaaaaaataatttcgtatctttgcgcctaccaatctcctaaaatgtaataagtatgaaactgaaactatggcttcttttactgccgttgcttggtatgtcggttgccgtatccgcacagtcgtctcttccccgcaaggtatccgacgttacgttactcgatctgaacggcgaccctacgcagctcccttactggggtgagaaaaacctgatgatcttctatatcgaccccgaccaccacaaacagaacgaggatttcacaacggatatggaggaaaatcaccgggtggaaggcgaaaacctgttcggtttcggggtaatgaacctgaaagacgctccgatgattcccaacggtatggctcgcaacatggctcgcaaacgcacagcctccaacggcgctacggtactggccgatcaaaacaataccctgcgcgatgcctggcaattgggcgactgcaacaatatgttcgtcctgctgctggtcagcaaggagggcgacctggtgtttatgcgcaagggtcctctctccgatgccgataaaaaagagttttatcaagtcgtacagaagtacagataagacttctccatgtcgaaattcctgacggtcttttgcggattgctactcttcgcatcgcctctgtatgcacaagataataaggtgtatatcggagaaaacgatacgattcggtatagttacaccccgttgcagacggattcgatccctgcatcacagccgtcggacaccctggccgccgccccgaagaaaaaatcgttctggcggcggcttatcgattacttcggagagtcgagcacggacaaaactttcgaaaaaaagatcgacttcaccttcatcggagggccgagttattcgaaagacactcaattcagcctcgcggttatggctgcaggtctttaccgccttgaccgcacggattcactgacaccgccgtcggacatcacggcattcatcacgggcggtacgacaggattctacatggtgggaatcaacggtaacaacatattcagccacaatcgccaccgaatttcgtacaagctctccttctactcgcagccgaccgactactggggtatcggctattcggccggagcgaataatcccaaagggtcgtacgtcgaaaaacgctacgatgtggacgtaagatacctctatcaggtcgtacccaatatgttcatcggcgcctctgtcaatttccgcaacagccggggcatcaagttcacccggccggaatatatcgagggccaaaacccggagaacacgactacgggcatcggtgcgatcgtggagtacgatacaagggatttcattccaaatccctacaagggactttatttaagtctgaagggaacctggcggccggattttctcgggtcgaacgccaaatcgctctggcaggcgatattcacggcgaacagttatcatcgggtatggaaaggcggtatcgtagccaccgagctgtacggcgaattcaatgcctcgggcacaccctggctgatgaaagcccgcctgggtggttcgaagcgtatgcgcggctactacgaaggacaatacaacgacaacgatatgattaccctccaggtcgaactccggcagaatatctggcgacgtatcggctgtgtcgtatggggcggtgcgggtaacgtatttccctcgttcgaaaagttcaaatgggggtacaccctccccaactacggcataggcctgcggtgggaattcaaaaaacggatcaatatccgagtagattacggattcggcaagcacacgagcggattcctgttcaatatcaacgaagcgttctgaaagatatggcagttcacgaaaaaaaagagagtttcaaggagcataacgacagagggtccatcctgctggcgttctacttcgttctcacgctgcttatccccaacctcgtattactatatacggagccgtactccatctggtcggccgaagcatcgctctttatcccgatgggtttctacctgatgtggagcgccgtgctgaaacgctccggcatcatgatctggctggcctttccgctcgtcgtcctcgccgccttccaaatcgtactgctctacctgttcggcaattcgatcatcgcaacggatatgttcaccaacctgctgacgaccaatccggaagaggctggcgagctgctctcaaacatctatccatcgatcatcatcgtctgcgccatctatctgccgctactctggttcgcctcacgcgacatcggacaaaggcactgtctttcgaaaacggcccgcaagaatatcgccctgatcggactctcgtccttcattctcggagggttgttcctggccccggcctataaagtgagcgaagacaagcgggtattgaaaaccgacatttttccggtcaatgttttctataatatcggtctttgcggttcggagttccgcaagatgtaccgtttcgaacacacctcggaggatttcacataccatgcacggcgcacggccgaggcttccaaacgcgagatttacgtctatgtaatcggagaagcatcccgggccgccaactggcaactgtacggttaccacagggaaacgaatccctgtctgacccgcacagagggtctggtcgtattccggaatacagtcacacagagcaataccacgcacaaaagtgtgcccttgattctttcgtcggtaaaaaccgatcaacacgaagaactataccgtcgcaaggggcttccggcactcttcaaggagactggtttcaaaacctggtttctttccaaccagcgcccccagggagccatgatcgacaagttggccaaggatgcagacagcctggtgtaccttccggagccacgttacgatatgcaactgctggaagcgatgaaacgggttatcgccgaagacccggagcacgacctgctcatcatcctgcactgttacggctctcatttcacctatcaccaacgatacccccgtgaattcgcccgcttcctgccggacgacaacgtggccatcaaccgaaagaacgtcgagaaactcgtcaatgcctacgacaattcgatctactatacggaccacttcctctcgcagacgatcgaatatctccgctcgctcgaaaacgactgctcggcgctgctctactgtgccgatcacggcgaagatattctcgacgacgaacgggagcgcttcttgcacgcctcccctacgacgactttttatcagctctatgtcgccaatctgggatggttttcgccggaatatcgacgggaattcccggaaaaagtcgaagcggcccgcaacaacgaatccgcaccggccacaacccactccatgtttcaaagcatggccgatatcgcttcgatcgaaggcgacttcatcgatccggcctactcgttggtcagtccgacattcgactaccgggcaccgcgccgctatctgaacgatcacaacctggccgttcctttcccgaaaaccggcctgtcggatgaagacctcgaaaatttccgccggcacggtatcgatttaagctactaaaaaacagacgcaatcttttcgatattccggagattcctctgtatcgcataccgaattttctgccggttacggtctgctcctgttcgaacagtgaagaattatataaattatatgttattatgggaatgcagcacgccaaatttcctcaaacagggggggggaggttagcattacaaacacggtcacaggccaaataatcggatagtacatcgaaagatataattgccaaggtacacccataacaaagggccgcatgtatcccatgcgacccttcattttcaaaaaagtaataaacttatttcgaagcttcgacggaaaccttccggaactccttcatcagcttgctcaattccagagcggccttgcgtgcgcgggttccggctgccttgtttcctttttctacctgagcgttggcattacttacgaatacttcgtattcggcattgattttttcaactaaatttttcataatacgtataataatttggatgtatgtcgcaaagatataaaaaaatttcaatttccaattttttcgcccccaaaagcaacgcaaccataaaatagcctgaaaaaccgtactgagccggattatccccatatatggggatgtccgttcctgaaatatttccctatctttgccccgtaatttctgcaaaagaacatgcgtttatcggatttgaaaacaggccagtcggccacgattctcaaagtactcggacatggcggattccgccgccgaattatggaaatggggttcgtacgcggcaaaaaagtcgaagtggttctcaatgccccgctgcgcgacccgatcgtttacaaaatcatggactacgaggtttcgctgcgccgcagcgaagcccacatggtcgtagttatcaccaacgaagaggccgaaggcctgataagcgaagaatataacggaacacgcgaaggcgaccagctccatgaggtcatcgcccaaagctcaaagcggatcaacgtcgcactggtgggtaacccgaacagcggcaaaacctcgctgttcaacgctatttcgggcggtcacgaacacgtcggcaactacagcggcgtcacggtggacgccaaacgaggacactgcacctacagaggctatcgtttcgaaatcaccgacctgccgggcacctacgcactcacggcttactcgcccgaggaactttacgtacgccgccatttggcggaacatacgccggacgtaattatcaatgccgtcgtagcttcgaacctggaacgcaacctctacctcactaccgaactcatcgacctgaatccccgagtggttgtagcgctcaatatgtacgacgagctggaagcgagcggcgccgaactcgactacgacagtctgggacgaatgctgggtgtgccgatggtgccggtcgtcgcccgtcatggacggggtatcgaagccctgctggacacggtgatcgccgtctatgagaacgaggacgaccgtgtgcgtcacattcatatcaaccagggaccggttatcgaggagagcctgcggacaatcacgggagcattgaaggaatccagagaattgcccccgcaattcccgccgcgttatatcgcaatgaaactacttgaggaagatagttatataaaggatcaactgaagcatcacccgaaataccccgaatgggaggaagcgagcaaacgggaagcgcagcggatcaagaacctgctggatgaagacatcgaaacggcctttgccgatcagaaatacggattcatctccggagctctgcgggaaacctacaccccgggaaagaaggaacagacacaagtgacgaaaatcatcgacgctttcgtgacccacaagctctggggctttccgatctttttcttcctgatgtggctgatgttttactgcacgttcaacttgggagcctatccccaggagaggatcgagcaactggtgggactgatcggtcagggcgtggatgcctggatgccggacggagcgttgaaagacctgctcgtggacggcgtaatcggcggcgtgggaagcgtcatcgtcttcctgccgaatatcatgatcctatacctgttcatcgctttcatggaggattcgggctacctggctcgcgcagccttcatcatggaccggatcatgcaccgcatagggctgcacggcaagtcgttcattccactcatcatgggtttcggctgcaacgtaccggccatcatggccacgcgcacgatcgaaagccgcagcagccggctcatcaccgtactgctcgtccccttcatgtcgtgcagcgcccgcattcccatctatatcctgctgatcggcacattcttcgctgcctatgccagctgggtgatgctcggactgtatctgctgggaatcgtcgtggctgtcatcacggcccggctgatgcgccgttatctgttcaagaaggacgaaacgccgttcgtcatggagctgccgccctatcgggtcccgacaatgcgggctacgctgtcgcacatgtgggatcgctgcgcgcaatacttgcgcaagatgggcgggctgattctaatcgcttcggtggcggtctggttcttgagttattatccgacgccggacgcagccgccccggcagaaactatggaggaacattatgaaaactcctacctgggacaggtcggccaggcatgttcgcccgtattcgaaccgctcggcctgaactggaaagccagcatcgccattctcacgggcctgccggccaaagagatcgtcgtcagcacgctcggcgtgctctattcggaacagggcgacgccccggaagccgaactcgactctccgaccctctcccagcggctggtcgcaagcggggatttcaccccggcatcggccctcgcctttctggtcttcatcctgctttacctgccatgtatcgccacgatcgtagcgatcgccgcagagatcggctggcgctgggcctgtatttcggtactctacaatacggctttggcatggataatggcttatctgacgtatcaccttttctcctggttataatatgacggactggcaaaatatcgctgtaatagggatcggcatcctcgtcctcggattcagcgtccgctggattgtacggattgtccgacatcgagaggatgtcggatgttcgtgttgctcgaaaaccgaatgtccgcattgcaagtcccggcacccgaacaaggggtgttgttcctaaaaacagcgctgtaatctttcttccgattacagcgctgttttattcccccaaaaaaatcaaaatcgcatctatactggcaagtaaatacctttcaatgtatcccttatccgacggccgtttatttacaccttgcgacctcgtttataatttggcctctttcctaaaccctctctgaagagagtggagttgcctgctcccaaaaacattaaattatataacgactgctcgcagattccagcaggaaccctcggtcctgcgggtcgttatccgatgccaaattccacccgaaccctctcttgggccgattttcgacttttcctcgaagcatatcggtcaattccggggcaactcaggtcagggtattgaaatatacgattagctattttcccctaaataatttggaattttgttatttttcatttaatttagagatagcaaaatgcggaaaatagagctgaaaatatcgaaattaaccctcccatcaaaaaactggcccgattttccgatgcaggattacaacccttctgcaatatttgcaacaactcccgcagtcgtgctgcgggagttggtattgttacataagccccgaccggggccgcgtcgtagagttctacaacgcgaacagaatgaatatctgagctgtaagtacccgcaggaacatcacgacgggataaaccgtcgaatagctcaaggccggcatatcgttgcctgccgtgccattggcataagccagtgccggaggatcggtcatactaccggccataagtcccatgagcgtataataattcatcttcagccgggcgcgggcgaaaataccgaccagcaacaacgggatcaccgtaatcagcgcaccgtatccgatccagcggtaaccgccgccaacgatcgcatcgatgaacccgtcgccggctcccagaccgactgccgccaggaagagcgcaatgcccacttcgcgcaacatcaagttggcactcatggtagtataggtcaccaaatggaaccggggaccgaagcggccgagcaacagcgccacgatcaacggaccacctgccaaacccagcttaacgggctgcggcacgttcaacaacggaatggaacccaacagaacaccgagcgcgataccgacgaagatcgtcaccagattcggctcacggagttttttgagcgaattacccaatacggcggcgaccttctcgatcgcattctccggccccacgaccatcacgcgatcgccgatctgaagctgcattccctgatagggaatcagatcgactccggcacgattgacacgcgtaatgttgatgccgtagcgggttctcaagcgaagatcggcgaaagtcttgccgttgatctccggcttggtaatcagaatacgacgcgaaaccagcttcgaatccggcgtatcccactccttctcccccatttcgatccgattaccgatgaaagccgtcaccgcttcgcaatcttcggatgcacagacgaccaataccttatccccgagcgaaataatactgttgctgtccgccaatacgatcgtaccgtcgggatgagcgatccgggaaataacgaatttccgattgatcaactcattgacataggagatgtcgtgtccgctcaacatcttgttcgtacactcgatcgaaacgatttcggccatcttgtgttctgcggaaatcgcagcgagcgcctcatcctccttcccgaatttcacccgcagagcataacggatgaagatcatcgagaaaatgataccgatcacgcccagcggataagctacggcatagcccagggcaatactggggtcttcgactcccgaagcgtccgcataagcctgctgtgctgcacccagtcccggcgtgttggtcaccgcacccgaaaggatgccgaccatcgtgggaatcggcgtacccgataccaaatgaatcacgtacgccacgcctaccccgagcaaaacgatcgtcgaagccaggcagacgagcgtcagcccgccatgcttgaacgaagcgaagaaacccgggccgacctgcataccgattgaaaaaacaaaaaggatcagaccgaactcctggatgaaatgacgtacttcggccgggattcccataccgaaatgcgcggcgatgatgccgacgaacaaaatccaggtgataccgagtgagataccgcaaaccttgactttgcccaacagaatacctgcggtaatcaccaatgcgagcgtgaatacggtgtgggctatcccgccaccgacaaataaagagtagagccaatccataccattgattttaataaaatggcgcgaaacataccgcgcattgcgtccggaacggacatcgccgcatccgagcgttacgcttccgcccgaaaaaatttttgcaaaggtaatcctttttccggaagacaaaaaatcagtagaggaatttctcgatcaccggcagcagcagggccgtcatgatccccatcagtgccatagccaaaccgctgagcgccccttccagcgcaccgatttcgatcgcacgggccgttccgatgccatgcgccgcagaccccagcgcgaatccctgtgccataggatccgtgaccccgcaacgccgaagcagccagggaccgacgagactgccgaaaataccgacacaaaagacgacgaccgaggtgatcgtaatgatgccgccgagcggttccgcaaccgatacggcgatcggcaccgtcacggatttcggagcaagcgaagtttgcaaaatccgatccgcccccagcatacgcgccagataaaccacactaagaactccgaccacgcagccgacgacgaccgacacgagaatcggaagcaaccgtccccgcatatgctcgagttgttcgtacatcagataacccagagccacgaccgaaagtcccagtccgaaattgagcaactcggtcgaacgacggtaatgctcgtaaccgataccgaaaagtttcagataaaggatcatcgccacgaaaccgagcagcacggggtgcagcagggcgaacttggttcgactgtataacgcactccccaggcaataaaagccgaccgtgagggtcagcaacaccagatccgatccgacgaactgctccatcacgcctttttattcagtttttgaaaaacccttccgacgcagaccagcaccaacatcgtactcactccgcccgaaataacgatcgcccaaaaattatcgagcaggacttcgtaggataccatcaaccccaccccgtacgggatgaaaaacagggccatagcgcccagcagaaaacgagcggcgggccggatcatctccgcatccacgatatgcaggcagagagaagcgaacagcaggatcataccgacgatactccccggcagatacccgccgataagcagactgacgccgttccccagcgcccagcaaaaaagaatatagaaaagtcctgccagcacgtggcaaagatacgaataagccgagcgcaaaagcaaattttatttgcattttgccgaggcgaagtatctaagacgaagtcaaagattacgaataagccgagcgcaaaagcaaatttttatttgcattttgccgaggcgaagtatctaagacgaagtcaaagattacgaataagccgagtgcaaaagcaaatttttatttgcattttgccgaggcggagtatctgaaaccgagttaaagatacgaatttatccgtatcggagtactgctccggattacaaagaacccgcaaaagatcggaacacgacgcatccgatttacgacagactcatggatctctgtatccggaactgcgggataccccgcccgatcaaagaattcctcgaaataccgataaaaatagtattccccctccgaccgagtgctgctgaagtctgaaaagcgggatgaagctttgcaaagtaagatgccccgcatacaaaaagcgacgttctggaaaaccggaacgtcgccgaatgtggaggtggcgggagtcgaacccgcgtccaaacaaggaacccgaaagctttctacacgcttatccgccgtttcgtccttctatccgggtctggcaggcggcaacctaacccggatcccagttcctgaattttcgcacgacagccggaaccctccgccgtactatctctaaatgatcgataccccgtatggaaaaccgttaaagagcggaacggccttccgggatactcgtcgtcgaaccgccttggatccaacgattaagccaattttccttgaaaattaggcagcgagtgcatagctattattgccatttgtagttcgagtgttgatatttacgagccaccacacaatgctcgacgtgcttacaatcaaactctgcctgctgtcaaaaccggtcacccccttcgtagggatagaatttcattgaagtgagtacaaagatacgaaaaaccgggcagaaagccaaatttatcggaactttaccaaaatgtcctcgtcactattgaaagttttatacggaaccaatcaatcgccatataccatataaagttggaatatagcacaaccaatcagaatgatagctgtaattaaatgccaataactgggataaatcttttctatttcattattaggatctgttttgttcatcttcagacccgtaatgaaccaaagtaaactaagacttccaataagaaaaaagaaaaaaaccattcttcgattatattaaccaacgaattatatattggtattaagcaaagggcctaacaatcatacaatatatagcacaagcataaaaaaatagccacaaacagatgcaaaaaattcggataaaacttttccgtttcatctttgaactctgcttttttttgccttaaacgcaaaataaaaaaaagcaaactaatactcccaaaaaaaatacataaaaaagccattgctactgtcaatgatgttccaccacctaatgcagacattacctgcacgtatcgatataacaccgaaaattcgtctgcttattttccaaaggccccacctctgccttgtgcgcatccaacataaaaattcacccgatcggcattgcatacaagaatattttcacgtaccatgcctgcggaaccgctaccgtttcagatgcttacgcagcttctttttcagaacatcccccgttaatggtttggcaatataatcatcgcacccgacatcgagcgctttcgcacggtcgctgtcgtatgcatatgctgtgacggcaatgatgggaacggaacttcccgcctcccgaatctgccgcgtagcttccaaaccatccataacgggcatcttcatatccatcaacaccacatccggagcgaactcccggcacatgcgcaccgcttccgctccgttatgggcccgaagcacttcataccctttcttaagaatcagcgacaccagcagaaaattgctgtcggtatcttcggcaacgagaacgacgggcattttcccctccgaaacgcctggttgccgcatctccgcatcggaagcaaccgccgacacagaccgggtccggatgtaaggatgcgtaaaccaaaaacaagaaccctttcccggttcggagttcaggccgatacgaccgcccatctgttcgacgatactcttgctgatggccagtcccaacccggtcccctggacaaaactgttgagtttcacgaaacgctcgaagacagactcctgctcctgctcgggaatcccggtaccggtgtcttcgacataaaaggtaagcatcatcccgtcatcgcaccggtagcctaatgtcacagacccttcacgagtgaatttcaacgcattattaataaaattaatcaacacctgcgtaatccgggtcttgtcgcctaccaaccgacattcgggcagatgatcgccgaaacgcaactccaccggtttatccaggaccttgaggctcaacgaccgtacaatctcctgacacatctgattcacatcgaattccacatcgttgaattcgagcgttccggcttcgatcttcgacaaatcgagaatgtcggaaatcagcttcaacaacaattcgttattttcctgaacaatggctacatactcccgtcgttcgtcgggatcttcggtttcagcgatcagattcgaaaagccgacgatggcattcagtggcgtgcggatttcatggctcatattagccagaaaagccgatttcagacgatcgctcacttcggctttgttcttcgcttcgatcaaattcttctccgtttccttcaactcggtaatgtcgtaattgacacacaccatttcgatcttcgaaggatcgttattcaggggattgcgcatcacattgatacgggtccacttctgtcgtccgtccgcatcgatccgaagatcatggctgaaactgtcgatctcgccggctttcacctgtcggatggactccagaacttcagcccggtcggagaaattgacatgtttatacacaccgaggatctgatcgagcggcgtatcctccttctcgcccaggttataataccactgcggcacgccatacccctctttcgaaaccaggtcgaagcgacagtatccgaccttgccgaaacgactgaccagcgaaaacgagctttcgaactccgcgatacgactatgcgcccgattgatttccgtattgtcgatattgatcaggaagaaattgctcaaccgcccctgcgcatcgtaaagcatacacaccgaactgtatatttcgaggcggccctgcttggaggtaacataataaccgttcaaacgatcgaagggataatacgccttgaacgagaactcctcccggttccgcacccggcgccagacctcctcgtcgagaatgggattcttgaaaaaatcgaccccgagcacatcctccttgtcccgaatcccgaaaatctccagatccttgttattcagatcgacgagcaagccgttcctgtcgtacagttcgataccgacgggaatattgtcataaatattacgcaatagcttttcactgcggtcgagcgcctcgtgcgtttcatacatttcggtcatatccgaaagcaggcaaatcacctcctcgggagtggtcgaatacataacgacatgaacataccggccggaagccaacaaacggacctccttttcgacatgctgctccacctgcaatactttggcgaaaactttcaggtactcgggcatatcttcgatctccagctcgctcgccagccgccccacatagtcggcttgggattttccgataatcttttccgcagcataattcgaatcgagcaccttgtaatcgaccggcgtccccgtcttgtcgtaaatcatccggaaacggacataccccagcggcatgtaccggtagaggttttgcaaataatcgcgttcgatttgcgcctcccgcttcgaacgctgcaattcgatacagatattgatgatattgaccagcgatgcgaaccattggtaatcctcgttctgccaatcgcggtgctccccgatcacatcgattcccgcatacccccaaagtttatcacgaaatgtcatcggcagcacaaacagcgaaccgatattttgtgcagccagaatatcatgctcgttccttgcccgggaaggaaggtcgtccaaacaggaaagagcaataggactccttttttcgagctgctcgacccaccagggggtttcgtccatcgaaagtcgatcgaaccgatcccggccgctctccacgcccttgtccgtcacttcgtacgtacaaatatgcctgcggttatcccagtcgaactccgcgatataggtccggctgccacgaaatatcttgaggacatcggtcagaaccttgttgatcgcctcgtcgatggaaccaatatgaaggaaagaaagcagcgtatgcgaaatattgttcaaccgataaagaagcgtattcatccgctcgatcgagcaaagatcgaccggcaaagcctccctttcgctgatttcctgggcatatcccgaaacaaccagccccttgtcggctgccgtttcccggcgcaggaccttccagcggaaccacacctcaccccggggaccacacagcgaaaaaatctgctcggcggagaacaggctcgcatccgtggacatcaggcttttgagcgaagcccggaacggctctccgaccgactgcagaaaacggtcgtaaccgatctcggactcctcagttcctatcgtcttacagagataatcggacaacaaaagaacccgtcgggccatatctactttccaccacccgatcttcgtatcccacaatatctcctgcaacatggattcacttcccattatccccttattgtcaatttataccataattaataacaaaaatactattcattaccgggagttccaaaaaaaatacggattattgtccggcacgatgaccgaaacggactatttttcggacattttcattacctttgtggaaggtaggatatgatcggtgtaaaaaacagaagagtttgttttattctgccttcattttcattacctttgctcccgtccgaatcggagtgcgacgacacgaaacgaagaacattcgtcctgcatcggccgatcggcacacacggacaccacgaacctttcaaccaactcgactcatgggcgaacaaaacgtaatccggctgcgcggcgtaacgatataccacacggacgatcctttcggcagccgctccgaaaaaaagttgctgcaacagggagaactgatcttgtccgatctgaatttcgacatcaacgccggtgaattcgtctatctgatcgggcgtgtgggaagcggtaaaagctccttactcaaaactttatatgccgagcttcaactcattgaaggcgaaggatacgtcgcaggcttcgacttgcgaaaactcaaacgacgggacattccgatgctgcgacgcagaatcggaatcgtcttccaggattatcaactgctcaccgaccggaatgtctttatgaatctctactatgtaatgaaggcaacgggatggaaaaacgaatcagaaatccgcaagcggatcgacgaggtactcaaggtcgtatcactggaagccaaaggctacaagatgccgttcgagctttccggcggcgaacagcagcgtctggtcatcgcccgcgccctgctgaaccgtccccgcctgcttttggccgacgaacctaccggcaacctcgatccgctgacggccgaaggcatcattcggctgttccaggaaatcgctcgtcaaggttgcgccgtagtcatgtccacgcacaacacggccctcatcgaagagtatccgtctcgcacgatcctcttctcgaaaggcaagatcaaggaggttccggtacaaacgatgctgcaggatatttagcgaatacccgcacagacggaaaccctgaaacctaaattcatcattgccggacacagataatttcgactaaaaaacaggtttgggttatgaaactccgcactcttttccggttgttcctgttattggcggcagtggccccaataaccacggcaaaagccgacagtcttatcatcggcacagatacgctcagactggacttacattggttggacgacactccgctggacgagttggcccgcgacgaccgggcattcgaaaaaaaattccaggcacttattcatcagcctaccgtagaggggttcgttatctacatagacggtgatcacgaacaccattcctactggcgactgatcgacgacaaactctaccgggatcacacgatacgcaattcagactactccgaaatagatttcagcggcattttcgtccgcgaccataccggttattatccggccaccttctattcaggcacacttcctatatcaggcatactctaccaggacggaacgaagcccatattcgtcttcaaggaggggcgattgacctatacgaattggacatatccttcctttccatgcccctctccgatgctgggcgatctgctgtttctgcacttcgactacatgcaattcgcacaattcacggacgggctgtggacctgttgggtgcgtatcctcccggatccatccggaaaccccattaccatacagcccctgatagtagctcataaaagcggaatcatcgatgcttcggatgccgctaaaaaaggctgaaaactgcaatcgccgacagtctgaaaacagtagatttcatttgcgacgtaaatttttcccggggcagcatacaggccgttctcaaaacattcgaaattccccggccgatattataccgcaaagaaatcaggaaaaacggccgacagttggtcggatatgaaaatgcgaccggacgtccaatcgtccctttcgggaaatacgcccgatgccacacacccatcataagtgaaaacagaatcgggatcgtggaaacagacgaaggaaagtttatagccatagaccatacgggtaaaaagctgttcgaaatcatgtttcagtccccggtactttcggtcgaagatttattccggtacggttatttcatctatgtcacccgaaacggccgacaaggagtcgccaccatcagcggattgcgatacacgcaaccgacccacaagccgatcaatctctccgacgtcgatcgggatgctatcaaagctcttatcctctgatccggctacgcttccggtatccgatgtttcgcccgaataagcaccccgcaaatccgactgcggcaaaaatcaatggcaaagggtgcttgattattgcatcttacgaaacttttccgtatatttgtacgatatatttaaggtcaatatgagtactgaagaaaaagagataaagaagcaggaagaggagtattccgcctccaacatccaggtcctcgaaggtctggaagctgtccggaagcgtccggccatgtatatcggcgacatcggagaaaaaggtttgcaccacctggtttacgaggtggtggacaactcgatcgacgaggcgttggcaggacactgtaccgacatcgacgttacgatcaacgaagacaactcgatcacagtcaaggataacggccgaggcatcccgaccgacttccacgaaaaggagggcaagtccgcactcgaagtcgtgctcaccgtgctccatgcgggcggcaagttcgacaagggcagttacaaggtttcgggcggtctgcacggtgtgggtgtttcgtgcgtgaacgcactctcgacgctgctcatcgccgaaatccaccgcgacggcaaaatattccgccaatcgtacagcaaaggcgctccgacttcgccggtcgaagtgatcggcacctgcgacgatcgcggaaccacgatcaccttcaaacccgacggcagtatcttcacgctcacgacggaatacaagtacgacatcctggccaaccgcctgcgtgagttggcattcctgaacaaaggcatccacctgaacctgctggacaaacgccagcgggacgagaacggcgaatacgtcggcgaccatttctattcggaagagggcctcaaggagttcgtcgaatacctggacgccacgcgcggtcaggccatcaccgaatcgatcatctacatcgacaccgaaaagaacggcgtgccggtcgaggtggccatgcagtacaacgactccttctcggagaacgtacactcctacgtcaataatatcaacacgatcgaaggcggtacgcacctgacgggtttccgccgcgccctgacccgcacgctcaagaaatacgccgaggattcgggcatgctcgccaaactcaagttcgatatcaacggcgacgacttccgcgagggtctgacggccgtagtttcggtcaaggtcgcagagccgcagttcgaagggcagaccaagaccaaactaggcaacgacgaggtgtcggcagcggtcgatcaggccatgtcgatggctctgagccactacctggaggagaatccgcgcgacgccaaagccatcgtacagaaagtcatcctggctgcaacggcccggcacgcggcgcgtcatgcccgcgaaatggtgcagcgcaagaccgtgctttcgggtgcgggtcttcccggcaagctggcggactgttcgagccgcgaccgttcgatcgccgaaatcttcttcgtcgagggcgactcggcaggcggtacggccaagcagggccgcgaccggaacttccaggccatcatgccgctgcgcggtaagatcctgaatatcgaaaaagcccaggagcaccgcatgtgggaaaacgaggagatcaaaaacatgtttaccgccctgggtgtgacgatcggcacggaggaggatagcaaggcgctcaatctcgaaaaactccgctacgacaagatcatcatcatgaccgatgccgatgtcgatggcagccacatcgctacgctgatgcttaccttcttcttccgcaagatgaaagagctgatcgaaaacgggcacgtctatatcgccaccccgcccctgttcctcgtgaaaaagggccagcaggagcgctattgctggacggagaaggaacgtgacgagatcacggccgaaatgggcaagggcgtacacgtccagcgctacaaaggtctcggtgaaatgaactcccatcagttgtgggaaaccacgatgaacccggacacccggattctgcgcaaagtaaccatcgacaacgctgccgaagccgaccgcgtattctcgatgctgatgggcgacgaggttcccccgcgacgcgagtttatcgaaaaacacgctcactacgccaatatcgacgcataatcgaaaattacaaaggattgcaccccgcaggggagcaatccttttccatatccgtttggctggcgggagctaccccatcgttcgattgcgacggaaagctgccccgatgtgttcatcggaaaggacgaagttggcagcacatttggagttcggccatacggcaaacgggaaatgcgaaaacgaaacattccgtttttttgacgtaatttatccgaaatccgacggcgaggggaaaagagaaaatacagattccgagacgcttcatcggacagatgaaatcggaaatacctaccgacttcgtgcgggtgcaaatacgggaaaaaatcacaccgttttcggagaaaaaccggtcaggaggttatcgcacgcagaaaacgggaaataaaaaagaaccacaaatcgggaattatgaatgtgacagtcatcggtgtcgcaggcggcacaggatcgggtaaaagcacgctggtaaaacgattgcaggaggctttcaaggaggaagaggtagtcacgctctgccacgactactactacaaagcccatcccgaactgacgtacgaagagcgcacgaaactcaattacgaccaccctcaatcgttcgatacggatatgctcgtcgaacacatccgcacgctgaaaaacaacgttccgatcgaacatccggtctattcgttcgtcgatcacaaccgaacggccgaaaccgtgctggtcaaaccttcgaaggtaatcatcgtcgatggtattctgatcttcgagaacaaggaactccgggacctgatggatatcaaggtatatgtcgatacggacgccgacatccgcctcgcccgccgcatcctgcgcgacgtatgcgagcgggggcgcaccatgcagtcggtcatctcgcaatataccacgacagtcaagcccatgcacgaggagttcgtcgagccgtcgaagaaatacgccgacgtaatcatcccggagggaggtttcaattccgttgccgtaagcatgttgatccgcagcatccagtcgcagatcaacgccaaataggagcacgcgaatccattccccgaaaatcgattttcgcaacaggcagtctgtgtaactcgcctcgacacgcagtccattacgacaaaaaggaaccgtccgacaactccccgaaattgaaaatcacccctgccagagaagacattctggcaggggtgaaaacgttaaaatcggacttgtcagatactcccttttatttatttcccctggcgcaaggcaaacggatacttttgccccttcacttcggcaattcctcgctccacgtaagcggcagcggccgaatcccactccgaaaagatcgttatgtcatcgtattcgaacggtacgataacacgtccgcgaccgtccaatactccgaatcgaagcaacccggtagaatcgggaacacctgcggaagcatgcccgaattttccgctcgggttcacctgatagaccttatagtcgatcaacggtttgccggaaacatcgagcagggtacaggcccgggaagcgaaatcctccccttctccgacccaggtcgttccgaacggcgtgggctgcacccaatcgtaaatacaaggtaggatttcccgtccattccggtcgatactgccgtacttcaaagcaccgccggaaacaatgcagacgaccgcacggccatttcggaacgaagaaacctcgtaatacttgcatgggatgaccaacgtccctgcggcatcgacaaatccccagcgtacataatatttccccatctgtccgacagcggccagcacttcggaaaaatcggccgcaccgtcgtatatcggagcaatcacttcgttaccccgacgatcgatgaatccgtatttcccggtaaattcaaaatccctttttccatagccggacttaccgctccattcgcctttggctacgactgccattccttcggaaaaatcccgggcataatcgtatttcaatggaattacgacctgtcccagcgtatcgacatacccatagcggcggacggaatccgtcccctcctgtacccgggcaaggcctgacgaaaaacccgcgacatccgcatagatacagggcacgacttcacgcccctgacgatcgataagcccgaaacgacgatcgttcttttcccctttgccgaccacggcaaacccattggaaaaactatcggcatagtcatagatgagcgggaagaccaccgtaccgcaggtgtccgtataaccgaaacagccgtccgtataaaaacggcccatacggggattgctaccctctccgccccggtgtacgagaatacgtccgtcatgcactgcacccacataatcgtatttcgttttccaatcttttttagcggctgcacggcgttgtgccgacaccccggccggaaacagggaaagaagcagtacaactataaagtatcgctttatcataatccagttatctttttgatttcatttaatttattaagcgcctcgatcggagtgagagcattgatgtccaaccccttgatctgatctcggatctgcaccagcactggatcgtcgagttggaacatcgaaagctgcataccccgcgtctgatcccccgcttccgccgcctcgcgaactccggggagcgcttttcggtcgcggcgtcgaggactcttgctgggcacgatctcgttgttgccatataccagctccagattcttcaggatctcttcggcgcgggctacgaccgaggccggcattccggccatccgggcaacgtgaataccgaacgaatgctccgttccgccccgctccagcttgcgcaggaagacgatcgtcttatccacctccttgacgctcacatggtagttcttcacacgcgggcacatctgctccatctcgttgagttcgtggtagtgggtcgcaaaaagcgtcttggcacgggccgtcggatggttgtgcaggtattcgaccatcgcccaggcgatcgaaataccgtcgtaggtactcgtaccgcgtccgatttcgtccaacaggacgatgctgcggtcggaaacattgttcaggatgctggccgactcgagcatctcgaccatgaaggtcgattcgccctgcgaaatgttgtcggaagccccgactcgggtgaaaatcttgtccaccacgccgatatgagccgctttcgccgggacgaacgaccccatctgggccatcaggataatgagggccgtctgccgcagcaaagccgacttacccgacatgttgggacccgtaatcatcacgatctgctgctccttatcgtccagcagcaggtcgttggggatatactcctcccccaccggcatcagggtttcgatcaccggatgccgtccctggcggatttcgatacgcgtaccgtcgtcgagcgtcggacggacgtagttgcgctcccgagcgatacgggcgaaagattgcaggcagtcgatacgcgccacgacagcggcatcccgctgcaaagctcccagggaatgcgtaatgaacccgatcaattcggcgtaaatccgctgctcgatcaacagcatcttctcctcggcaccgagaattttttcttcgtactctttcagctcttcggtgatatatcgctcggcattggccagcgtctgcttgcggatccacgactcgggaaccttgtccttgtgtgtattgcggacttcgatataataaccgaagacattgttgtagcttattttcaacggaattcccgtcgcctcgctctcccgctgctgaatacggttcaggaaatccttgccatgcagagcgatgcggcgcagatcgtccagttcggcgtccacgccgtcggcgataatgccgccccgctgaatttgattgttctgcgggtcggggtaaacctcgcgggcaatacgctcccgaacctccgccagcagatcgatctgttcggccaacgcgtgaagacgctcgtcgtcggtcgattccaacaaggctttgaggagttcgatcgccgaaagcgaatttttaagctgtacgatttcgcggggggttacccgagccgccgctatgcgcgaagcgatgcgctccaggtcgccgacctgcgaaatctgctcggcgacgctttcggccaaatcgggctcgtcgtaaaaccgctgcacgacatccagacgttcgttgatgcgatcaatctccttgatcggcaaggcgatccaccgcttgagcagacgcccgcccatcggcgtgagggtgcgatcgaccacgtctgcgaacgcgcacttctcgcgcgaaccgttcgaagagaagagctccaggttgcggatcgtgaatttatcgacccaaacgtaatcctcctggtcgatacgcgaaatggacgaaatatgggccgtattcttatgttcggtaaattcgaggtagtagagaatggcccctgccgccgaaatgccgctgctgaactgttcgataccaaagcccttgagcgactgagtgccgaactgcttgcagagcttgtcccggttgaccgactccgaaaagacccactcatcgagccgataggtatagtgccgactgccgaacgcatcggagaagcggtcttcgtatccgcgctggtagatgatttccttcggcgccaggttggaaatgagtttgtcgatgtaagcatcgctgccctcggcggcataaaattcgccggttgaaatatcgagaaaagccacgccggtatttttccggccgaaatagaccgccgccagataggtattttccttgttggccaaaatattatctcccagcaccacgcccggcgtaaccagctcgatgacgccccgcttgaccagccctttgacctgtttgggatcctcgagctgttcgcagatcgccacgcgttcgcccgctcggaccagcttgggtaggtaggtgtcgatcgcatgatagggaaaccctgccagctcgacgaatgtcgcggctccgttggcacgtcgcgtcagggtgatgcccagaattccgctggccttgatcgcatcatcgccgaaagtttcgtaaaaatcgccgacacgaaacaggagaatcgcatcgggatgcaccgctttgaccgcataatattgcttcatcagcggagtttcaacatattttttttctattgccattacctttcaagataaagtcggaaacatcggagtaaaccctaaaaatccggcggcggacgacttcgctcatgccggtccacaggattgctccacgtcctgcaaatatacgaaaaatccggagcaaaaggacttcaaaataacgaatattgaaagaatattgcattcattcataattcatataatctgcaataaatgggtgtacgacaatatagtacacccttaccggaatcggccccgcagtcgatcaacggtgtcgaaccgtggcgttatcgaccgatgtcgagataaccacaggttcgcccgaatagttgaattcgctcataccgctcacacaatatttcagcgatcccgccgctgcgaccgaggcggtactcataccggaaatgtcacagtcggcaagtcccgaagccaaaaactttctccctttgaactgactcatgcccgacacttccagcatcaggttccgagctgttcccgaaaaggtacattcgctcgaaccatccactgcgacctcggctttctgcctgcaattcacatttccattataaacggacataccggtcagcgtacaatccaaatcccggcacataaaatccgcgaccgcctggctcattccggatgcctccaccgtcgctgtatcctcgcataccacctgccctttgtaaatcgacatacccgacacagacatcgtcaggcttctgcaacgaatatcggattcgaactcgctcattcccatacattcgaccgtaaccgacggtttatcgatcccggtctcggaaaaaacggaggacatccccgacaacgaaaatgactccagcggagcggcgcccacatacactacgacccgcttggacatatcgttctttctcttggacgacaaggctccggggtcgcacgcaagcacgagttcaccgcgccgcacccgcacggaaaccgcctcagcaggcacattttcggtttcgacccggaccgaagcgggatttcggtcggcttcgagtacgacctgaatcatattactcacattcaacccgaaataaggtttgtccagcacgatttcggcatctgtccgaaaatacacccctcgatttttcttttttgcgtcacacacgccgatccccaacgccaagcagagcaaaagcagagttaattttctcataacggtcataaattatagatttaactctataaagttaaagaaaaattcggggaaaccaatgttttccccgaaaaaactcacagcggaacagatcgccgcagtacgatttcatccaaccggcaattcgatcagagcatcccgcacgcagcgaacatccgccggtaatagtccgccttccactccaccggtttcggataggcccgcgacgaagagggcatgcgataaaaccgaagcatacggtccgcataggcgaactccacactccctcccacaggcggctcggcgcaaccggtaaggcgcacgatcacatcggtagccttctgtcccgtcgtcacgatcgcccggcaggtcggaaccgcagccaacaactgcgccagatcgacctcgcgcactacttgaagaaaattgtcggaagcattgtttttcaatcggattatctcttcggccgtatcgtaaagagccaatcctttctcctcgcagaaacgcacgatccgttccttgtcgaaacgtttcgcgtcgggtgtcagaaaataccccttgtccccgaaaaataccagtccgacgatacgccacatatcgttctgcaagttcgggtaaaaaaagtccatcgaccaccgcacccgctgcggcgggaaacttccgagcatcagcagacgtgccccgacaggcagaaaaggttcgagaggatgcagttcgcttgtcataatttttaatttatcgtattatttatttccaaatgatcctgtttcaacccctattttggggcgctgtgcaagagacttcctcttcgcccggcatcaccggcaatccgatccggcccatgcagaatcgcgggaacaacgcctccgcaaccgacagccgcccaccacccgacctcgcagatacttggcgatcgcacgcatccggaaatgctgcggatgcaaagccccgctcgcaacctccgaacgaaggtcattcgtaaaaccgttcatcgaaattcaccagatagagtttgtcggtcgcacgggtcagcgccgtatagagccagcgcagcatgtcgcgcgtcatcggctcgtcgccgaacagacagcggtcgatgaaaaccgcccgccactgaccaccctgcgccttgtggcaggtgacggcgtaggcgaacttcacctgaacggcattaaagtgcggattctcacgaatttctttgaatcgcttgagcttgctcttgatatcgagataatccttttccacctcgcaaaagagccggttgctctcctcacgggtcagcgacggggactccgaggcaatggtatcgagcaggatcttgcactccagctcggcgtcgttgtagtccgcgaacgaaagcacggccgtagcgaagcggaagccgtaaaaatcctcgaaacgcctcaggcgacgcaatttggctatatcgccgttggccaggaaattcatcgggcaatcttcggtgcgttccgtaaaatggtagttgttcttgacgaccatcagcagatcgccgctctcgatctcctcctcggcgcccagcacgtaacg

SEQ ID NO: 10401 - DNA, 58320 bp, Unknown
  gut microbiota DNA sequence
tccagcatgcagcgtaccagggtggcgttgaacagaatccccgattcggcctcctgacgcaccacttcatccagcgacgtgtaaatcacctctccatagacggataaggccttcggatcgagtgccggggagtaatccgccccgatcggaggaagctgcgcatcgtcgcccacgaggatcaaccggcagtccctgccgccgcgcacgtaactcaccagatcgtcgagcaatgctccgctgccgaagatcgccccgtccgaagaaccgtttgccagcatcgaagcctcgtccacaatgaatacggcaccccgttcctggttgatgttgagcgaaaatttcgactcgtagtcggcattggtgcgctggcggtagatccgcttgtgaatggtcagggccggttctcccgaataacgggacaacaccttggccgcccgtcccgtcggagccagcaacacgggtttgatgccgcaatccttgagtgccccgaccagagcggcgatcaacgtcgtctttccggtacccgcgtaaccgttcagcacaaaaatggctacaggatcgctctcggccaaatactccgaaagcgattcgatgatttttttttgaccagatgttgtattaaaacaaattttagcgtaaatttgggtcgcaatatgagtctttagcatcttcggatcggtaaaggacggcggtattgccgacggattttgatacaaacttactagaaataacttaaaaatgacaaaaagaatcatccaaatcgtacttgccgtagttatcgtatgcctgatatacgttatctacaaacagatttcgactccgattatcttcgccaaggagaaggcggcccgcgaagcacgcgtcatcgaccgcatcaaggacatccgtactgcggagcgcagcttcaaaacgaagtacaaccggttcaccggcgatttcgacacgctgatcaattttgtgctgaccgactcgctggagttcgagcgcaagatcgtcgatgaggatgactcggtggcaatggcccagttgaaaaagagcggccgcaagaacagcgaaaaggtatgggtacacgtgatcgacacgatcttcacgccgaaaaagctcaccgcagaacaggttcgcaacctgcgttacgtgcccggcacgaacaaccagacggaattcgaattggaagcaggtcttgtgaccaccgaatcgaaagtggtcatccccgtcgtagagtgccgcataccttataaaatgttcctcgacacggtacgcttccgtcaggaggtaatcaacctggtggacgatcaggagaataacttcagcaactacggaggcatcaagttcggctccatggagaaaggtaacaatgaagcaggtaactggggcgacgaataacaagcccgaaatcaagaatgtgtccatccggctcaggctggatggacactctttttctgaagagaagctcgacataccggccaaagagaaaaaaacggtcgaaatagaggtattgacgggcaaaaccatgctggttccccgggaagtgttcgacgcgaaggccgctcccgccctgatgcgtataaacggaatggaaccgacggagaaggagtgtattctcacctccgatccgcaacagcccgtcatcgctttgatggctgccgacaaagcctccgtagagaaagtccgtgcccggctgaaggagaagatacgctggacctccccgttgctacgtaccggggaattcacggcatcctgcctctggatattccgttatgaagagctggcctacctgaaagtatgggaacggcaaaccctgcggctggcggagacattcatcgcccccacgggggaagatctgctcttctacgtccgggagctgacgcaggagctgcagatcgaaaactgcgagatccggctggaaggaaacccgaccaaacaggacggacgcctgttgcgtgaatatttcaaacatgtcgccatatgcgaatagtcagcggaaaatatcggggacgggcaatcaacccgcccaagaatctgcgggcacgcccgacgaccgacttcgccaaggagaacctgttcaatgtactgggaaacctggtcgatttcgaggagtgcgacgtgttggacctattcgccgggacggggtcgatcagctacgaattcgcttcgcggggcgtgcacagcgtcacttcggtcgaaatcaatcccgtacactataacttcatcaaaaaaacggccgccgacctgggaatcgacaatctgttcgccgtcaaagccaatgtattcctctacctgaaaagctgtgcgaagcagttcgacctgatcttttcggacgcgccctacgatctggagggcagcgaagaggtcatccggctggtactggaacgcgatttactcaaaccggatgggtttctcgttttcgaacattcgaaaaacataaatttttcgtccgaccctcacttttggcaatcaagaagttacggaagcgtgcaattttctttcttcaaaaagtgagaaaaaagtttggagatacagatttttgtactacctttgcattcgcaatcagcaaacggtgtggtagttcagctggttagaatacctgcctgtcacgcagggggtcgcgggttcgagtcccgtccataccgcaaaatatcgaagcaaatgattgcaaagccttgtaaagtatatttacaaggcttttttctttttctgtatcctaaaaaaggttcgaaatgctctccaaaagcagctaataatcagaggaagagccccccccctattttgtgctcgaagcattcagctactgcactttgaatcttaccagccatagacttttagagtaagttcgtaactaaaaagatatattatggaaagacctctttcagcgttttattctacctgtgtaaaacaaagacaaatcgtaatggtgaagttcctatcacattacgactcacagtaaatggagaaagaaaagagatgcgtatccatcggtttatcgatccgaaacaacgggacgcagcaaaaaggggagcaaataggagttgcaaagcgctcaacttatccctcgataccataaatctgcgtcgcttcgcacatatcgagagctggataaggcagggaaacacgttatcgctcaaacggtatcggatcgttattccgcaggcaacgacactttttctgatcgagaaaaatcctgacgtcgaatccgccttccgggaaaagcgcagaaggcgaaccggggccccaccctattgtatattaaaccgcaccgaacactccgattacatacggcaccgatcgatcctcgttaggaataattattgcataataattaagataagattcgaaatgacgaatccatacacgacaaacttcgatttttccaaccgtttatgaatacaaacgactttgcattgaccatcctgttcggaatcaaaaaattcctcgcctggatcggcattccgtcccatatgctcgacaaaatggacgaactcctgtttctgatcgtgatcgtgattatcgcattcatcgttgcgggaatcgtccacgccgtattggtgcatctggcgaaaaagattctgaaacgcaaacgtgtcggattcttcgaatcgatgttcaaatacagcgtatttcggaagctgacggccatcattccgccgctgatggtttccgccctgctgccattcgctttcagcaaagattccgcctggttcatcctgagcgagaagatcacctggatctattttttcatcgccctgattatctccgtaaatgccatactgaacacggtcggagatgagctgaaaaagaacaagcaactgaaaaaccgcccgatgaagggctttatccagatattccgcgtggttttctactgcgtcgtcgtgatcgttatcatttcgatcctgatcaacaaatcgccgctcaacctgattacgggactgggtgctttcacagccgtattgatgctggtgttcaaggatactattctgggactggtcgcaggcgtgatgatctccgaagacgacatgctgcgcatcggcgactggatcgaaatgccgcagaacaacataaacggcaccgttatcgacatatccctggatgtcgtgaaggttcaaaacttcgacaacacgatcgtgactgttccaccctattcgctggtttcgggttcgttcatcaactggcggggcatgagcgactcgggcggacggcgcatcatgcgcgaatataccctgaagctcgattacatcaaaccgtgcacaccggaatttctggagaaaatgaaagccttcgacaaagaactggcacaattcataaccgaaaaacagaagcaggcagccgatggaaaagtcgccaatacggataatcccgaaggtctggtgaacggaactatcgacacgaatctcggtctgttccgggcctacatggtgatgtatctgcggcgccatcctttcgtcagcaaagaactgctgctgatggtgcggacactgccgccggtagccaacggccttccggtccagatctactgtttctcctcgaacaaaaactggccgagttacgaatccatccaggcagaaatcatggaacacttcgtttccgtattgccggcgttcgaactctatccgttccaaaacgcagacgcccgcgatatgatcctgagcagctacatcgaatccgccaaagtcgatctatcgacactgatcggaatcccctggcatacgaccgtcacgcaaagcaacccgttcgatgtagaaaaacaggaggcgcaagactcatctccgaaagcataaccgattcgggatttcacccgctaccgacaaggcaatatcgggataagcgaacttcgggaacaggcataggttcgccgaggttgcaacagccggacggacccgccccgaccgattaggaccaaacgagaaacaccctgccggaatcggcagggtgtttctcgttactcgcagggcaacgtccggtaaaaaccgcattttcagcccctcttctcgacacgcttctccgtctatatggtcatggcgaaaatctgcccgccataaaacagaccgcccctcgtcggctgcacacgcaaggtattcttccgtcagacgatgctggcaccgccatcgacgaccacgtgctgaccggtgacataactcgaagcgtcggacgaaaaatagaggatcgtaccgttcagttcgccccggcgaccgggacggctcatcggatcggtgaaattgtacatcctcatgaactcctcgtttttgaaaagcgtatcttcggtcatctcgctctcgaaaagtccggggcaaacagcattcaccgtaataccatcgacgccgtacgaagcggccattccgatcgtcagtcccaaaaccgccgccttcgatgcgttgtaaacatgtcgggccagcaacggactcttgtccgcgatcagtgcgttcacggaagagatattgacgatcttgccataacggcgttcgcgcatgtgaggtacgacgtatttgcagaccagataagcaccccgcacgttggtatgcatctctttgtcccattcatcggtggtcagttgctcgacagtacccggcacggcgacacccgcattgttgagcagaatgtcgatctttccaaagcgagccacgacctgcccgatcgctttgcggacctgctcttcgtcggtcacgtcgcaccccacgacaagcactttacgccccgttgcggctatttcgtcggctacggtcttcagtttctcaaccctgcgagccaacagcgccacgtcagctccctgaccggcataagcccgggctgcatccgcccccagaccgctcgacgcaccggttacgacagcaacccgtcccgtcaaatcaaacaaattatccatattgcattcgatattagtacaacaattcccgcttcgtgccttctccgtacccgaatgccgaccgacgcagcttcccctgccgactattcacgaacgccgtccgtcaaaaccgtttggtgtaacgatgacagtacggctgcgtacctttacggttgtagtagttctggtggtattgttcagccggccagaagcgggaagccggagttacgtcggtcaccacgctatatcctttctccttcaggatacggatcagccgctcggcaacctccttctgttcgggggtggtatagaaaatctctgaccgatactgatcgcccaaatcgggcccctgtccatcgagctgggtcggatcgtgtatctcgaaaaagagcctggcaagagtttcgtaagagactttcgaaggatcgaactcgacttcgacggcctcggcatggcccgttttatggctgcacacctgctcgtaggtgggattctcggtatggccgccgatatagcccgaacgaatgctcttcactccgtccaccttacccagcatatactccacgccccagaaacaaccgccggcgaaaatagcccgttcggtttgcaccgatttcggcggctcggctgacgaggtattttcaggcttttcggcagaagccgctgccggttccgcgaccggcatggtcggaatggccgccggtacgaaatcgagggagagggaattcacgcaatggcgcgtatttttagcggtgaatccttcgcccgtaaagacatggcccaaatgggctccgcacctggcgcagagaatctccgtacggcgtccgtcggcatccggttcgcggcgcacggcacccggaatttcatcatcgaagctgggccagccgcagccggcatcgaatttatcctgcgaacggtacaacggagcaccgcaccggcggcagcggtaggtgccgtcttcgtcgtggaggtaatatttaccggaaaagggagcttcggttccttttcgaacgatcacccgctcttcttcgggagtcaatggtttcatattctgtgcatttaaagttattgccatgctcgtaagcacggtcgcaatcgacaaacagcgtatcatatttttctttcctgcaaaaaatacaccgaaattgtccgaaaacgtattcatccatacgtaagataacgacctcttccatacaaccggaaatccgtccgatatcagcgaggaatgagcgtaaaaagaacaaaaagccggagcagaataccctgccccggcttcgaacgatatatcggccaattacttcacctcttgcccccggaggaatacccggtggataagcggagaggtataggcatacggcagatatgccaccgaaggaatcttcgtcgtgaggaagaagttcgccttcttgcctacggtgatcgaaccgtactcgctgctcaagcccatggcgtaagcaccgttcagtgtcgcggcgttgatcgcttcggccggcgtcatacgcatcttgatgcaggccagcgaaacgatcatcttcatactgcccgaaggcgacgagccggggttgaaatccgaagccagagccacgctcaaaccgccctcgatcattgcccgtgcaggaggatacggcatctccaggaagaaagcggcacccggcagcatcgtcggcatcgtaccggacgtgcgcagcacttcgatctcctcggcccccatgcgctccaggtgatcgacggacagcgccttgttgcggacaccgacctgcacaccgcccgaaacggccagctcattggcatggatcttcggcacgagaccgtactcggcgcccgcacgcaaaatctgttccgtctcttcgacggtgaagaacccctggtcgcagaaaacatcgacgaactcggcgagcttctccctgccgacggcagggatcatctcccgacagatcagatcgacatactcctgctggcggcctttataggcccggcctacggcatgagctccgaggaaagtggcacggacggtgatcggcgaagtttcgcggatacggcggatcacccgcagcatcttgagttcatcctcggtcgtaagaccgtagccgctcttgatctcgacgcagcccgtacccattgcgatgatctcgcggatacgttccatcgcctgctcgtaaagctcgtcctcggaagtttcgtgcaagcggtcggcggaattcaagatgccgccgccccgcttggcgatctcttcgtagctcaagccgttgatcttgtcgaggaactcctgttcgcggcttccggcataaaccagatgggtatgcgaatcgcagaacgaagggaaaagcatgcccccctccgcatcgacgacttccgtgtcgggagtaatctccggcatcttgtccatcgtgccgtatgcggcaatacggtcgccgtcggccagcagccaggcgttgtcgatctcgccgagcacattcatgtcgcggcccttgacccgaagacggccgctctcgtccacaccgacgatcttggctatgttcttaacgagtaacattacaatttctcggtttgaaggaatttcaccgaagcatcgatcaacgtgtacatcacctgatcgttctcgacgaacggcacatgcttacggtaagcagccagcagatcctcgatgggcttcgaggaatgcagcggacggcggaactcgagagcctgtgccgcattgagcagctcgatagccagcacacgctcggtgttcagcaccacgcggtagagtttcgtggcagcgttggaacccatgctgacgtggtcctcctgcccctgcgacgaaggaatcgaatcgcacgaagcgggccagcaaagccccttgctctggctcacgatcgaagcggccgcatactgcggaatcatgaaaccgctgttcagacccggcttggccaccaggaacgagggcagctcgcgtgcacccgaaatcagcttgtaaatacgacgctcggagatgttgcccaactccgcaacggcaatagccaggaaatccatcgccagagcgatcggctgtccgtggaaattaccggccgaaacgatgatatccttctcggggaagatcgtcgggttatccgtagggctgttgatctcggtttcgagaacaccgcctacatagtcgatcgtatctttcgacgcaccgtgtacctggggaatgcaacggaacgaatagggatcctgcacgtgcttcttcggacgggcgatcatctcgctgccttcgagcaggcgacggaaattgcgagccgtagtgagctgtcccttgtgggcgcggatctcatgcacctcgtcgatgaacgggttgatgcgtccgtcgaatgcgtcgagcgacatcgcgccgatcaggtcggcccactcgctcaagcggcgagccttgataagcgaatatacgccgaaagccgacatgaactgcgtaccgttcagcagggcgaggccctccttcgattgcagcgaaataggcttccagccgaactccttgagaacttcgtccgaaggacgccgtgcccccttgtactccacttcgccgaggcccagcagcggcaggcacatgttggccagcggagccaggtcgcccgaagcgcccagcgatccctgctggaacacgaccggcagcacgtcgttattgaagaaatcgaccagacgctgtacggtttcgagctgcacgcccgaattgccgtacgaaagggactggatcttgagcagcagcatcagcttcacgatctcggcaggaacgcgctcgcccgtaccgcaggcatgcgacatcaccaggttcttctgcaactgcgagagctggtccttgtcgatcgaaatattgcagagcgaaccgaagccggtcgtaataccgtagatgggctctttctgggtttccatcttgttatccaggtattcgcgacaacgcacgatgcgttttttcgcatcttcgctcaagtcgattttgatattgttttccagaatttcgcggacacgatcgaccgtaagatgctccgcgctgatatgatgaatcatcgttgtatttcttattaaaggttaatactcaaaaataagtcgaattgtttttcggtgctctcgacgtccggcgtacagggaatcccctccgcttcagccaatcgaaagcattctctccgtccggcagcaaccgaacggagagaagaccgatctattatttcacttcgtcgatagccttgcgaaccagcttgtcgtccgccaggttgggaagggtcaccttcaggcccggggtacgctccatctcgcgtttgatagcgaacatcgcgccctcgttgcgggcccagctgcggcgtgcgataccgttgttcacgtcccagagaagcatctccttgatatgacgcgcggaatcctccgatccgtcgatcaccataccgaagccgccgttgattacctcgccccagcctacgccgccgccgttgtggatcgaaacccaggtagcgccgcggaacgagtcgccgataacgttctgcacagccatatcagccgtacggttcgaaccgtcgtagatgttcgaggtttcacggtacggagaatcggtacccgacacgtcgtggtggtcacgacccaatacgacaggtgcggaaatttcgccgcgtgcgatagcgtcgttgaacgcgagcgcgatcttggtgcggccctcgctgtcggcatacaggatacgtgcctgcgaacctacgaccagcttgttcttgccagcctccttgatccagtggatattgtcgtcgagctgtccggcgatctccttcggagcggtcttgcgaatctcttcgagcacttcggtagccagacggtctgtagtagccaggtcttcgggtttgcccgacgtacatacccagcggaagggaccgaagccgtagtcgaagaacatcggccccatgatatcctgcacataggaaggatagcggaaacgaccgccctcgcccatgatgtcggcaccggcacgcgaagactccaacaggaaggcattgccgtaatcgaagaaatacatacccttggcggtcagcttgttgatcgcagccacctggcggcgcagcgactcctgaacacgcttcttgaactcctcgggatcctctgccatcatgcggttggactcttcgtagctcaagccgacgggatagtaaccgcctgcccaggggttgtgcagcgacgtctggtcggaacccagatcgacattgacgttctcggcagccagacgctcccaaagatcgaccacgttgccctggtaagccagcgacacggcctccttgttctcctgtgccttcttcgcacgggccagcaactcgtcgagcgaggtgtacacctcatcgacccagccctgcgaatgacgcgtatgcaccgctttggggttgatctcggccgtgatgctcaccacaccggagatattacccgccttcggctgcgcacccgacataccgcccagaccggccgtcacgaagagcatgccgcgaatgtctttcttaccctcggtaagacgtttgcgggctgcgttgagcaccgtgatcgtcgtgccgtgcacgataccctgcgggccaatatacatataggagccggcggtcatctgaccgtactgcgaaacgccgagcgcattgaaacgctcccaatcgtccggtttcgaatagttcggaatcaccataccgttggttacgatcacgcgcggagcgtcgggatgcgacgggaacaggcccatcgggtgtcccgaatacatcaccagcgtctgatcgtcggtcatctgggacagatactgcatcgtaagcagatactgcgcccagttctggaacacggcaccgttaccgccgtaggtaatcagctcgtggggatgctgcgccacagccttgtccaggttgttctggatcatcaccataatcgcagcggcctgacgcgacttgtggggatactcctcgatcggacgggcatacatctcataatcgggacggaaacgatacatatagatacgaccgtacttgtgcaactcctcggcgaactcgcgggccaacacttcgtggtgcttggccgggaagtagcgcagggcattgcggatggccagcacgcgctcctcctcggtgagtatctccttacgcttgggcgcgtggttgatggtgggatcgtacggtttcggtgcgggcagcacatcggggatacccgccttgatctgctcctgaaattcctttacagtcattgttttatatgtattaaattatttaatcttgctctcgacgatttccagaatctcacgctcggctttctccgcatcggcgacgatccggttggcctggccgatcaggtcatcggcgacggcacggtctttcagaccggcggcattgatcttcacgttcagacacgcacccagcacggcgctgcgggcagccagcgctccgacgccggcgtcggttaccgaattgggatttccctgttcggccatcgccttcacgatttcgaacaccttgaacgaggtctgcatcgtacgcagaggcacctgcgtagcgtagagcgtagcctcctgcaatgcggcgctacgggcagctttctcctcgtcggtacccttcggcatcgagaatacgttcatgatccggttgaacgcttcggtatcctcatcgaccaggtgcagcaactcggtcatcagcttctggcctttgtccgcccagtcggagaactcctcccaacgtgcgtcccagccgggtttgtgcgacgacaggttggcgaccatcgtacccagggcagcgcccagcgcacccatgtaagcggaaatcgaaccgccgcccggagccggggactcgctggcggtctcctctgcgaagccggtgcaggtcagatcgaccagtttcttcttcttattgtccgcttcgatcaggtattcgatcaccttctcttccggtttgaacggcttcaactcgtccagacccatcgacttgatggcgatacggatgatctcctcctcggaaataccggtcgaacgctcctgcttcttcaggaaatagcggcccgcctcgatcaacgtgcgcttcggaatcaggccgacgatctcggtaccggtcacacgcacaccgcgtgcgttggcggcgcggcaaacctcgtcgaaagccacgtggagcggcgtaacggaaatattggtgatattcatcgaaacctgggcgatctggtactcgtcgatgaaccagccgatcgccttggtagccttcagcgtaccgggcttcatgatggtcttgccgttctcgtccttcaagggtttgcctacgggcgaattgccttcgcgtaccggacggcccttttcgcgcacgtcgaacgcgatggcgttggcgcgacgcgtcgaagtggtgttcaggttgtagttcacggcgatcaggaagtcgcgtgcacctacggcggtggcacccgtgcgtgctacgccctcgtcgaagggacggtcgccgaaatcgggagctttgccttcgtgattcatcttctcgggcagcgcctcgtactcaccggcacgacatacggccaggttgcggcgctccggcgtaaaggcagccgcctcgtagcaataggtcggcacatgcaactcgtcggcgatgcgcttggccaactgacgggccagctcggcgcactcctcgagcgtaatacccgcgatcgggatgagcggacatacgtccgtggcacccatacggggatgcgctcccttatgattacgcatatcgataacctcggcagctttcttgacgccctggaaagccgcttccagcacggcttcgggttctccgacgaaggtaaccaccgtacggttggtcgcttcacccggatcgacgtcgagcaacttgactccgtcaaccgcctcgattgcggaagtaatctgctgaataacagccttgttacggccctcgctaaagttgggcacgcattcaataatacgtttttccatgtattttagagtatgttaagaatttgtattcgcttcagaattagcccgtaaaacagacctacaaatatacgaaataaataaatatccctccaaagaaagttacaaatcttttatcgaaacggactatacggttacaaactatcacgtattccacggccgaatctcacaatacgacacttttcgcaacgataaaacgggccgggattcgatcccggcccgccgcaaacaaacttttccggacattacccgatcgtcacgacgataccgcccgaaaaccagacgccgggcatctccaacccgccgaaatcaaaataacgggtatcggtcatgttcatcacgtcgaaatagagtttccaccccttcttttcccacgacagacggccgtccaacaggaaataaggcttgaagtcacgcacttcggtcatcatcttgccgtcgggatccaacatcagggaaccgtccgcattacgcaaataataggtatagctgccgttgcggtcatataccgcaccggtcagcgtgagcgaacagttacgcagaaaacggaattcgaccgtcgccgccgctttgtgcttcatataatccagcgcactggaagtgatgacccgatcgactttgctcgtatggatatagccgtatgaaaccgaaatccggtgcagaaacccggtcgtcgtataaccgcccgaaacctccagtccataggtgtcgagcttgctctcctgctcggagtgccacttgcccagctcctcgcgccaaacccagtcgatgatgtcgcgcccctgccggtagtaagtaaacagcgaagcattccacccgctgcgggcgtaatccgccgcgaaacgataggtaatcgcatgttcaggcttcaaatccagattattgagctgtgcaggggatgtgtaataaagatcggtgaaggtaggcagtcgcatcgactgggccgcaccgacctcgagccgcagcccacgcaccggacgatagcctcccgaaagactccacagggccgaagtcccataaggcgtgaagctcaccccggccgaaccggaaacgtcgaaacgctcccactgtttgacatgccgcagccagagatttcccacgtgacggtccttggcatgggtatatttgccgtgcggagtcggaagcggctcgccgagattggtgctgtaaatgtggttgtaggtgtaatcgcctcccagggaggtcacaccgcccttccacgtacagtcggcccagaactcggctcccgcattgtccgtattgtgatgattcatcggcgtaccgcgcgtccagtcgtaacggtcgaaattcttgcggtagctgaccgacgaattgagcgtgaaacgcccgacggatttcacccatcgcagcgaagagagcaccgtcgaagtatgctcgaactgatcgggattgtacgcggcatagaaaccgttcgaaccgaacgaccggttctgataaccggcctggaaatcgaaaaatccggccttttcactgtcgtagttcatccgcaagtaaccgttgtagttctcgaaatcggtgttgtggatatacccgtcgctgcgacggtacgacccggcggcaaaaagggaaaaacgtcccttggtcacggcccccgagagattgccgtacgcatagccgtcgtcgccgcccgccgcctcgatgcgcagatagcgggatttgagaggcatcgtgcggatattcagggcccctgcatacgcaccgacgcccgatacgccgtcgatcagatcgattcccgcgatgcaatctatgtcgatcggcagcgaatgcgactgatgacccgttcgggcatccgtaaagttaataccgttgagcatgaccatcgtctggtcgaaggaacctccccggatcataatgtccgcctgcgttcccctgccgctccgttcccgaagatcgatcgcagggctcaaacgcagcacagactcgagggtctggaccggcgccgaagcacccgcctttcgatcgaaaacggaggtggacgacatcgtactgcgcgtgggggtagctttcacccccgtcacctcgaccttttcgatctccagctctctggcgatcgtaagcgaatcgacggtctgcgcctgcacgggcgtcgtcgtggacaggagaatggtggacatcgaaacagagaggactccgatggtaacctggcgccgaaggctcgcgaaagcggcgtaccccttgcgacaccagcgcctgaagcgcggagtacgctttgtttggatctctttcatcctgtaaaaattaaagtgattaataatatcggcctcggttcctctgcagcggaacttcggcctgtcggggtgcaaagataatccatttgtccggacacacaaacgaaaaggccggccctatggctggccggcctctcttttccattctattttttattaccactctttcaccttttcggatgccttatcgaccaattccctggtcttgtcgagcactttgcctgcctgctccttggcctgtcctttcagttgctgcgcctgctggcgggcgctttccttgacctggccggctttcgctacgacctgttctttcacctgaccggctttcgcggccacatgctctttcacatcctgtaccgtatcggacagatccgccttcagacgctctttgtccgcattcaatttctcattcatacgaataattttttagtctatctttttctcttttttattgcctacggcagctacgatccacaacaatacgatagcaccgactaccgaagtgacgatactgccgatggttcctacggcgaaaagtccgaacagcgagaagatccagccgccgagcaccccgccgacgatgccgacaactaaattgacgatcaggccggacccccgccctttcacgatcaggttggcgagccatccggcaaccaaacctatcaataaataccacaagaaaaacataatcgataattttttaagttctttcgatactgcttgtacaaaatctccgccaaacccgaaaaacgaccggactttatcgcaaccgccccaacgccacctccggccggacaaaaatcaagggaccgctccgcaaaccgaacggaagatccgggaaacagctcaggaatccgacagacgggcaagctcaccacatttgactacctctcgcctccgaaatacctaaaacgggtgattgcccgcccgtttcatcccccctacttttgcaaacgaataaaaccaaaagcccatgattaaaaatatctgcactgtcatcctattattattgtccgtcctgcccgcagcgggacaaaaccgggtaaaggtcaaaatctcgggcaatgtcatcaccacagacggcgctccggccgaatacatcacggtttcgctgaaaaatacggtattcggcgggatgtccgacggggacggcaatttcgaatttgcggctcccccgggcgaatatacgatggtcgtccaatccgtaaccgcccaccgcaaggagtttccggtcaccatcgaaaccggtcgggaaaacgtattcccgaacatcgaagtcaaggaagatatcaaccagttggaggaggtggtcgtcaccggacagttctcgccgcaatccatgaaaaactccttatataaggtacggtcggtaaacagcgatcagatccggcaaaaggcacccctggatgtacagtcgctgctcaacaccgaaatcggcatccgcctctcgaacgacatggcgctcggagaaacggacttcgagctgatgggtatgagcggcaacaacgtcaaaatcctcatggacggtattccgatgatcgaccgaggctcgaccaaacagagcctcagccaactcgacgtaaaccggatcgaacgggtcgaaatcgtcgaaggtccgatgtcggtagtctatggcacggacgcccttgcgggagtcatcaacatcatcaccaaaaagggaccgggctattccggcgaaagcacctggcgcgtgggcgcccgcatccaggaagaaacgatgggcaaggaataccagttcttcaacggcgaaggtcttcacaacgaaagcatcgacctcggattcaatcttaaaaacggactctacttcaacggcggctacacccgcaacgacaacggcggctggcagggcgacctgaccggacgcgaaaagcgctggcatcccaaagaccagtcgctggccaacggtatgatagggttccagcgacgcaacctgaacgtctggtaccggctggatttcctcgacgagaaaatcttcggtcctctgaacggtaccgccatcgaaccggagaaggtttccgacaaggactatctgaccaaacgatacacccatcagttacaggcagactggagactggacaaccggttgagcgtcaatctcgccctctcctaccaggactacaagcgccgcacgcagaccacctggacagacctctcgaccggagagaaatggctctcggccgaagatgccagtcaggatgtcacccagtacaaagcctggatcgcacgggcgacggcaacctggaatatcggcccgaagatcagccttcagcccggtttggaataccaatggaccgaaggcaagggcggacgcatcgacggcacccccacgatctccgatctggcattcttcatctcggccgaatacaaaccctggagctggatgagcgtacgccccggcgttcgggctttcctgatggccgactacgaagctcctgtggccgtaccttcgattttaacgaagttcgatctgacacccgatatggacatccgcctctcctatgcctacggcttccgtacgccgaccctgcaggagctctacttctcgttccacaacgacaaccacgacatcgacggcaacccggacctgaaagccgaatattcgaacaatgtcacgggatcgttcacctaccgcatcctgcataacgcgcggatccggctcaccaccacgttgagcggtttctacaacgtcttcaaggacaagatcagcctggcgcagaacgtcgatattcccaactacaacacctactacaacatcggccgctacaaaaccctgggcggggcactggaaacctcgctggcatggggcggattacgcgtgaacgtcaatgcttcgctgatcggacgctacaacaaatatgcctccgacgataaaagcctgccccagttccgctattcgcccgaagtgagtacgaccatcagttaccatatcgccaagtcgggaacggacatcagtttcttctacaaatacaccggccagcgcaaggagtactattaccacgaatacacgaccccggacaacaagaaagagagcgaaatttacctgaggggactcccctcctaccactacggggacatcaccgtcacgcagaagctgacctcgttcctgagcctgaacgtaggtgtcaaaaacctcttcaacctgaccgacatacgcacgatcgtagaatccgcgaacgacaccccttcggtcagctatctcggctgcggacgcagctacttcatcggactgaacttgatgctgaacggaaaattcaaaaaataacaaattcaatattaactaattaaaaccattctatgaaaagattactttacttactgtcagcctgtctgatgaccttcggattctcggcatgcaacgacgatgacgacaacctgaagttgcaggacatttcggtcgaattcgccgtatcggaagccggcatggacggcgaaaccgtcagcctcggcctgaaactcagccgcgctacgaccgagagcttggacgtaacgatggaaatgacctcttcggacgtatccgacgcggacatcacgacgaccccggccatgaccgacggcaagatcacggtcaatattccggccggacagtccacgggcactttcaccgtagccaaagcgacgggtaaaaaccccgagggaacggcgaaattccagattctctccctctcgctgaccgaaggctacaagatcggcacgaccaaggagatgaccctctcgttcactccgatcgtctccacgggcggcacgatgacgctcgaagggaaagtcggtgaccagaactacgccaacatggtctatgtcgatctgagtaataacagccagatgcagatcgaccgcaagagctggaacctgggcttctactgcggcgatgagttccgcgtggtactcaactcttcatacgcaacggtagcggccgcttccgagaaaacggacttcgcagccgtaaccctcgaagatgcgcagagcgcacccaacatcgccgcaggcagcatgtccgaagacttcaaggcggaatggatcgacgacgtcacgggcgacctatcgaagaccgcattcggcgaaatatcggctacggatgcgaacaacaaggtatttttcgtggcctcggccgacaacaagaccaataccgacggtacggaaaaccggagcctctggtacaaagtgaaagtcacccgcagcggcaacggctacaaggtagagtacggcaaggtggaagatacgaccccaaaaaccgtcgaaatcacgaaagacccgatttacagcttcatcggactctcgctcgaaaccggcgaacaggtgctccagcccgccaagagcaaatgggacatcatgtgggcctacgccgcctcttcgaccatgatggcatcgggaccggtgatctcgttcacgcaggatgtaatcacgatcaacaacctgggcggcgcggaaacagcgatcgtcatgacggacaccaagtcgtatgccgacttcaaacgtgcggacgtggcatctgcggagttccagacggaagcgaacacgatcggcaccaactggcgcacccccgcgatgccgggcgtggagaatccgggtgtcaaggcagaccgtttcttcgtcatcaaggactgtgcggaaaactactacaagctccggttcctcaaattcggttcgggcgacgacggtgagcgcggacgtccgcaactggagtacgagttgctgaaatagacgcaatgatgcgatcggattggctggcagcaccggaactacgggactgccggccaaaccacgcaaaaagagtccgttttcaagatacggcccgtccggtatggatccggacgccggcaatcctcaagaatcttaacaatttacacttcgaataatggcaaaaaacaagaaatggatcctcgcggccgtcgccgtactcgcagtggtcctgtgctgctgggcggcgtggagcaaatgggcatccacgacccggatcggactggtgaacttccagaactatcagacggccagcctcgtcaaatccaacgaagacaacttcatcgaatacgaagaaataccgctcgaccggctcgaccggctcggacgttacgacctggtgctgggattcggcatgggtctgaaaatcactgaagagcagcgagcgcagatcctcgcggcagccgacgaaggcacccctatctacatttacgccgccaccaatccggaaaacgacatctgtagcctcgacagcctcaccgaggcaggactttcggcctacatcggcaatggcaacaaacggaactaccgtaacatggcacgctacgtccgccagcatatcgatgcgaagcgcttcttcgtcacaccggccgaagaagccgtcgagagcgcttcggacgtactctaccacctggacgaagacctctcgttcaaaaccgtcgcggactatgagaaatacctccgggaacagggaatttatcgggagaaagcccctaaaatcgcgatcgtaggcggtctgaacgaccccttcagcggcaaccgggccaacatcgacagcctgatcgtatcgctgcaaaacgcaggaatgaacgtctatcccgtttcgtcataccgccagcgtctggcgttcctgcgggaaatcggccccgacgcggtcatccacttcgcgcacgggcgcatggtcatgggccaggccgacgcagccgtggagtggctgaaggagcggaacatcccgatcttctcgccgctctccatgctggaaacgcaggaggagtgggaaagcgacccgatggggatgttcggaggattcatgtcccagagtatcgtcgtacccgaactggacggcgcgatctacccctacgtgctgaacgatcaggaactggacgaagagggaatctatctcttcaaggccattcccgagcggctgaagaatttcacccggatcatcggcaacttcatctcgctgaaacagaaaccgaatgctgaaaagaaagtagcgatctactacttcaaaggcgccggacaatcctcgctgacggcccagggactggaaacggtgccgtcgctctataatctcctgaaacggctcaaggccgaaggctacacggtgaaaaacctgcctgcgaccgaaaaagagttcgaaaagctgctgatgacgcagggtgccgtattgagcacctatgccgaaggggctttcgacgacttcctgaaaaacggccgtccggcactggtcggaaagtcggaatacgaatcctgggtgcaggacgccctgcccgaagagctctatgccgacgtcgtgcaactgtacggcgaagcgccgggccactatatgagtacggtccgggagggcgaaccgtgcctggccgtagcccgcatcgatctgggcaacgtcgtgctgctgccgcagcccatggccgcggtcggcgacgacgccttcgccatcgtacacggcgccaaaaccgctccgccccacccctacatcggcgcctacctctgggcgcaatacggcttcggagccgacgcgatgattcacttcggcacacacggcagcctggagttcacgccccggaaacaggtggcgctctgccgctacgactggcccgaccgtctggtgggcaccattccccacttctattactacaccatcggcaacgtcggcgagagcatgatggccaaacgccgctcgtacgccacgacgatctcctacctgaccccgccgttcacggagagcaagacccggggacagtacaaggagctgatgaacaaaatcgaagcgtactacaagaccgacgaggcccgccagccggaggtatcgatcgccgtgaaaaagatcgccgtgaagatgggcctgcaccgcgacctgcggctggacagcctgctcacgcagccctacactgccgaggagatcgcccgcatcgaaaacttcgccgaggagatcgccaacgaaaagatgaccggacagctctatacgacgggcgttccctactcgccggagaagatccgttcgtcggtaatggccatgagcgccgacccgatcgcatacagcgtagcggccctcgaccgccagcgcggaaaggtagccgacacgcagctcaagagccaggcattcttcacgcagcactatctggaaccggccaaacaactggtccgccagatactcggcggacagaaagccgacgacgcactggtctgccgcgtagcgggaatcaccccggagaagctcgccgaagcgcacacgatcctcactccgccccggcgaggtatgatgatgggccgcgcagctactcctacggaatatacggccgatcaaaaacgcgaagcgcaggccatcgccgaagtggagcgtaccgtgacgaatatccagaactacaaacgggcgctggaggagagtccggaaatggagatgcgctcgattctgaacgctctggcgggcggatacgtcgcaccgacttcgggcggcgatgccgtggccaatccgcaggcggtgcctacgggccgcaacctttatgctgtgaacgcagagaccaccccgtccgaacaggcctgggccaagggcaaggagctggcggagaatacgctcgcacaatacaagaaaacgcacggcgactatccgcgcaaagtcagctacaccttctggagcagtgaatttatcgagagcgaaggtgcgacgatcgcccaggtgctctacatgctgggcgtagagccggtacgcgacgcctacggccgcgtgtccgacctgcggctgatcccttccgagcagttgggccggccccgcgtggacgtaatcgtacagacctcgggccaattccgcgacctagcggcatcgcgcctggcactgatttcgcgggccgtcgagatggcggcggcagcgaccgacgaccggtacggcaaccgcgtggcggaaagcacggtggagaccgaacgcttgctcgtcgagcagggcgtatccccgaaagacgcgcgtgaaatgtccacacagcgggtattcggcggtgtgaacggcatgtacggaaccggcatccaggacatgattaccagcggagacaagtggaccgacgaacaggagatcgccgacgcctacatcaacaacatgggcgccgtgtacggcagcgacgaagagtggggagagatgaaggccgggctgctgcgggccgtgctccacaacacggacgccgtcgtacagccccgtcagagcaacacctggggcgcgttgagcctcgatcacgtctatgagttcatgggcgggatgaacctggccgtgcgcaatgtcacgggcaaggaccccgacgcctatttcgccgactaccgcaaccgcaacaacgtcaaaatgcaggagctcaaggaggctatcggtgtggaatcccgcgccacgatcttcaatccggaatacgtcaaggaggtgatgaagggcggcgcatcgagcgcatcgcagatcaccgaggtcgtgaccaacacctacggatggaacgtcacaaaacccgatgtcatcgacaaggagatgtgggaccggatttacgacgtatatgtcgaggacagctacggcctgggaaccgaacagttcttccgtcagcagaatccggcagccctgcaggaaatcacggccgtaatgctggaaactgcccgcaagggaatgtggaaagcctcggagcagcagctcaacacactggcgaccctgcacacggagctggtcgaagagttcggctcgacgggcagcggattctcgggcggcaacgccaaattgcaggagttcatcgccggacgggtcgctccgcaacatgcggcggcctacaaacagcagatccagaccatgaagaccgtacaaagcccggataacaagaacggaatggtactcaagaaagacgaagtgtccagcggtgaacaaggtcggaaaaacgccctgaacggcgtatggatcgccggcggcgtactggtgttgttcgtcgtcctgctgctggtgctccgcaaaaagagaaaagacaactaatacgatactatgcaactaatcataagcgtactcatcctgttcatcctcatcaactgcgtgctcaaactcagtttctggaggatctggcaggccgctctgttcggagcggtgtgcggcgccttcgtcatcgcgacctacccgtacgccatcctgcaatcgaagacgcagctggccgactacctgcaaaacacgacgactctgcaaaatatggccgttatcatcacgctcgaatcggtcgtctgcttcgcctactgcatcgccgtactgcggggctggttcgggcaacaggaacggtggtgggtgaaaccactgaagtggtaccccagcctgctcgtcttccccgtgctgttctacctgcagaccgaattggtgttcagttttcccggaacgtcgttctcggcgatctcctatgcgttcgccgcagccgtcgtcgtgctgttcccgctgctctgctaccttttccggctcctgctgccggaaaaggagatgcggctggagacgcactttctggtgagtctcttcgtctgcatcatcggcctgctgaccaccgtcaacggcaatgtaacctatccggcggtcgatgagccgacgaactggcgggcactgggattcgccttcggactgttcctggttctcttcgtgcttggggcgctctggaaccgcatcaaatggatcgtcctgcaaaagcgaaacgcccgcaaaaaacattcggcacaaccccgaaccgtcataaattccaagaaatcgtaaaacaaataaacttatatggaaaccatttcacaagtacttttctgggtggccaacagcctgcttatcccggatattctgctgctgttgctgctgttcatccgcgccctgctgctcgtgggcggcatctacaaccaatacatggccaaacgcaagaacgacaagcgactgaacgacctgatcaaaaacctgacaccggacaaggtggacgacctgcgcaaagcgctgcccgcgaaagacaactcgctctacatccgctacctgcgcgacctgctgaccaacccggccagccaggattacgcagactacctgatctcgaatttcgagaacgacgccgagaaggacgtgatcctgtccaaacttctcaccaagatcggccccgtactgggtctgatcggcacgctgatcgccatgagcccggcgctcgtgggactctcgacgggcgacatcgcaggtatgtcctacaatatgcaggtcgtattcgccacgacggtcgtgggcctcgtgatcagcggcgtgggcctggtatccctgcaattcaagcagcgctggtatgccaaggatgtcaataacctggactacgtatcacggaaactgatcgaaaaaaacacggaagcatgaaaccgacccgcagaaaaagcaagttcgccgtacaggaagactccgatccgctgagcgtggtggtcaatctgttcgacgtggcgatggtcttcgccgtagcgctgatggtcgccatggtaatgcatatgaacatgaccgaagtattcacgcaggaagacttcaccgtagtgaaaaaccccggcaaggaaaatatggagatcatcatgaaggagggaaacaagatcaacaaatacaccccctccgaacagcagggttccggtgcgaagggcaagcgcgtcggcatcgcctacgaactggaaaacggagaaatcatttatgtaccagaataataaacagaacggaaaatgaaaaagatcctcgtatcgttgatctgctgcctgaccgcaacgctcggttgggcacaggagaaaaatgcctacacgctgttcgacgcccagggcaatcgggtcgattacacgcagatgatggacgtgctcgaacggcaggatgtcgtattcatcggcgaaatccacaactgccccatcgcccactggatggaatacgaaatcgtcaaagacctttacgaccggcacggcgaccggctgatgatcggcgccgaaatgttcgagcgggacaatcagctgatcctcgacgaatacctggccggaatgattacccccgaacggttcaacgccgaagccaagctctggcccaactacaagaccgactactctccgatcgtcgaattcgccaaagagcacaagattcccttcgtcgccacgaacgtagcacgccgctacgccaacatggtcgccaaaggcggattcgaggcgctggacgggctttcggacgaagcgaaacggtatgtcgcaccgctgcccctgaattatgtgcccaacaagagcgtggacgaatatttcggggccatgaaaatgcccgggatgaaacagagcgccgcagaaaacctttcgaaggcacaggcggtcaaagacgctacgatggcctggtcgatcgccgaacggatgcagtcgaaactcgtccacatgaacggcaacttccactcgacggaccacagcggcatcatcacctacctcaaccagtaccgtcccggtctgaagatcggcacggtggaggtcatccggcaggaaaataccgacaagctcgatcccgaagcactcggtaaggccgatttcttcatctgcgtacccaaagacatgacctcgacgttctgatcgcagacaaacgaaaaaagaggggacgatacggaaaatcgtcccctctttttttgtcgcgccggccttttcggatcgtccggacgctattttatgcgaacagggcttccgttttggcgatcacctcctccgggtcgggatcgatcgggaaaacatgatcgggcttcaggtaccacagcgttttatcctccttgaaatggagttcgccgccgcccgtaatattcagcatcaccacggcatctttggcgatcttgccctcttctacagccttgatgagcgatgcggtggcgatgccggccgccgaatagatatcgacgccttccaactcgaggaacagacgccgcgctttgcgggcgtgggcattggtcagcgcgaacatctcgccgtcggtggctttcagcgcatcgtaaagaccgccggcgatactataaggcggtttgcggttcgacagcaccttggcgtcgatgatctccacgtcacggcgggctttgtcatcgtcgtaatggagcatgtcgcgcgaatcctcccgccaggcgttatacatcggcacgaacggcgcgttctgcgaaaccatcagcttcatcaggtgactaccgaaacggccgtcctcgataaggcgcatattggcttcccaggcggcaatagcacccgtaccgctgccgacggcctggaaatagtaatcggggatccgaccgatagtcgtcgctgccgacagtacggtagtggccataccgtcgcggcgtgccacgttcttcgcaccgccctcggcataaaacttatcgctcttgagtgccaggttgctcaaatggatcgcatcgaaataatctccgcccttctccgaacagatcagtttcacgcaaggatccagcggtccgtcgaaccacagggcatcgaggttgtcggcaggcaccgacaagagcagcggaatccggttgtcggagcagaccttggcgaaggcgcgggccgtattgccggccgacgccacgacaagcacccgcttctcgttctcgtcgatacgggcacagacgctgtaagcctccgtttccttgaacgaacaggtagtcatgtgcgccccgatagccgggtaatagccgttgaaggtaatgtagagattttccagcccgaggtgcgcagccaaccctttacttttgtaggtcaccggagccttcgaattttccagcattcgccgaacaggcaaccagtcggcgaacttgtagaacccgtattcatcggatttgagttcgagctgcttttttgcataacgagtacggatcaacgaaggacacttgcactgggcatcgtccagcgtccacccttcgtccggaaactcccggccggtagcgacacactccagcgtgtaggaagtaggggtaaaatctttcatctattgcggtttaattattacgacatacgggacttgaaatcctcgtagccgaattctctgattatttctattgctccgtcgcggcgcacgatggcgatcgcaggatgcgccacgccgttgaacatcgtggtcttgaccatcgtatagtgaatcatatcctcgaacacgatgcgatcgccgacccgcaggtcgcggtcgaagatccaatccccgtagtaatccccggccagacaactgttgccgcccatacgccaacccttctctcccggttccggatcgcgggcccccaggatcgccggtttatagggcatctccaggcagtcgggcatgtggcaggcgaacgacacgtcgagcatcgccgtacgcacgccgccgttctcaacgatgtcctccacggtcgaaaccaggtaacccgtccgccaagtgaaggcgctgccgggctccaggatcaagcgcaggttcggatatttcgccttgaactcctgcaaaatgcggatcagctcgtcgcaatcgtaatccttgtgggtcataaggtgtccgccgcccatattgagccatttgatccggtcgaggaaacgaccgaaacgcttttcgacggcatcgagcgccaagcgcaaatgttcggggcgggactcgcacagcacgtggaaatgcaatccttccaccccggcgggcagctccttcagctccccggcaggaatacccagccgcgaaccgggcacgcaagggttatagagatcggtttctaccggcgaatagccggggttgatccgcaggccgcacgaaataccgcgcagcagggccatctgtccgaaccgttcgaactgcgcaacggaattgaaggtgatgtgatcgctgcaatcgagaatctcttcgatattccggtcggtatataccggagcgtacgtatgcgccggacggccgaactcctcgaaaaccagcctcgcctcggccagcgacgaagcggtggctccgtcggaatgttgcgcaagctccgggaaaatactccacatggcacaggccttcaaagcgacgatcacttcggcaccgctctcccggcgaacgcggtcgatgaccgccaaattccgatcgagcaactgctcatccagcacaaagcagggagaaggtaatttttgaaaatcgatcatggatttccgatgctgtttcaaattcacgcaaaaatagaaaaaacctcccaaccgggattcaaaaatcccggctatttggaataaataagtatttatacctacctcttttcacaccaatacagaccgataaaaaagtccggacggtacataccatccggactttcaaaccaattatcgaaacccgatcagacttccagatcgacgtcgaatttctcgacccagggcaatccctgcggtcccagttcggccaggaacggatcaggatcgaactcctcgacgttgaacacgcccgcaccgcgccaaagccccttggcccacatcgaagcgcccagcgccgccggaacgcccgtagtaaagctcacggcctgcgtaccggtctcctggaacgccttctcgtgatcgcagttgttgtaaatataatacgtacgctccttgccgtccttgataccccggatgcggcagccgatcgaagtctggccgtgatagttcgcacccagcgacttgggatcgggcagcacggccttcaggaactgaatcggcacgatctccacaccgttgtaaatgatcggatcgatacgggccatgccgatattctgaatcacgcgcaggtgggtcaggtactcctgtccgaaagtcatccagaagcgggctcgcttgatcgtcggatagttctttaccagcgactccagctcctcgtggtagatcacataagattcgcgctcgccgatttcaggataatgaagcggcttgtgtatctcgtgcggttcggtcaccacccacttgccgttctcgtagtaacggcctttttgagtcacttcgcggatattgatttccggattgaaattcgtggcgaaagccatgccgtgattaccggcgttgcaatccacgatatcgaggtagtgaatctcgtcgaaatggtgtttagcggcataggcggtgaaaatagctgtcactcccggatcgaagccgcagcccaggatggccgtcagccccttctccttgaagcgctcctgataggcccactgccacgaatactcgaaatgcgcctcgtccttgggttcgtaattggccgtatcgaggtagttcaccccgcactccaggcaggcgtccatgatggtcagatcctggtacggcagcgccacgttcactacgatatcgggcttgaaagcccgaaacaactcgcacaaatcggctacattgtcggcatcgacctgcgcagtcttcacccggtccccgccgattgccgcagcaatggcatcacacttcgcttttgttcggctggccagcatcacgtccgaaaaaatcggattggcagcaattttctgcgccacgacggtacctacgcctcctgcgccgataatcagagctttacacataaaatttatcttgttttaagatttacgataatcaatattccgtacaaaaatatcgttttattttggcaaaacaaaaattttctatacatttgcaccaccaaaacggataactccggattggcgcggatgattccgtagctcagttggtagagcacaacacttttaatgttggggtcctgggttcgagccccagcgggatcacaaaacgctggacagaaatggacagtaaatgtacaactcctacaataccttgatattgtaggagtttttttttgtataatgtctgtgacctaagacacgaaaggtcacaaaaagacacactttcgttaccaaatcgttacccatttaagagaatgaggactttaattgattgtatctcaattagaaagtagaacttggatgtctcgctgcatgaaacgagatgtgtttggttattccggcgactttcgcccagtgttgcagcgtatcattcaccgttccctcgtgcgtcagcggaaagatataatcactgtcgttcgcctcgccgcgctccggcagccatttcaacgcctcgtccgaaatcggcaggtaaagcggttctttggttttctgcatcgtgatttcgatacggacacgcccgccgctccgttgtaagtcgcaccacctcaatttgcgaatgtcgcttacgcgcaacccgcacagacagctgaacagaaaagcccgcttgacgatctcgtgccggcactcggtatttatcagcgttttcaattcgtcgattgtcagatactcgcggcggctcggctcctgccgcactttacttgcgaaatcgaactctttggtcggattgacggtaatgattccctctttgtaggcacggttgatggccgttctcaaagtaccgtaataggaaacaaccgaattggcgcttaaccgccctccggttttcaatacgccgtatttgctggccttcggcatctgccgcaggtaatcggtaaactccgaaagaaactccttatcgacgtcccgaaaagcgatatagtcgccgcgaaacagcttcaatgcccggacggtattgagcaccgttcgggcatagttccggcttccctgctcggcggactgttttccgatattttccagataatcgagcaggttcactcgggacttgttcgtgttctggaatccgtgcgcgtcgttctgcacctcgacgatccgtttgctctgaatcgctttggcaagggcgagcgtcacttcgttcttcgccttgtcctcccgcgttcgttcgggaataaggtatagcttcagaaactcgtatttccgtttgccgccaacataattttccttgcggatcacgtcacccgtatagtagtccaaatagatggattgatttccgttggataactgcttgaaccggattcgcaccggctccttcaatttgaccgtctgtttctgtttcgccagacccttcccgtttgttgcttcaacggcaaatatagtgaatttgttttgttaccgcagcattttcgagtaacaaatattgggcaattatgggcttagctgagaaaattgcaaaaacatacgaaaatttccgcaatcgaatataaattactatattttaataatttatatttgatttttcatcacttttctatcctttttatatatttggtaggagttcacgaagttctgccacacgatataagcggtcggagcgatcgaggagatcgggttcagaaacgactgggccatccacacggcgagcaccgtattcttctgtcccaacgactgcccgcccgctgcggcatcaccgtaacggcgtcccagcatccgtcccactccgaactgaaccacgcagatcaccatcgcaacgagccccagtgcaatttcggtccagggttcagcattctccaggtcgatgataaaagcggtcgtgcggccaatgacaaaaaccagcgacaccagccacatataaaatgaaatctggctatgcttcgacacccagaatgccactcccggcaagaattttcggcacaactgggcacagacgaacggcagcaccagcaccggtcccacacgggagagaattgccagaaacgtggcatggtcggagcccacgaacgaaagcagcatcggagccaccaaagcgacgaccatgttgcagatcaggctgtacgtagccatcgtggttacgttggcccccaacataccgccgatcaccacggctgccatcgcaaccggagccaggacacaaatcatggccccctgcgccaacaacggatcgaaccagacgaacgacaggtaaaccactatgctgcccacgatctgaaatgccagcagccagacatgcagcatcttcacccgcatctgccgaggcttcacccgacagaaagtgaaaaacagcatcagaaagatcagcgtcggggtaatcatcccgttcgacatactctcggccgctgtcaccggacggcataacaaggctccgaccaccatacccatcggcatggcgatcgtcttgacattccgatgcagggagtgcaacagactcatttccgcggaatattgtcagctcaacaaattatttaagaaagaagctcttttactttggccgatatatccttaccatcagccatacctgccaattttttcgatgcgacacccatcaccttccccatctctttcatcgaggttgcaccgacctcggcaatgatcgaccggacagcctcggtcaactcctcaccggtcatctgtttgggcaggaacgtctgcagcacggcgacttgagccgactcttcggcagccagatcgggacggttctgttgcgcatataccgcagccgactcggccccctgcttggccagcttcgcaatgatcttcagcacctcggcatcggacaattcggtgatacccgccgaagcggtcttcgcctcgataatatacttcttcacgttgcgcaacgtcgtaagacgtacggtatccttggccttcatagcctccatgattcctttggaaatttcctgttctaaagccataatatcaactattttaagtctgtttgtctatctttcatattcgatcattcaacgccggtttcggacgccgctcgacaagcagcgacattccgattacggtaaacagcgcgttgtaggcgatcaattcgaagccgatatggtagtcgtacttatacgcgacgaaactttgcagggcgaccgacagcaacggagccgcgaaagccaccagcggaacccagcggtcacgaatccgccgccgggtgcagatgccgaatgcgaacattcccagaataggcccgtacgtataacccgcaaccttgaaaatcaagttaatcacactgtcattaccgaaccggccgaaaaagagaaccacacaccccatcacgagtgccattacgacgtgcaccccgatacgtacctgcgtcaaccgcccttcgccccaacgcttcggaccgcgcaagatatccacggtgaacgaagtcgtcaatgccgtcatggcagccccggcagatgaataggtactcgatataagtcccacaacgaacataataccaacgataagcggcaatccgccgttcacggcgactacggcgaacagttgatcgcctttctcgggcatcggcaatccagcatgttctgcatagaggtagagcagcacgccgagcaccagaaaaagcaggatcacagccatctggctgaaggccgtaatcacgatgttgatctgcgaatcccggggcgagcggcagctcaagttccgctgcatcatatcctgatccaaaccggtcatggcgaccagcgtgaagacacccccgaaaaacattttccagaaataacgggccgacccggtatcctcgaaaaagaagatgcgcgacatcggcgaatcgcaaacggcctgcacaactccggccgatgtcagaccgaggctccgcatgataaagacgatgcagagcacgatactccccaccagacaacacgtatgcagaatatccgtccagacgaccgaacggacaccgccccgccaggtatagagccagaccaatccgaccaagaaagccgcattgactgcgaacggcacgccgaacgggtcgaacaccagcacctgcagcacggtgcagacgacataaactttcaatgccgcggcgaacattttggatatgaaaaagaaccaggcccccgtaaggtgggtcgtcataccgaaacgtccgtcgagatattcgtacagggagactaccttcaaccggtagaaaagcggaatcagcacgaaggcgatcaccatctgcccgacggtaaaacccagcaccatctgcaggtaggagaacgaatcggccgcaaccgaccccggcaccgacacgaaagttatgcccgacatcgccgccccgaccattgccaaagccgccacataccagggattctcccggttaccggtaaaaaagcccgtgttcgacacccgccttccggcgattcccgcaacgacgaaaagcattgcgatatacccgagcacggtgagcagtacggccgtaggagtcattgtaaatcgtaaattttccgaaaatgagtaacggacaaggccgcgctcctcccgcgaatcgtaaaacacctccgaaaggatcgacgcccgcccatacaaatgacaaagatacgaataagccgagcgcaaaagcaaattttatttgcattttgccgaggcgaagtatctaaataaaaaggcagcgacacgatcgggaatcccagatacgaaattcgaaaaatctgttccggcataaggttcgacatctctttcggaaccggcggcacgaattcccacgctcccgcattccccgaaacccggtcagggacagaggcaaatccggtgtccggaaccgactctcggcaacacgccgtaacctattgtttcacaacgattaaaaaaatccattcgacgcctttttccgcttcgttcgaaacgatcaccggggcagaaattatttattaaaaatttttgcacaaaatttggaaattcaaatttgttcactatatttgttattcgaataacaatacggcccttctccgaagaaaaacggagcgagcccaaaggaagggaaataaccattaaaaattcaatacaatggccaaatcattaaaaatcagagatcttacgttgcgtgacggccaacagtcgtctttcgctacacgaatgaaccaggcccaaatcgaccgctgccttcctttctacaaggatgcgaacttttacgccatggaagtttggggcggcgcagtgcccgactcggtaatgcgctacctgaatgaaaatccctggacccgcctggaaaccattcacaaggcaatcggaaacgtatcgaagctcacggccctttcgcgcggccgcaacctcttcggttacgccccctatacggacgagatcatcgacggcttctgccgtaattcgattcagagcggcttgggcatcatgcgtatcttcgatgccctgaacgacgtgaacaacgtcaaatcgaccgtaaaatacgtgaagcaatacggcggtatcgccgattgtgctgtgtgctatacggtagatccgaaatatccggaaatcgggttcttcggcaaattgatgggcaagaagaacccgaagccggtatttacggacgaatacttcctctcgaaagccaagcaaatggaggcgctgggagccgatatgatcacgatcaaggatatgtcgggtctgatcccgccccaccgcgtgagcaaactggtgaaactcttcaagcagaatctgaatgtccccatcgatttccacacccactgcaccccgggctacggtctggcatcggtgctggcggcgatcgtcgcaggagtcgatatcgtcgataccaactgctggtacttcagcggcggtacgggagcgccggctatcgagttgatctacgtcttctgcaagaaactggggatcgacacgggtgtcaacatggaagccgttgccaagatcaacacccagctcaaggagatccgcaaagagctcgaaatttcggtcttcggcaaagagaagcctatgccgaagcctttcaatccgctcaccgacgaacttccgaaggagatcgacgccgaattcgaccgtgcgatcaaagcagcgcaggcggacgacgaagagacgctgctcgacgcctgccacaagatcgaggcccatttcggattcccggcaccgaacgaactggtcaagaaggccgaaatcccgggcggcatgtactccaacatggtggcacagctccagcagctcaaggccgaggagattctgccccgcgccatggagttgatcccgactgtacgtctggccgcaggtctgccgccgctggtgacccctacctcgcagatcgtgggtgcccaggccgtaagctgcgcattggacgaaaaggccggacggccgatgtacacgaccaagagttcgcaattcgttgctctcgtaaagggcgaatacggtgaaacgccggtgaagatcgaccccgaattccggttcaagatctgcggtgtacgcgaagagattccctacgatacgtcgaaataccagatgcagcccaatcccgaactgcccgaagcaggaggcgtaaagctcgctgccaatgaaaaagaggtgcttctgctcgagctcttcccgatggttgccaagacattcctcaccgaccagaagaagaaagcctacgaagcgacggcagccaaagacactccgaaaactgccgcccggagcgaacacaaggtcgaagccaaagccatcacgggccacaaggtgaccgctcccctgccgggcaagatcatcgccctgaaggtgaaggtcggcgacaaggtaaaagccggacaggaagtggttatcctcgaagcgatgaagatggaaaactcgatcaccagcgacgtggcgggtacgatcaagcagattctcgtacaggaaggcgacaacgtcgcaaccgatgccatcctggtggaagtggaagaatagctcctttccggaaatatcatccgaccggtcccgaaaaatcaacgggaccggtttttctttttgcaaataaatagtatctttgacttcgtcttggatacttcgcctcggcaaaatgcaaataaaatttgcttttgcactcggcttattcgtaatctttgacttcgtcttagatacttcgcctcggcaaaatgcaaataaaatttgcttttgcactcggcttattcgtatctttgtatattatcgtattgcatttgccacaattaaccttaaaaatcaacgtatatgtcttttttcaaagaatttcgggaatttgccctcaagggcaacgtaatggacatggctgtcggcgtaatcatcggcggtgcgttcggaaaaatcgtttcatcgctagtcaacgacatcctgatgccgcccatcggcgccctcatcggcaatacggacttctcgtcgctgcggctcgacatcagcaaggtgcgcgacctctcctcgaaagcgacacacgtagtgaccgacgcaatcgggtcgggtacggcggagagtgttcctgcggaaccgatctggtggaattacggcgcattcatccaacagtgcgtggatttcgctatcctggccttctgcgtctttctgatggtcaagatgatgaacaagctgatgaagaaaaaacaggaagccgcgccggcaccggtgccggaaccgtccaaggaggagttgttgcttacggagattcgggacctgctccgggaacaaaaaaaataatccgtccgaaagcggatcccatgcgcaaagtccgactccgatcaagagtcggactttctgttgcgcgtataaatctgagtgacatacaccgtgaaaatcgggaacatcatcattcccaacgtagggagcaacaccgtcaatatcttaccgacggccgtcacggcaaagatatcggcaccgacagtcgtaaggttcatactggcccaccagatcgcatcgccgaaatcgtgcaacgcaggattgacttcgatctcgtaatcataaaaaatcaaagcggcgaaataggtgaacaccaacatcgacaagacgtaggaggtcagcaatcgcgtaacccgattattgatgatccaggtgaaaagcacatacagccccagcaaagcccgcaaaagaggtacgagtcccatcagcatcgcttccgcatgcgaaagttcgatccccatccaatcgacgatattcaaatagggaacggaaagaagaaagaaatagagattgcgaaagaaaaaacgccaactgtggtcagccatccacatccgggcaaagaaatcggccagaaaaacaacacagacgatcccttgcaacagcaggtagtcagtcgaataatgccgcgggtcccccaggagaatctcccacgaaacggccacgagcagagatgctccggccaggagggacaagacattgagtatcttgagcggcagaggttgaaagtcggaagtcttcgcttgcaccatatacgattctcattttacttccctttacccgtcaaaatcaatgccatacgattcaacatgcattttcaggacatatttttcggagaaagatttggtccgttcaactttttggtttatatttgcactcgctttgaaacggaaagctatggcgagatagctcagctggttagagcgcatgattcataatcatgaggtcgagagttcaagtctctctctcgctacaaacgatgaagaaaccccacagtcaggcaactcttgaagagttgcctgactttctttttaccaagtgaaagcctgacaagtcaaaaattccaattgcagcgagccgttcaaaaaattcccacttcgaacacaaaaataagcgcagaagacacaactttacaatttttgtccccttgtacttcaccctatcgctccgatttaggtacgagcaaaatcacatccagcacatcgcccggagccgcagcctggtaacgccacacgagccgccccgcctgctcctgcacgacctcgccgatcggctgccaccggttttcctcgcgtgcgaatttcttatccagcggtccgggaatccacttgaacacttcataccgaccttcggccacatcgggaaaaacgaacgatacggaggcccctttccgctccgcgaccagataggaaccgccgaaaaactgacggtccttcgccgtgcggcgcaaccatttgccccgccccttcatccgctccgaatcagcctgccgtcgctcgctgccgcccaaatcgagcaggtcgctcaaggccaacagcgacgcatgtgccaattcagccaaactctcccgggaaacccattcccctgccggatcgttattataataagtatagggcgtttcgaacgtcacggccagcgttctctcgccgaagcgctgccagaaccaaccctcggcataccggggagcagcttccgaaaaacgctggtcgatgggacggtaatacggcgtatgggcgaccgtcagggccgacagcagcatcttgcgtcgatacatttttgcagaggtcgatttcgccgtatgaatccagtacgtcacgaacggcgcactctgggagtgaagattcaacgctacgtcgaaaggacgctctgtcgaaagactgtcgatcgtgcgtttcaggaccctcacttcaggctgtgtcagggagtcgggccgatcccagttgatttcaagattgacaccttgcgccgtggaacgggaataaccgccccgaacaccgtcaggattggtctcgggaaccacgtagaaaaccgtgcggcgcaaaatctcccgcgaaagaggcgcatcggaaagcagttcgtcgatcattgcctcgagataccatgcagcaggtgcttcgctggtatgcacacgggagtgaatccacacccggcgcttgaggctgtccggaacagtggcatccgtgaggatcagcatttcgatcggacgtccttctccgctccggccgatccgctgacgtcgcacgaaaggcgaacatgcccactcgtcggctttggctttatgtcgggcatgactgtaaggcaggaaataagcgacataaaccgtgtcgtgcaggaaatatttatagactgtctgcggcagcgaacattcacctgcatcgaagcgcaggtattcctccccgtcgtacgaataaaacggccgcaccatctcggtattgggaatacgcagaaacatcagctttcccttcaccccttccaggcgaaaatggaaccagcggctgctgggcagaagggccgtatcgacgggattgagtgggtcgatgcgcgaccgtattccgaagctcatcacctccagcgaatttttcgcggcatgaagcatccgcaccgaatcgatccggcggaccgacccgatgctgcccgtatcgaaatcggcagagatggttacctgcgccgcaacatttccccaaacgcccggtagtgcgacggccaataggacaatttttatccacaacgccttcataaacgaaaatttatgatttcggctccgagccgggagcgcccgtttcacaacagcattttccgcaactcatcgcagctccgctgcgcttcgcggtgacggaacagaaaagtcgaaataccgaatgtacgggcggcttcgagattcaccggacggtcgtcgataaaaagggtttcggccggatcgagcgaataacgatcgagcagacgacggtagatctccggctcgggcttcacgacctgctcttcgcaggagatgacctccccgtcgaaacagcggtaaaccggcatcttgcgcaggaagtcgatgaactcccgcgacatgttcgacagcacatataacttataaccgacccgtttcaggtcgccgaccaacgcacgggtttcgacgatctcctcctgccggtcgatcgcatcccgaataaaacgggccgtgacccgctcatcgcacgccttttcccggctcaatatacggacgacctcatcgagcgtaagggtgccccggtcgtaatccacccaaaattccggcattttctccgcatggatgaacgcgaagaactccataaattccggctcccacttacgtggatcgcgcccgaaaaccacacctcccagatcaaatacgatatttttcatacggcaaagatagtgaaaggtgagtgcaatcgtgcgggcttgcacgcaaagattgccgaaccgcctcctatcttctgcaaagatagtgaaaaccgagagaaaacgggaacttgtttacagttttccgaggcgcaacctacgtaaaatcgtacaaggcacgggcaaattaaaatatcgcttccgaacaaaacaaccttttcatctaattttttagtagatttatttgcacatctaaaattttagtactaaatttgtagtaaaccaataaaaacacaatgaaaacagacaataccaccctcaaaaaactgacacgcggcgaagaagaggtcatgcagatcctctggcaactgggcgcaggttccatcaatgatctcatcgccgcaatgcaggagcccaaaccgaaatatacgaccatcgccactttcgtcaaaatactcgagaacaaaggctacgtcggacgtacggaacggggcaaaagttacgaatactacccgctcgttcccaaagaagagtacgccaagacggttgtttcttcgatattgaactcctacttcgacgggtcgttggcccaaatggtttctttcttctcccggcgagaagacctttcgatacaagaaaccgaacaaatcctcgccatcatccggcaagcccgacataaaaccgacaagtcatgaaagagatcgtccgatacatcctcgaaacagtcgtttgcagcggcatactgtacggcgcatacctgctgtttctgcgcaattgcacggggtacctcgcagcacggctctgcctcacggggtcgctcctcgcggcggctctcattcccttgctccgaattccggtctggccgggcaaggtgatttacgccaccgcaggcactcccgccaaaaccaccttcaccgccccctccgtttccgccgccgcgttcgattacgaggcagcgatatggatcgtgtacggttgcggagtacttcttctactctcttccatgttccggcaagcgcttctgatccgacgcctgcgacgacacagtacacaggaacgaatcggacgtatcgtattggtacgccctactgctcaaatcgcatcgttctccttcttccgcacgatttatatcagccgctccgtcgcagaaaaagacattgcggcgatcttcgcccacgaaaagagtcacgtcatccaccgccattcgctcgaacggatcgttatggagagcctgaaagccctgctgtggtggaatcctttcgcgtggctcgcagcacgcgcacttaccgaagtggaagagttcgaagccgaccgcgacgtactcgccgaggggcacgacacaggaaattatctgaaaaccatcttcacgcagcagttcggttacagtccggacgtagccgacggtctgtccaattcattaaccaattcattaacaaaaaaacgaatccaaatgatgacaacgcctatgaagagcagatacgctctgctccgcctgatcgcaatgctccccatcgtcaccggcctgctggcagctttcggattcacctccaaagcggcagaaatccgcatccaggacaaattgccgtcagcttacaccccgaccgacccgccagcggaaaccgccgaaaaaaccgcctccccggaaaacgaagactacgacctactgctcgtagtcgatggggaagtcaccgatttcaagacggatcccgtcaccggcctgcgctctcttacacttcccagtggtacctatagcatcgtaggaacagagaatctcacgcccgaaatgcgcgagaaatacgccgcctatcttcccggaaaggccgccgtctttttttacaaaaaagacacgacagggaaagcttcgaaagtccaaatacgggatgaaaccgcttactcccagatcgccgtctgcaatgccacgctcgcactcgaacagacagaacagatgccctcattccagagcggagatatgaaggctttccacaactgggtaaacagtcagattcgttatccggcggaggctttcaaaaataacctcggcgggaaagtcgtagcacaattcactgtcgatcaagccggcagcgtcggcgacataaagattttgcagtccccggataaatgcttcagcgatgaagtgacccggatactggaatcctcgccgaaatggacaccgggccgcgacgaaaaaggtgacgccgtaaaggtcagtctcgtcattcccgtcgatttccgaatgaccgcagaaaagccttcggaaaattaacaggactctttacaacccccgcaggacaagaatccctgaattggccgggaattttccgatccatacccttgtcaagcagcttctaccaacaaaaaagaggttacggtttacaccgtaacctctttttacatcagaatatagacctctatcagctgccgaaattatcgtaaagaatattctcggaaggcacgcccaggctgtcgagcatcttcaccaccgacgaaatcatcatcggaggaccgcacatgaggtaaatattgtcctcgggagcctgatggttcttcaggtaattctcatacagcacgttgtgcacgaatccgggcgtatatttcactccggcggcatccgcctggggatccggacggtcgagcgccagatggaacttgaaattcgggaactcccgctggatttcgaggaactcatccatatacggcacctccttgagcgcgcgggcgccgtaccagaacgatacgggacgcgaagtcttctcggtcttgaacaggtgcatgatgtggctgcgcatcggtgccatacctgcaccgccgccgatgaataccagctcctgcgtcgcgggcaggttgtcaggcaggaagaactcgccgtaaggacccgaaatcgtcaccttgtcgcccggcttgcgggagaagatgtacgacgagcagataccgggattcaccttggcgaaagtacccgtagcccggtcgaacggaggcgtggcgatacggatgttgagcatgatgatattgccctcggccggatggttggccatcgaataggcccggaacgtaggttcgggattcttggtcaccagatcccacatcttcatcttatcccaatcctcgcggtaaggctcttcgatgtccatgtcggagaatttgatggcatcgtacttcggaatgtcgatctggatatagccgccgctgcggaacttgaggttctcgccttcaggtaatttcaccacgaactccttgaggaaggtcgagatattgcggttcgagatcacctcgcactcccacttcttgacacccagcaccgactccggcacgtggatcttgagattttccttgactttcacctgacagcccaagcgccaatgctccttggccatcttgcggttgataaagcccgtttcggtcggcagcagttcgccgccgccctccagcacctgacatttgcacatgccgcacgaaccgccgccgccgcatgccgacggcaggaacacgttgttgttggccagcgtcgaaagcagcgtgccgccgctctcggcgatgagcactttctccccgccgttgatgtcgatggtgacatcgcccgaggtagtcagtttcgccttcgcaaagagaagcaaccccacgagtgccagggttatcaccagaaaggcaacgatcgctatgataattgttaacgtcatctttttatctcttttaaaggattacaacttgatacccgagaagatcatgaacgcgatacccatcaaacccgtgatgatgaatgcgataccgggaccccggagtgcagcgggaatctgcgagtaggtcgtcttctcgcgaatggcggccatcatcacgatcgccagccaccagcccagaccggaacccagaccatagacgatcgactgccagagcgaagtgatctccagcgcatcgaccttttgctgcatgaagagcgaaccgcccagaatggcgcagttcacggcgatcagcggcaggaagatacccaactgattataaagcgtcggcgagaatttctcgacggccatctccacgagctgcacgaaagcggcgatcgtggcgatgaagacgatgaaagtcaaaaagctcaaatcaacacccgggaccaatacatcggctttgaggacgtattcgtacaaaaggtagttcagaggcacggtcatcaccatcacgaacgtaacggccagacccaggccgagggccgtcttgacgctcttcgatacggcgatgtaggaacacatgccgaagaagaaggcgaagaccatgttgtcgataaagatcgaccgaataaagatattcaatgattccatacgttaccctcctatttttcctgtaaatccttgttgtgagaacgatgtacccagatgatgcaccccacgatgatcagcgccatcggcgggaagagcatcagaccgttgttggaatagccgccgccgttggcgatgtaccagctttcgggaacgatctggtagccgagcagcgttcccgaaccgaacagttcgcggaagaaggccacgatcaccagaatcataccgtagcccagaccgttgccgataccgtcgaggaatgcgggccagggcttgttgcccagagcgaatgcctccacacgacccatcacgatacagttggtgataatcagaccgacatagacggaaagctgtttggacacttcatagacgtatgccttcagtatctggtccacgagaatcaccagcgcggcgatcacgaccagctgaacgataatacggatacgcgaaggcacgcccttgcgcaggcaagacatcaccatactcgaaaaaccggtcacgacggccaccgagagggccattacgatcgccggcttcatctgcacggttaccgccagggccgagcagatacccaggatctgcacgatgacggggttgtttgcagagaacggactggtcaggtatttcaaattcttagccgagaagatcgactccttttcattactcatggctctcgtttacgttttgctggttagacacttccgaacttgcagcctcgttcgcggcagcgggtgccgactgtgctgcggcctgatgctgactttcgaagtaaggcaggtaagccgacaggcaatcgcggagcatggccgtcacgccgtccgaggttttcgtaccgcccgaaataccatctacctcgtgctcgggatctttcgcaccgcccttgcgcaggctgaccgatacgaactcgccgttcttgaacagcttcttgccggcgaaatgcgcctggaacttaggcgtggcgatctcggcaccgaggcccggggtttcgcccttgtgggccatgacgatacccgacacggtatccatatccttttcgagcgccacatacccccagatatcgccccaaagacccataccgatcagcggaatgacgacgcgaccgtcttcagtctgaaacagaataagacgcttggcatcgtaattatcgcggatattctggttggtggcgagcatcgcgaagacctccttggagggagtttcggttttcacgccgtcggcatcgaggacgaaggatttgacctggttgtcgaaatcggccagcgcccggtcgaactcctgcggattttcgtcggggctgtacccgagcgactggagaatattactcttcttctcctgcaactcgttctccgcctgacgcttttgcaacgagagcgaagccacggccagcagagtcgccacgatgacgaccatgaccgtagaatagacgatgatataagtgttgctgttgggattgtgcatccagccctttttccggccggaccgatcctccgtaaatgccgacgaggaagcctggcagacagggcaggtatcgggtgcggagttgccttcgtggacatgtccgcaaatgctgcatacgaattttttctttgccatatctcccctattttaccaatttaacacgtttcttccggcgcgagatgctggactcgaccacgcagtagtccaccagcggagccaatgcgttcatgaagaggatcgcaagcatcataccttcgggataggccggattgaccacacggatcaacacggcgagcgcaccggtgaggaatccgacgatatactggcccgtacgggtctgggccgacgtgacgggatcggtggccatgaacacggcgccgaaagcgaaaccgccgacgatcagatgctcccaagcggggtaggtcgtcacgccgagtgcctggaaaaagtatcccattgccaggccgccgataaagacgaacgacatcgtgcgccacgaagcgacgcccgtaaagagcagaatcgctgcgccgatcagaatcgccagcgtcgaagtttcgcccacgcagccgggaatgaatcccaggaaagcgtccgccgtcgaataactcatcgcaccgctcgtagcgagttgttcgagggccgtagcacccgagacagcgtcgtcggcgaaccagaccttctcacccgaaataaagggcgtgtaggcgaaaaacacgaatgcacgcgccaccagcgcgggattgaagacattcatacccgtaccgccgaagacctccttgccgaagatgacggcgaaagccgtacccagcgcgatcatccagagcggcgtaccgaccggcataatcatcgggatcagcagacccgacacgagaaaaccttcattgacttcgtgtccgcgcttctgggcaaaaaagaactcgatgcccagaccgaccacgtaggaaaccacgatcatcggcagcaccttgaggaaaccgaaccaaaaggctgcccagccggtcatgcccacctgatagcccgtattgtacataccgaacaacaaggccggcatcagcgccacgaccaccacgatcatcgtacgcttcatatcgttgcaatcgcggatatgggctcctctgctcgtggtcgtattcggcacgaaaaggaacgtttcgaacgcatcgaaggtcgatgcgaggaacgaaagcttgccgccttcggagaaggtcggcttgattttatctacgaattttcttaaacctcccatcgttatgcctccttgatcattaagttaataccgtcccggatgatctgctgcatctcgatcttcgagggatcgacgaattcgcagagcgcgaaatcctcctcgacgacctcgtagatgccgaggttctccatcttgtcgatgtcgcccgcaagaatcgccttgagcaggtaggtgggatagatgtccatcggcaggtatttgtcgtacagtcccgttaccacgaacgggcgctcgccgccgttgagattggtatccaggtcgtaaaccttcttcgggcagagccatgaaaaataggccctggaaaccgaaaacttgttcagacggggcatcgcccaacccagcaattcataatggttgccttcgggaattaccgtcaccatgtttgcataaaaaccgatgaaaccgtcggccggggtcttgcgtcccgtaagcacgttgcccgaaatgatgcggggattgtgggccgtgggcttcaggttgtccttgagcaccgaagccaccggagcaccgtcgataagccggtagtactggggatttttcacctcggagcctgcgaccgcgatgactttggttctatcgacgcgcccttcgttcagcaggcggccgatgatggccagatcctgaatattcaccgtccacacccgctcgtccttgttgatcggatcgacgtgatgaatctgaacgcctacattacctaccggatgcttgcctgcaaacgtgtggatttcggcccctttcaaagatgccatttcgccctccgcaccggcacgcacgcccagatggaccttacccgaagcgagcttgcgcatcgcttcgatacccgtttcgaggttccgcttctcaccggccagcacgaaattgtaatccggagccagcggtgcggaatcgaacgtcgaaacgaaaacggccttcggtgtgtcgctcggatcggcgatgataccgtaaggccgctggataatcatgggccaaagcccggacttgagcaaaagatcgataatctcttcgcgggaagcggtttgcacgttcaacttggcaaactcttcgtacgtctgggtcgcatcggcctggaccgtcacgttgagaatgcaacgcttctcaccgcgattgatcgccgaaaccgtaccgctgacgggcgaggtgaaaaccaccctttcgttgtacttgttgaagaacaacggggtacccgccttgacccggtcgccggctttcaccagcaacttgggcgtcacaccctcgaaatcgagaggcgacacggcgtactcgggagcgagcggcaatttgaccagcttctccacggccttaccctgaagattgatgtcgagacctttgcgtaatgtaatgattttcgacatggttaataaatggttgttttacagataattattttgcattgagttttccaggcaatgtttgttagcgcaataacacactaaatcgcgtgcgaagatacgattttttccgatacgaacagcaaagagcggcctgatttttttaatcgactgaaaaatcataactttgtcttttcagagcgatccgcattatgaaatgcagcatagtcgatatccacacgcaccgtcccaccggcaaggccctggagccctctttcgcagggattcatccctggcaggcggaaacacggcgaatcgaagagatcgtcccccggttcggcgaagtcgatctgataggcgagatcggcctggactatgccggcacggtcggccgggaggcccaactccggattttccgcgaacagctcgactgggccgaacggctcggcaaaccggtcgtgctgcactgtgtgaaggccttcgaagcagtcatgcgcgaactggctccccatacgctgcgggcagtgatcttccacggcttcatcggatcgtcccagcaggcggccgaagccgtaaagaagggttactatctctccttcggggagcggacgttccgctcgccccgcacggtcgaagccctgcggcgcacgccggtcgaaaacctcttcgccgaaacggacgaaagcgacgtgccgatcgaggagatttaccgccggatcgcccaagcgaaagacctcgaccctgaactgttgaaatgcgcgatataccgcaattacagagagatattcgaacgatgactgacaactggctcgaaagaacggagctcctgctgggagcggaaaaactcgaaaaactgcgtgcggcccacgtgctggtcgtaggattgggcggcgtgggcgcctatgccgccgagatgatcgtccgggcaggcgtggggcgcatgaccgtcgccgatgccgacacggtcaatccgaccaatatcaaccgccagctggtggccctccactcgaccgtcggacggcccaaagccgaggtgctggccgagcggctgcgggacatcaacccgacactcgaactccacgtagtcgataaatacatcaaggacgaagaaaccgacctgttgctcgactcggcacggttcgactacgcggtcgatgcgatcgacaccctctcgcccaagctggcgctgatcctgggggcgctgaaacgcggcattcccctggtcagctcgatgggcgccggagccaaaaccgaccccacgcggctcgaaatcgaggacatctcccgcacccaccactgcccgctggcccacatgctgcgcaaacggcttcacaaagccggagtacgcagcggcttcaaagccgtattctccgccgaaccggtacgcgaaggcgcgacgatcctctgcgaagaacagaacaagaaatccaacacgggcacgatctcctacctgcccgccctcttcggcataggctgcgcctcggtagtcgtccggggagtgatcggagagctgtaagcggaccgcaacagccgtcccgcgtacaagaaaaccgctcaaacggctgtcggaacggatttatgaccatccagaagcggttagatccgtttttcgaaatattattatctttgacatagcctcggttaaataggctgcgcctcggaaaacgggaacaattcccgttttctctcggcttttagtatctttgtttttaagatatgaatcggacaaactcaaccaagtttggcttagtgtccatcttttcgtatctttgacttcgtcttagatactccgcctcggcaaaatgcaaataaaaattgcttttgcgctcggcttattcgtatctttgcaaaacagcggcgaacgatgcgaacaagcatagccgaggcagctccgtaatccgccggtcacgacagatggacgatacagtccgcaaacgagatcgcccgtgtccggtccggagacaagcccgccggctgcgacgcggaacctacgactgttccgtcgaggccccggcaatcccgatccgtaccggaaactgcggaaacacctccgtttcccgtacccggtaccaccacggatccgcagacaatggtacaaaaaatgatggtcttattcggcgaggcccctgcttcggcggatgcacataccgaaacaagacccgaaataaaaccgcaactatgaatatcgtatttttagatgagtacagcctgggaggaatcgacctctcccgcatcaagcaactgggaaattataccggctacgaaaaaacgacgcccggtgaaatagccgagcgttgtatcgacgcagacatcgtcatcaccaacaaggtccccctgcgggccgaagctatcaaggtgctgccgcagctcaaactgatctgcatcgccgctaccggtatgaacaacgtcgatctggaagccgccgccgaacgcgggattgaggtccgcaacgctgtcggctactccacccatgcggtgacggaaacgacgatcggtgccgccatcgccctgctgcggcagagcatctactacgaccgctacgtcaagagcggcgaatacgccgcatccgacgctccgttccatttcggacggccgctccaccagctctacggcaaacgctggggtatcatcggcctgggagccatcgggcacaaggtcgccgaagtcgccgcagccctcggctgccagatcgcctatacttcgacttcgggtgtcgaacggcaggaaccctaccccgccatgccgctcgacgaactgctccgctggtcggacatcgtgtcgatccacgctcccttgaacgaccgcacgcgcggcctcgtcggagcccgggaattggccctgatgaaaccttcggccctattgatcaacgtagcccgaggtggcatcgtcgatgagcaggccctcgccgatgcgctcgacaacaagcggctggccggtgccggaatcgatgtcttctcgcgcgagccgatgtcgccggacaaccccctgctgcgtgtaacagaccccgaccggttgctgctctcgccccacacggcctgggccccggtcgaagcactcgaaacattggtcggctgcatcgaacggaatatcgaaacctttttagccgaacagcgatagtaagacgccgccgaagcgaccgaatgagaaaaccccggactgaacttaagttcagtccggggttttcttcgatttttctgttatgaatcaaacaattccgatgcgcaccggtccgcgagccctggcagcctcgtaatccgcatcggtaaatgtataagtccattccacgacgtatttatccccctcttcataagccttgtaaacataacgatcgggatcctgcaaacttttcggaaccgcaacttctccgagtcccgacggataataattttccatataacagtaaattataactccttctgtaaaagaatcgtagataacatgagtttctcttccgtcgagaaaagtctgcaaatccacgggcgaaggtccttccaattcttttacagcccgctctccatactttattccctgggatctcgtgatgcacccctctacatagaaatattcgatcctatgattgcacctattctcccacacgaaccggctgacataggacgaataggttttatcgtcgctgtcattgcaacttacaagagagcacagcacgacgcaaatcatccacaaataaagaatctttctcataatttaaattcaggctgatttgacttcattataaaagtaatagataatattcgaaaatacaacttcgtttcttgaatcttttaagaaaattcccggaaatcgaatccgacttccgggaagaatcaaatgcctgatattcctaaaaattaaatttccccaagcgtaatatgcaccgcaccccgggctttcgccgcctcgtaatcggcattggtgaaagtataaacccaaaccaaagccagactaccgtttttctccttatttaccaaagtatagcgctgcacgtcctgcaaaccctttggcacagcggaattacccgaccccgacgggtcgtagttttccatatatgcatacgtttcgccatcgacgacaaactgctcataccacagccccatctttcggtcctcaatatagtccgacaaaccttccggtgagccggacacccgcacggaaacatactttccacgattaatcccgtcatgccaccgataccctccttctacataaaagaaatcgattcgataatcgctctcatttttccattcgatccaatattcatcgaccggttcgacctgcttctcgtcgtcgccacaaccgctcgaaaagatcaatgccgaaagcgccgcaacgcaacagataaattttttcataaaccttaaattaaaattcgaagaagatacccacaacaaacagttacgaagaatacaaaatattcgggaataaatcctcccgaatcctctaaaaaagatttgcgttgaaaaacagatgtttttcaacgcaaatcaaaatcgatataaaatccactctatacctataagagttcccctacttaaattccaccagcgaatgtcctgtcatggcttcgggcttttcgagccccatcaggtcgaggaccgtaggcgctacgtcggccaggataccgtcgcggaccgttttcacgcggtcggaaaccacgacgatcggcaccggattgagcgaatgggccgtattgggcgtgccgtcggcattgaccgcattgtcggcgttgccgtgatcggcgatctgcacgacctcgtacccgttgcgaagggccgcctcgacgactttggccacgcacgcatcgacagccttcaccgctttctcgatcgcctcataaactcccgtatgccccaccatatcgccgttggcgaaattcaggcagatgaaatcgtatttctgcctgtcgagtgccccgaccagcttgtcggccacctcgtaagcgctcatctcgggctgaaggtcgtaagtcgccaccttcggagaagcgaccagaatgcggtcctcgccctcgaactcctcctcgcggcctccgttcaggaagaaggtcacatgagcgtatttctccgtttcggcgatacggagctgcgaaagcccctgccgggcgacatactcgccaatcgtgtcggccacgttctccttgtcgaacaggatatgcagcccctcgaacttggcgtcatagggggtcatgcagcaatagtagagcggcagcgtgtgcatgccctgctgcggcatatcctcctgtgtgagtacgatggtcagctccttggcccggtcgttccggtagttgaagaagatcaccacgtcgttcggccggatcataccgatcggattgccgtcctcgtcgatccgcacgacgggcttcacgaactcgtcggtcaccccttcgtcgtacgacttctgcatcgccagcgccatatcggacgaatgttcgcccttgccctcgaccaacaggtcgtaggccaccttcacacgctcccaacgcttgtcgcggtccatcgcgtaataacggcctacgatcgaggccacgacgcccgtcgatcgttcccgcatgtgcttttccagccgttcgatgaatcccttgccgctgtacggatcggtatcgcggccgtccataaagcaatgcacgtaggtacgttcgataccgtatttatcggcgatgtccgtcaatttgagcaggtgatccagcgacgagtgcaccccgccgtccgaaaccaatcccatcaggtgcacgctcaccccgttcgatttggcgtattcgaacgccttcacgatttcgggattcttcagaatcgaatcgtcgcggcaggcccggttgatcttcaccaaatcctgatagaccacccgccccgcaccgatattgaggtgccccacctccgaattgcccatctgcccatcgggcaggccgacgttttcgccgtccgtacgcaactgcgcatgagggtatttacgggtcatttccgaaatataggcaggatgcacctgtgcgatgacatcccccttctgtccgtcgccgatgccccaaccgtcgaggatcatcagcaatactttgcgattactcatccgaaacattactttacttgttccacaatcagttctacggccttgtcgatagccgcctggatgccatcggggttcttaccgcccgccgtcgccaggaaaggctgtccgccgccgccgccgttgatggctttggccgcctcgcgcaccacgacaccggcattgactccctgcgccacgatatcgtcgcccaaagcgacggtgagcgtcggcttgccgtcattgatcgatccgatcaccagtacgatattcttcgaacgcgaacgcacggcgaaagcgaggtccttgatgaaatccggccggcgatcggtctgcgtagccatcagccgcatcccgccacgctcgggcgtagaatcgacgatcttcgcggcccactcggccacctgttcgcggcggatggcctccatctcgtgcttcaaagcctcgttgctttccatgatcttcttgatcgactgaagaatctgcgggttattgagataatcggccacgttgcgcatcgtatcttcggccgcatagatcacctcctcggccttcgcccccgtcgtggcctcgatacgtcgtacaccggcggaaatggcgctttcgttcaggatcttgaagaacccgatattacccgtagcgctcacgtgagtaccgccgcacaactcgaccgaggtgccgaagcgcaccatacgcacccggtcgccgtatttctcgccgaagagcatcatcgccccggccgctgcagcctcttccttggtggcatcgcgtttctcctcgaggggatagttcgcgcgaatggcacgattgaccagttgctcgacccggcgcagctcctcgtgcgtcaccttctggaagtgcgaaaagtcgaagcgcaggtattcgggcgtcacgagcgaacctttctgctcgacgtgcgtaccgagcaccttgcgcagcgcttcatgcatcagatgggtcgccgtatggttgttggcagccgcctgacgtttctccggatccacgacggccatgaaggtcgcctcgggattttcgggcagttgggtaacgatatggataatcaggccgttctccttctcggtagccacgaccgggatccgttcgttggcggtttcgatatagccgatatcgccgatctgaccgccggaattgccgtagaacggagtacggtcgaacaccaactggtaggaaacgcgtcctttggaggacacacggcggtagcgggcgatcttcacctcggcgctcagcgtgtcgtaaccgatgaactcgctctgcttgatatggatcagctccttccagtcgtcggtatcgaccgcagcagcgttgcgcgaacgctccttctgcgcctgcagctccttctcgaaggcctccagatccacctcgatcccctgttcgcgggcgatcagctccgtcaggtcgatcgggaatccgtaggtatcgtacaacaggaaagcgtccttgccggaaatgcgttcgccgccgctcttgc

SEQ ID NO: 10402 - DNA, 48194 bp, Unknown
  gut microbiota DNA sequence
tatcagattgatataaactacacttcagctcaagcgtggagtcgttcgtttatccatcaagaggcattcggcgtggcccggaaacaaataaacaataccccagtatatcgagaaccgatatagctatacacggtgatgagtgttcgtattgccatccttgtttcctaaaaatcgccaaattttcttgataaggattagcgaaacactttcactaaacaatatgtcgccatccgcggggacggcaccgcaaagttagtgaatgttttccaatacacaacacactgtggagtattgccgccgcaaagatcgtggaaaagttctaaaataccaatggtacgacgcgtgctcttcctttattacggatgcatcccgtccgttttgctccgatcggatacctcttccctgaggggacattcgccgatcgaaaaaagccgggattcctttcggaaccccggctctccatccaaattaactaacccatatataactatttgacaggtttttcttccgccttgacccggatctttccgaatcctttgatcagctcctcgggcgaggtcttggcactgtcataggtcacggtcacctctttcgagggaacatcgacctgaatatccttgatccccttgccgattaccggcacgttgttcataatgcgggccgcacagctttcgcaatcgatatcgaccgtgaacaccgtagtaacgatctcgcccttcttctgcggcgtcttcgcttccacggcgaacaccccgcatcccaatactgccacgaggcagcacaaaatcatttttttcatcgtcgtataactaatttaattcgttctttcaatcaataaaaattgatacgcaatcccgcataaaacttgcgccccatcagaggtccccagatcaccgacgagttgaaacccgccgagaaaggatcgtccgcattcagaatcgggtgcttctgcttataatcgagaatgttctcgcagcccacgtaaatatcgaacttgccgactttgcgggtcacctgcgcgaagaacatcggatacgtcggcgacatctcggaatcggccaggtcgcccgtctgggtcggcaggcgcgaaggaccgttgagctgagccgtcacatcgaacacccagcggttgtagcgggtcgaatactgcaagttgagcagcgccttgtaacggcttaccagcggacgctccacgagcgccgtactgccgtccggacgatcgatcgtcatacggctgttcgtatagcggtacgtagcgaaaatatcgaaccgctccaccggagtccacgaaaaatcgacctgataagtatcggtaaaggagcgtttgtccgagctgtaaatataaatgtcgttcggcgaatactcctgatcggcaatcaccgaattataaaattgcgtgcggaagtagtcgaaactcaacgtcgcgtcctcctctttcacgagcgtgaaaatctgcgtcaggctaccgcctgcggtgagggctttctccatccggttgagcgctttgaaattgcccgcaccgccgtctgcgaccatccaggtcgtatatcccccgtaagcagagccgggattgagaggtccgcgcacagcggcggctcccgccgaaagagccgtcggtctttcgaacgtaatatgccgtcccgtagccaaaacgccgatattatcggtgatgacgttggtcgaacgataacccagcccggccgaaccgcgcaggatcgtcgtcggggtgatgttccacttgatatgaccgcgcggagtaacgtagaacttatcgtaataaccgttgtagtccccgcgtatgcccgcaactacggagagcttgtccttgatcgtgtaggtatattcggcataggcgcctacctcgttctcctgacggtcgagattccaggctccggcggcatccagccacggcgtcgggttgagcagcgactcgtcaaggaattgcagatgcgactgcacgccgacgatcagcgaatgacggaaggagaaatagtggttgtacatcatgttcagcgaaaccatgttgtccgtaccgtcgtaatcgttgagcccgaagtaggcccgttcgcggaagcggtcgtaatcggccacgaaagcgatgttcgaacgaagctcgtcctgctggtcctcgtcatagacaccgggaccgaccggcataccgaatttgaagtaggcgttcagctcgcggttcttgatctgcgagccgtacatggcccccttgtcccagtcggtatccatctcttcacgcatcgaagccttgtagtgcttctgaccgctcaagcgattttccgccagatacttgaagccccaccgcacctgcgctccgttgtcagccgtataaagccagcggtttgcaaccgctcccaggcgggttttcggcagatccataaatccgtcgccgttgtcgtccatgtcgcccagcaaatgagtatccaacgatccgtgcaacaggaggatcgtcgataatttcttatccttggttacaggaagcgccgtcgaaaggttcagctcgggacgcagttcgtcgtcaaggtagaagttgatgaacagccgctcgtcgtcggtcggtttgcggtgctcgaggttgatctgtccggtgatggcctcatgtccggcagtcacggacgaaatacccttcgacacctggatcgaattgagccacatgcccggcgtatagctcaggccgtagggagcactcaaaccgcgcatgatcggacggttttcgtccaatatttgcgtgtaagtgccggccaaaccgagcatcttgatctgacgcgcacccgaaatggcgtcgctgtaaccgactgtcaccgaagcggagttctcgaaactctcggccaggttgcaacaagccatcttgcagaggcccgcgaaggagatcatctcccctttgagaatgccgtcccgcttcacgtagttaccgcccagcgtactgttcaccacgacctcctcgagttccaccccgtcgttcgacagacgaaaatcgacccgctccacgccgctctcgacgcgaatcgtatcgctggtatatccgacgaagccggcgaccagcatatcgtatcccttaacccggtgtatggtataatttccttcggcatcggcaccggttcccaccgtcgttccggcccaatacaccgatgcaccgaccagcggctcgtccgtgtcggctccatacacgacacctttgacattctgggcccgagccgcgccgaatgccgatgcaacaaaaaagactaatactgctaaatacttgaatttcatttgattttccgttgattgtgtaaacatgatgcaaaaataatattccattcttgcaatccggttgcaaatcgggcaaccggtctgtcgcagggaaaacacagtgcacgccgacactgcactttttcatgcgtcgttacacgaaaacgggaggggcacgcagtccggaagagagaagatggaccgtgctatgggccagacagggacgttcagaaaccgtcgcccaatgaacggaatcgaacggaagcgccgtcatctccgctgccaatatggccggaagatcgacgatcatgaccttcgtatctcgctcccattgggacgacgatacggaagtatatagctccgatgccttggagtgatccaccccgcagcaaacggccttaaaactgaccgaatgagaatcgcattcggtatggatgtcgcaaccccggcagcatatatgcacctcgcccctctcccgctccaaacagtggcacgaaagtacggcgtatgccgctgcccccaccgagaaacagtaggcaaccagcaacatccacacggacatatatctgcgcagctttacgctcattcttcgactaaattacatgttttaagccgggcgacccacgcctgggcgtcgcgcgcggcggtttccgcatccacgtcgtactcgccgaggagcaaatcgcggacatcgtcgataccgaactcacgtccctgcaaccggttccacaaccagagcgaggtttcgttcaatgcaatcactttggtcatatccactccgtaacggccctgcattaccacgatgtgctcgcctgccatttcacggaccttatattcctctttgattctcatcggtcggttttcttcttcaacgtgcaaatataggaaaatatttcgagaaacctaatatgacgcactttttatcccttccgggctcgggtaaaagccaaaaacactacctttgtgtatatggaatcgacggcaccgaacagacggcaacagatcgcagcgctgctcaagcgctactgggggttcgacacgttccgccccgtgcaggaacaggtcatcctctcggtgctcgccggacgcgatacgctggccctgatgccgacgggcggcggcaagtcgctcacctatcagattccgggactggcttcggagggcgtatgcatcgtggtcaccccgctgatcgccctgatgaaagaccaggtcgatcggctccgcaagctgggtatccgcgctctggcgatccattcgggcctatcggcccgacagatcgacatcgacctggacaactgcgtctatggcgacgtgaaattcctctacgtcgctcccgaacggctcgcatccgaggccttccgcctgcgggtgcagcgaatgaacgtatcgcttctcgccgtcgatgaggcccactgcatctcccaatggggctacgacttccgcccctcctacctgcggatcgccgagctgcgcgagcggattcccggcgtccccgtgctggctctcacggcctcggccacaccgcgcgtcgcggacgacatcatggaaaagctgcacttcgcggaaccccatctgctgcgcagcgatttttcgcgtcccaacctctcttatgccgtgcgccataccgacgacaaaaacgaacagctcctgcggatcatccgcaacgtcggcggttccggcatcgtctatgtccgcacccgcgaaggagccgaacaggtcgcggctttcctgcgcgacgaaggtatttccgcagaatattatcacggcggactgggacatgccgagcgctcgatgcggcaggatgcctggatttcggggcgcacccccgtcatggtagctaccaacgccttcgggatggggatcgacaagccggacgtccgctacgtggtacattatacgatgtgcgactcactcgaaagctactatcaggaggccggacgtgccggacgcgacgggcgacgcagctatgccgtattgctgatttcttccgacgatgcgggacgcatcgccaaacgcttcgaagcagactacccgccgctcgaaaagatccgttcgatctacgaaaaaatctgcagctacctccagatcgccatcggcgacggagcgcaaagttcctttctattcaacctgcgcgatttctgcacccgggaacacctctatacgggtctggtacagaacgccctgaagatcctgagtcagaacggctacatgaccctcctggacgaagcggccaaccccgcgcgcatcctcttctgcgtcagccgcgacgatctctaccgcctgcgggtgatccgcgacgatctggaccacatcatccgtgttctgctgcgtctgtacgaaggggttttcaccgacttccgccccatcgacgaaacggaaatagcgacctggagcggctatacgcccgaaaaggtgcacgacctgctgaaacggctctggcaactgcgcgtgatccgctacatcccctcgaaccgctcgccgctcctctacatggacgaagaacggctccccaccgccgatctctacatctcccccgaatcgtaccagcagcgccggaaacagacccgcgaacgattcgagcggatgctcgcctacgccacggcggaaaccggctgccgcagctccttcctggaagcctatttcggagtgccggagccccgggagtgcggcatctgcgacctctgcctcgcccgcaaacgcgccgcccgcgctccgcaggcggaagcctcgaaaaagaccgttctggagctgctccgcaacgacgctctcgatccccgggaaatcgtcgctgcactccgatccgatccggcacaaatcgccgagctcctgcgcaaattgagcggcgaaggcaaaatttccatactcccggatggaaaagtcacgattaatcggtaactttgcgcgatttcatgaacaaaccgatcacatttcaaaatagcatcagcaacgaggaggccgctctgcttccggccatcgaattccggggcccgatcgtcgtcgtggactcggaaccgaggctcagggaggcctgccgctacctggcggcacagcccgtcatcgggttcgacaccgaaacccggccttcgttccgggcgggcgtcgtcaatcgggtcgcactgctgcaactctcctcgccggaacagagcttcctgttccggctctgcaagattcctctcgacaaagccatcgtcaaaatcctcgaaaacaaggagatcctgaaaatcggcgccgatgtaaagggcgacctgcgggcactgcacaacatccggcactttcaggaagcgggcttcgtggatcttcaggagctcgccggagagtggggcatcgaagagaaaagcctgcgcaaactttcggcgatcgtactcggccagcgggtatccaaagcccagcgcctgagcaactgggaagccgcacaactcaccgacaagcagcagttctacgccgcaacggacgcctgggtctgcacgcgtatctacgaccggctgctgcacacacccaaaccaaagaaaacgaagaaatgatcccgcaaatacacctccgacgcggcaaggaagagtcgttgctgcgccgccatccctggattttctcgggcgcgatcgaatccgtccgttacgacggaaacgaaatccccgaaggtgccctcgtcgatgtctatacccgttcgggcgacttcatcgcccggggacattaccagatcggttcgatcgccgtgcgggtgctcaccttcgaacaggaaccgatcgacacggcctggtggcagcggatgatctccaccgcactcgacgtgcgccgcacgctcgggctcacggatgcccccgacaccacctgctaccgtctggttcacggcgagggggactccctgccgggactcgtcgtcgatatttacgacacgaccgccgtgattcaatgtcactcggtgggcatgtaccacgcccgcctgacaatcgccgatgcgatccgaacggtttacggcgaccggattaccgccatctacgacaaaagttcccaaaccgtaccgttcaaggccggcctgaatcccgtggacgggtacctttacggcaaaacgggaggaatgccccgcaccgtgctcgaaaacggcgaaaaattcctggtcaattgggaagaggggcagaaaacgggcttctttatcgaccagcgcttcaaccgcgaactggtacgccgctacgcccgaggacgcacggtcctcaataccttctgctacacgggcggattttcggtatatgctcttgcgggcggggcacgcgaagtatgctcgatcgactcctcggagcgggccgtcgccctggccgacgccaacgttcggctcaacttcggagaagaggctccccacacttcgctggccgtcgatgccgtcgaatacctcaaggacatcggcgaccggtacgacatgatcatcctcgacccgccggccttcgccaagcaccacaaagtgctgggcaatgccatgcagggctacaagcggctcaatgcccgggcgctggcgcagatcaaaagcggagggctcctcttcactttctcctgttcgcaggcggtcagcaaggagttgttccgcaccacggtcttctcggccgcagccatcgccggacgcaaggtccgcatcctgcaccaactgacccagcccgccgaccatccgatcaacatctatcatcccgaaggcgaatacctcaagggattggtactttacgtcgaataaatccgctctcgaaccgaatccaaatagtcgatatggaacgcgaaacgatcgtccgggaatttctcgacagacacaaaatccggtacgacatctatcaccacccggcttccccgaccatcgaagaggccaaggcacattggcgcgaggacgggtcgaaacattgcaaaaacctcttcttccgcaaccacaagggcgaccgtcattatttggtctgtttcgactgcgaccgctcgctggcgattcacgatctggaacaccgactgcggcagggcaaactcaccttcgcctcgccgcagcgcatggaacgctacctggggctcgaaccgggttccgtgtcgccgttcggccttatcaacgacgcggaacaccacgtacatctctttttagaccgtcatctgcaaacgtgcgacagtttgagtttccaccccaacgattgccgagccacggtggtcatttcccgccccgaattcgaacgctacctctccctggtcggaaatacgtacgaatacctcgacctctacgactgacacgtctgaaatccgcagcgcagtgcgaatgaaggggctctctaacagtccgaatttaagttatcacccctgtcaggatgaactctgacaggggtgattttcaatttcgaaaacttgttagggaactcttcgcacctttcgattatttccgtcgggaagcgttcctttgcgcctcctcctgctgacgcagcaactcttcgtaacgcaactggaacttggatttcttcctgttcttgtttttcgcggcattggcctgcatcacggcatgaattttctcgtcgtcgatcatccggcggatcacgagcgtctgtccgatcgtgagaatgttggccaggaagtagtagtaagtcagaccgctcgaatagctgttgaaccacaggagcatcatcaccggcatcagataaaccatcataaacttcataccggccatctggggctgcgacgaagccgtctgctggtaattgatatacgagaaggcgaacagcgcgacggtcatcaacagggcgaacaggctcacgtgatctccgtagaaggggatgttgaacggcagcgacaacacgctgtcgtacgacgaaaggtcgtcggcccaaaggaaatgctggcctcgcagctcgatcgaggcggggaagaagcggaacatcgcaataatgatcggcatctggatcaacagcgggatacaaccgcccatcgggttgataccggccttcttgtagagctccatcgtcgcctgctggcgcttcatggcatcctcctggcgcggatatttcttggccagctcatcgacctcgggcttgatgacgcgcatcttggccgtcgatatgtaacttttataggtcagcggcgagatgatgaccttcaccagcacggccaggatcaggataatcaggccgaaactcgggataaattgacgcaggaaatcgaacaccggaatcacgaaccagcggttcacccagccgaaaataccccagccgagcggaatcaaccgttccagatgcagttcgtcgtccccctcggtcgtcgccacatgcttgagaatggcgtatttgttcggaccgaaatagaaagcgaagttgtaatggtcggtttgcgccgtatagggaaccgtcaatttcgccgaaaaatcctttatgtaacccgagcctttttccgccgtcgtaaacttcatatcagcgtaggagaagttttccggggcgatcatcaccgacgagaagaactgctgcttgaaagccacccagttgagcgacgacgaaaccgtcttctgcttctccccgtcgctcatccccagatcgtcggccgacgactcgccgggagcccggtaatagatggtcgtataggtattctcgttctgaaaccctttctcgttctgataggaacggttgctccagtcgatgccgacagtcgtctggctggccatctgcggtgccatatttttcagatagacattcagatcgaccagataatcccgcgccggcgactgtatgttataaacgacatactcgtaccgtaacacggcgtcacgcgccaccggcagatccatcgtgatgcgctgcgcaccgtcggcatccttctccatcgacaccagattgaaggtgtaatccgccgtattgaccaatacgttgttatggccattcttcacatagaacgtcagggcgaaattggccgttgccgggtcgaaaagccgcaccggctgattccgctcgtcacgaggtgcatacttggtataatccttcagcgtaacatccttgacctgaccgccgcgcgtcgagaaatcgatcttcaatacctcattctccacggtgaactcctcggcttcggcctgctgcgccgcagccagcagctctccgaactgcatgatccgacgctgcgcctgcaggctgtccccggacaaccgctctcccgcagccgcaatagctgcggaatccgcagtcggcagcggagcattgagcgccaggagcgaatcctgctcggcttggatacgcgcctgttcggcgttgtacgccatgagctgttcctgatactttttctgttgatgcgaattatagaacgtgaaacccaggaagatcagggccacgatgacaattccggcgattgattttttatccatgcgtaatctaaattctttgaggataccccgaagcagggttgcaaactattttttcttatcgtcttttcccgccagcgccgcagctacgaacgcgacgaaaagcggatgaggccgctgtacggtgctcttgtattcgggatggtattgcgtaccgacaaaccaaggatggtcgggaatttcgaccacttcgaccagccccgtatcggggttcgcaccgacggctttcattccgtggctctcgaaatccttcaggtattcgctgttgaattcgtagcggtggcgatggcgctcctgaatctgggtcgtaccgtaagcctgcgcagctttcgatcccggctccaacgaacaggggtaagctcccagacgcatcgtgccgcctttggcggtaatgcccttctgttcctccatcaggtcgatgaccggatgcttcgtcgccggatccatttctgtcgaggtggcgtccttgaagcccagcacgttgcgagcgaattcgatcacggcacactgcatacccagacagattcccaggaacggaatacggtgagtccgcgcaaagtgcaccgcttcgatcttcccctcgattccccggttgccgaaccccggagccacgagaataccggccattttgccgagcttctccccaacgttcgaagcgtctatcttctccgaattcacgtaatgcaacttcaccttgcagtcgttcaccgcaccggcttgaataaaggactcgcagatcgacttgtaagcatcgggaagttccgtatatttacccaccagggcgatgtcgatcgtccgcttgggattcttcaccttatcgacgaaagcctgcaacgaactcaagtcgggttcctgctccgacggaaggtcgagcttgctgagcaccacctcgtccagatgctgacggtgcattaccagcggcacttcgtagatcgtcggtacgtcgattgactccatcaccgcgttggcatccacgttgcagaagagcgccaccttgcgcctgagctccgcagagagcggatgctcggtgcgcagcaccagaatatcgggctgcaaaccgttctcgagcaaggttttgaccgaatgttgagtcggcttggtcttcaactcgccggaagcggccaggtaaggaatgagcgtcagatgaaccagcgccgtattgcgggctccgagctggtaacgcaactgacgcaccgattcgatgaagggcaacgactcgatgtcgcccaccgttccgccgatctcggtgataatcacatcgtactccttgcgctgcgccaacagttgaatgcggcgcttgatttcgtccgtgatatgaggaatgacctgcacggtcttgcccaggtactcgcccttgcgctccttgtcgatcacgcactgataaatcttaccagtggtcacgttgttggcatggctggtcgtaatcgaagtgaaacgctcgtaatggcccaggtcgaggtcggtttccgcaccgtcttcggtcacgtaacactctccgtgctcgtaaggattcagggttccggggtcgatattgatatagggatccagtttctgaatcgtcaccgaatagccgcgtgcctgcagcaagcgggcgatcgacgccgaaataatgcctttaccgagcgacgaagccacgccgcccgtcacgaaaatgtacttgggtttgctgagtttcattatctgtttcgaattattttgtttgcaccgtcgtttatccggctccgtttcaacccttaagccggaacgcccggttctccacttgcctattaaaacatcgttccggaaccgctttcgaagaccgctccggaaaccttcccgctccgagggccggactcacataaaatacaccgctatccccacaaagaagtttcctcaccggaaagggatgtgtcaaattgagaaattcggcgcatcccctttcacatgtataagaacaggtaaaaataccaagcatcgaggttcacggcgaagaacgtgtacccgacgtacatgatcgagccgtaataccgataataacgaagtaatttgcctgttatgacacaccgtcttcggcgggttattccttattctcctcctgatcgatgagtttcactttttcgatagcggcctgcatttcctgtttggcccgctcgatcttggcccgcacctcggcgatcatcgcctcggcgttcttcgacttggagaagaatccgatgttgttctccaacaaggcgatatcctgctccaactggcggactttgttgtagagccggtcgcgctccgtgcgcagacgccggtcgcccgaggccttgagcgaggagaccttctccttgaaacggtccatcgaacggtcgcgctccgaaccgcgcagggtatcgaacatcttatcgaccacctccttgtaacgtttttgaatcgcctccttctgcttgatgggcacgaacccgatttcgccccagcgacgctggaaatcacgaatcatctcgaagccgcccgccagaatatcggccgcagccatctcctccaacagagcctctttgcgacggaggttctccccgtactgatcgtccactgcagcgaaatgtcgggacttgcgctcgaagaaagcgtcgcacgccgcacggaaccgtttccatatctggtcggaatagcggcgcgacacggcccccgtctgcttccacttggcctgcaaagcgatcagctcgtcggtcgtcttcttccactcctcgctgtcgcgcagcgcttcggccgcctcgcacaactcggtcttgagctggaggttgtgctccatctcgcccttcaacccggcataataggcacgcttggcctcgaagaacttgtcgcaggcattgcgaaaccgctcgtagatggcattgttatctttcttgggagcgaatccgatcgttttccagactttctgtatctcgaagagcttctcgctcgccttgttccactctttgcgcgaagtcagcggctgctgcgccagctcttcggctttgacgcaaagctcgctcttgagctccagattgcggagctgctcctgcttgatattctcgaaaaactcctgatgctgcttgttgatacggctcgaagcctccttgaaacgattccacagcacctctttatattcattggccacagggccgatttcacgccattcgtcgtgcaacttctgcagtttgtggaacgcttcgacgatcgacggttcgagcaccagcgcttcggcctgttcgcacaaggccagcttctgctcgtaattcttcttcagatcgagatcgcgcaactccttgttgatcttgatgaaattgtagaaattctccacgtgcaggttgtaggtctcccacagatccttcacattctgctggggcaccaccccggtctctttccaacgatgctgcaactcccggaacttgttgaaagtctggttgagcatttcgtccgacgaagccagctccttgagttcctcgatgatctgcaactttatcttgaggttctcctccttggccgcttcgagtccggcgacgaactcgtcccgcagacggcggtactcccggaaaagatccttgaaacgcaactccgccggatccggctcggaaacgaattcaccctccgcaccgccggcttcgacaaaagcccttcgtgcggcatcggactccgcccgacgcaatttgtaaaacgctatcttgagggcctccacatcccggcgcagggactgcaccgggcgctcttcgagcatcctggcgaaaatcgccagcaactcctccttcgacttgcccgccaggtcgctgccggccgcgtccccgcctgcggcctcctcctcgggcgaagcctcgcccaggtcgagccctgcgttttcggcagccagtgctgcatcttcgtcggcgaagtccacccgactctgtgtcggcacgtcggtatcgtccgcaactgcggcattcgtttccccgccatctgcgggcacggaattgttctgcgtatcctcaactacggaagagtcgagatgttccccggaaacaggaagagtagaattttcagtagccatcttgtctgattttaatcttacggtttgcaaaaccatataaaccttgcaaatataaccatttttccggcccccgcacaggatttgccgataaatttattatcttcgcaaaaattacgcacgctcttatgagtcatcgcatcctgctcatcgacgacgaagacgacatcctcgaattcatccgttacaacctgaccaaggcgggctacgaagtatatacggcccgcaacggagccgaaggtttgcaacaggctgcggcacatcggccgcacctgatcctgctcgacgtgatgatgcccacgatggacggcatcgaaacctgccgggccctgcgctgcgacccggcgctgaaggagacgatggtcgtctttctctcggccctcggcgaagaggagcaacagctcgcagggttcggagccggagccgacgactatatttccaagccgatcaagcccaaacttctgataagccgcatccaggcgatcctcaaacgggtagccgccgacaaaccggcttcgctggtcatcgaccgggaacgacatctggtaatccgcaacggagaacgtatcgaactgccccgcaaggagttcgccctgctcgccctgctcgcctcctctcccggaaaactcttctcccgggaagagatctactcccgcatctggggcgacagcgtggtcgtcggcgaccgcacgatcgacgtccacgtccgcaaaatccgacaaaaaatcggagacggacacatctcgaccgtaaagggtatggggtacaaatacgaaaattaaccacagatagtccaaaatttatcacaaaaattccggaaaaccttacgatccgtaattaaattttgcgtaaatttgcaaagtcttaagtaaaaacgcattttcgacgaaatgatccgcgagatcgtggcagtaggaatcggaggggccctgggcagtatgtcgaggtacttggtatcctacgtatggctggccgaacagtccctgttgggcttcccggccggcactttcacggtcaatgccgccggatcgttgctgatgggctttttgctggagatgctgggcgcaggaactgcgtcgtggctgttgagcgtaggattctgcggaggattcactaccttttccactttttcttccgacgtggtgcggatgcttaaaagcggcgactacacggcggccggactttgcatcgcgctcaattttgcggcatgcgtgtgctgcatcctgttgggcgccgcattgggacggttgctgaaacgctgacaacgaacaaggaaacaacaaaataatttttacaaaacaactgaaatggtcattttagtactcaactgcggcagttcttcgatcaaataccaggtgatcgacatggaagcccagtccagcaaactgctcgccaaaggtctggtcgagcgcatcggccttcctgaaggcgatctcacgcacaaacccgtcggcaaggagaagttcgaactccaccagccgattcccgaccacacgacgggcatcagcctggtgcttcaggccctgaccgaccccgtgcacggcgtaatccggtcgctcgacgaagtgaaggccgtcggtcaccgcgtagcgcacggcggcgaatttttcccggagagctgtctggtaaccaaacaggtccaggagaagatccgctcactgttccagatcgctccactgcacaatccggccaacttggaaggtattctttccatcgaaaaagtccttcccggcgtgaaacaggtagccgtattcgacacctcgttccaccagacgcttcccgcaaccaacttcatgtacgccctgccctacgagtactaccagaaatacggcatccgcaagtacggcttccacggcacgagccacaagttcgtcgcccgcgaaggcgccaaactcgccggtctggatatcaataactccaagattattacctgtcatatcggcaacggcggttcgatcacggccgtgctgaacggcaagtcctacgatacctcgatgggcttctcgccggtcgatggtctggtcatgggcacccgctgcggcaacgtcgatccgagcgcggtcaccttcatcggcgaaaaggagcaaatgagctatgccgaagtgaacaacatgctcaacaagcaatcgggcgtcttcggcgtatcgggcgtatcgagcgacatgcgcgacatcgacaaagcctatgaagagggtaatccgcgtgcgatcctcgcccgcgacatgtactgcctgcgcatcaagaaattcgtcggcgaatacgcggccgaaatgggcggcgtcgatctgatcgttttcacgggcggcgtcggcgagaactcgcccgaaacccgtaaggaggtctgcgaaggcctcgaattcatgggcgtgcatttcgaccggaagatcaacgagggtcttcgcggcgaaaacaagatcatctccgcagcggattcgaaggtcaaggtggccgtcgttccgaccaacgaggagctggtcatcgccaccgacacttacgaaatcgtcaataaataataccaaataattatattaaaacacacaacccatgcaacatttgagtgaaattgtcgaagaggcaagaaaaaaaggtaagaagcgccttgcagtcgcttacggtcaggacgcccacacgctggcagccgtctatgcagcttataaggaaggtctggtagagccgattctgttcggcgatcccaagatcatcgagcaggtttgcaaagaagaaaatatcgattgcaacattttcaagataatccccgagagcaacgacgtgaagtgcgtcaatctggctgtcaatgccgtcgttacgggcgaggccgacgtactgatgaaggggctggtttccacggacaagtacatgcgcggcatcctgaataaggacgcaggtctgttccccccgaaaggcacgttgagccacgtagcggtagtcgaaatgccgaactatcccaagttactggtcatctcggacgtagcggtgattccgcagcccgacttcaaacagaaaaccatcctgatcggctacctgacgcgcatcgccaacctgatcggcatcaagacgccgaagatcgcctgcatcgcaccttcggagcagttgttgccgagcgtgctctcctcgaccgaagccgctctgctcgccaagatgggcgatcgcggacagctgggcaacgtcgtcatcgacggtccgctgtcgctcgacgtagcgctttacaaggaagccgccgagatcaagaaggtcaagggttcctccgtcgcaggcgatgcggactgtctgctcttccccaacatcgaatcgggcaacgtcttcttcaaggcttccacgcacatgggcggcggcgagatcgcagcgatggtcatgggaaccaaagttccctgcgtgctgacttcgcgcggcgactccagcctcaccaaactctactcgatcgcactggcttgtctggccgctaaataattcaggtatcggatttatgggattcaagattttagcaatcaacccgggctcgacttcgacgaagatcgccctgtatgacgacgagcagcctacgctggcgctcaccctgcgccattcggccgaggagatcgctcgtttcccgcgcatcatcgaccagctcgactggcgcaaggagatggtactcgaagcactcgcaaagaacaacttcgacgtaaagtctctctctgccgtgatcggtcgcggcggtctgatcaagccgatcgaatcgggcgtatatgaagtaaacgcagccctgaagaacgacttggtgaacgcccagcgcgaacacgcttccaacctcggcgggttgatcgccgagcagatcgcccaggccgccggcgtgaaggcttacatcgccgacccggtcgtggtcgatgagttggacgacatcgcccgcctgagcggtattccggaatgcccccgcatttcgatcttccacgccctgaaccagaaagccatcgcacgccgccatgccgaaaaggtaggcaagcgttacgaagacctgaacctggtcgttgcccacatgggcggcggcatttcggtctcggcccactgcaagggacgggtgatcgacaccaacaacgccctcgacggcgacggcccgatcgcacccgaacgtgcaggcacggtgcctgccggagcgctcgtgaacctctgcttttcgggcaagtacagccagcgcgacgtgctgaagatgctcgccggcaaaggcggtctggtggctcacctgaaccagaactccgtgcagcagatctgcatcgacatcgaaaagggcgaccagaaatccaaagccgtgctcgacgcgatgagttacagcatcgccaaggagatcggcgcgatggctgcggttctcaaaggtcaggtggatgccatcctgctcacgggcggcgtggcgtacaacgaaccggtgaacgacgtaatccgcgaacactgttcgttcctcgccccgatcttcatctatccgggcgaagacgaaatgggagcgctgatgctcaatgccttgagcgtactgcgcggcgaaagaaccccgaaggtttacgcataagagatcggatctgcgttctccgtttccggtacccggcgacacccgaacaaattcggcatggtttcgcatcgatcgaaaacggttaaaccggatataaaaaagctcttcctttaccggaagagcttttttactaattcccatgcgatccgcatcgcttcgagccggaacaacgctccgaacccggcgtaacagaccacgccgaccgccactttcaataggaacgtaggcagaggtgcgaagctggtgaagtgtccgaaggcccaaaccacaccgaacatcgccgccgtcgcagaagctataggcagcaacgtccgcaaaaaacgacctgccgtcagccccgcataccgggtcgtcgcgccaaaattgaggatcatttcgaaaaaagccatcgccgacaggccccacgtcacggcgagcacgctgtgcgggatcgtcaggatcagaaccaaggtcatcactatctttttgaccacttccagccgcacgatgatccgaccgttgctcttcactttcagcacgttattcgaaaccgtagcgatcggagcgaacattccggccagcgaaatgacctgaaaatagggaaccatcggcatccacttctccccgagcagactgtccaccatttcaggagcgacgacaatcagaccggccatcatcggcagcatcacgaaagcgacgatcattactacctgccggtagctctcggcgaatttacgctcgtcgtccgcgatcttggaaagcgcgggaaaagtcacgctctgcacggcctgcatggtcgatgtcacgggcagctccttgagtttctgcgcctggttgaaaaagcccagcacatccgcagcatagagcttcccgacgaaaagctgggaaacattgttgtaaacggaagaaatcagatcggtcgccagcaaccggaagctatacggagccatcgcacgcagacaccccgcgtcgaaagccgcccgagggcgccagtcgctcaacccccacagcaacatggcccgtacacccatcgccactacccgttgccccaccaggctccagataccgcatccggcccaagccataccgatagccaccagtccgcttacgagcgacgaagtaaaaacgaccttcgaaagccgggcgaaacggaactgccgggtgaaaatcgtattctgaatcacgcacagggcattgagaggcacaagcaggaacaacaccggagcgatccgcaccaactcgggcatcccgtaaaaacgggcgatccagggcatcgcccccaccaacagcaggtacagcagcaccgaaaccgcgatattgaagacgaataccgacttgtagtcctcctccgacggcaccgcctttcggatcagggtctgcgagaaaccgctgtccaccatcaccagtgccagggacgaaaaaaccacgggaatagccataatacccatctgctcgggcgtcagcaaccggaggatgacgatactcacccccatttgcagcaacatggagcctaccttttcggcaatgctccacgctacaccgcttgcgaccttgtcccgcaattcacctcccacgacccttcggatttagcagccgtcgcacacggcatcccgctcgcggaaccgttcggcgctcgaaatctcgaggtacgaagcgccgtatttcgaatcgaagctgccgcccaccacagccagcagatcggtcggttcgatcgcatgcttgcgctggataaaatccagggcgtcgatcacgaagtggtaacgatcctgatagcgttcgtgcgactgctgttcacgcaggatcggcacgacgccgtacgaaagagccagaatacgctgcgcatgacgggtataacaaaccgccaagacctgacaccggccccggaaagcagccagataacggcccgtacgtccggtcgcggtatcgagcaccacatagcgaatcggcaagttcgtactggcccgcaccgccgaacgcgccaactgcgccgtgatctcgtggttcacggaaaccatgttcatatcgatcatcggcgtaaaatgcgtttcgtccttctcgatctcgcgggccacgcgcgacatcgtactcacggcttccaccggatagtcgcccatagccgtttcgtcgctcaacatcacggcatccacgcgctcgtaaatggcactggccacgtcgctcacctcggcccgggtcggacggggcgagcggaccatcgaatagagcatctgcgtagcgatgatcaccggtcgtttggcggctatgcaacgctccacgatacgtcgctgcgcgttgggaatcgcctcggccggaagttcgacccccagatcgccccgggcgaccatcaccccgtacgaagcctcgacgatttcgtccaggttgtcgatcccctgctggttctcgatcttggagatgatcttgatcggactgtcgtaacggtcgagaatctcctgcacggcatgcacgtccccggcgctccgcacgaaggagtgagcgatgaaatcgacgtcgttcttcacggcccattcgatgaagcggcggtctttttccgtcaccgacggcaggtcgatcttcatccccggcacattgacgctcttgcgcgaccgcagcgtgccgccccgcacgaactcgcacatcagctcctcgtcggtcttgtccgtcacgcggagttccaactccccgtcggcaatcaacaaccgcgcaccgaccgcgatatcgcgtaccaccgtcgccacgttgaagtagatcgtatcgcgggtcgaaggttcgccatcggccgtcccgcgcaccttcacgcgctccccggtctgaaagccgatcgcaccgccgtactcgtcggccacggccgtcacacggatttcaggtcctttggtatccagaatgaccggaatcgccggattgacccggcgcaccgcctcgacgatcttcgcggccccctcttcggtcacatgcgccgaattgatgcgtactacgtccattccggcctcgaaaaggccgcgtacaaattcttcgttggcgcggaaatccgacaacgtggctacgatcttggttttcttctctccccacatacagcttcttgttaaattatatcgtttcaaatcaaaattacacctggaatccggaatccgcctctatccgaagcttttccgccattcgatcgcgcaccaatcctttacgcacgagcacccgacagacagaactcgcatcgttccgaatatcttccgtcgtaatccgaaaacggacacttcgacgagccgaaaatcccgaaaacatccacagcacaggcagcgctccgactatccccagccagacaaacggcacgaagggcacgccttcgtcattcctgcttacaaaaatagtgaaaaacccggatatacgccgcaagatcctccgattcgcatcgaattcacacacatttcacacccgtccgaaagtcgggacgacccgggcgccgaaaataaattttcgtatcctcccggctttggctatctttgcagaagacaggatgcggttcggcaattttcaagaacaagttctcataattgctctcggctttcgctatctttgtagaagataagacgcgcctcggcaaaatacaaataaaatttgcttttgcgctcggcttattcgtatctttgctacattccggacttcggccgcgtccgttcaatttacccgaacgccgccgctccgcacaaaccgccattcgacatgactgaattcggacttatcgacacgatccgcgacatgttcgccgcaattccccgcaacggattcgacggcatcggggacgactgcacggtcttcccgctgggcagcggcgaatcgctggtcttcaccgccgacctgctggccgaaaacatccacttcctgcgccgggcgacctcggcgcgtgaattgggccgtaaatccctggccgtcaatctgagcgatgtcgcggcgatgggcgcccgcccgatcgcaaccctgctctcgctggctatcccgcacgacctgcccgaaggatggatcgaagatttcatggaaggctaccgcgacctctcggcccaatacgacgtcggcctggtcgggggcgacaccacagcctcggattcgggactggtcgtcaatgtaacggccatcgggcgtatcgccgacagccatatcaaacggcgcagcgacgcacgccccggcgacttgatcgccgtcggcggttcgctgggagagtcgggcgccggactgcgcgatatcctggccggacggtacgacaccccgctggcacagatccaccgcaaccccgccccgcaagtcgccgaaggcatctggctcggcgaacgtccggaagtgcacgccatgatggacatctcggacggcatcgcctccgacctgcggcatatcctgcaccagtccggcgtaggtgccgaagtcgataccgagtgcatcccgactcccgtcgatctcgaaaccgccgtatccggcggcgaagactacaaacttctcttcaccgtcgctccggagagcgccaacacacttctgtccaactaccggctccgtttcggcgatgagttccacttcatcggccgcatcacgggcggcaatcatctcgaatggctccgaaacggcacccctctgccggtcgattggcagggattccgccactattgaccggcgttccgaaaaggttgcaacaacccggcacataccgtcctccgaaatatccgaaggtcatcctccataccgctcctcataccttctgcttctccgcagaaaggagccgttgcaaatccggtccgcatcgcccgccgcaatattcccgctgcaagcgctcgaaatcccggcgattcaccgcaagctctctccaaaacgaagccgacttctgccgtacgacatcggcacggtccgccgcaaaaaataaaggggctgtgtcgaaatgaaaatttcagacacaacctctaagggatgtcagaatggatgcaaggcattgagggtaagggcgacaggaatttactgccgtaaagatttagcccgcatcccgataatgacgcagcagtgcgctttataacacatcgccgtatctccaaaaactctatccacacgcatcgaaagccgcttcattccacgatatagactttctccccccgccgctgcatgcgatagcgctcgcgggcgaattgctccagattatcgtcgtacttgagctcttcgagcagcgtactgtcctgctcgatccgagcgcgatagatcgccctttcctgctccaggatagcgatatcttttctgatctctatggcgtgcagcagatttcgtcccacgatgaaaatcgtgaaaaccacgatgatacaagtaatcaccacccaaaaccgcttgtccaatttcaactgcatcttccgaatcctttaaggaatatgcatgtatttatgcgtctggatcgaaatattccacgcaggatgcgccttgacgtactcgaccagcaggggcatgatctcctccgacacgctccattcgggctgcaggaagagcttgcactcccgtccgacctgttcggcgttccgctcggcccattgcaaatcggcctcccgctcgacgatgaccttcagctcgtgcgcccgccagaacgcctccggcagaggcggctgctgacgcttgggcgaaaggcaaacccagtcgaaatacccgctgaaagggtgcgaccccgaagtttcgagaaatatcttgagtccgtgccccttgagcgccgaagtcaaaggccccaacgggtaaagcaacggctctccgcccgtgatgacgatagcctgcgcctggcacgaagtcgctcgccgcaccacctccgaaatatcggtcggaggatagagtttcggattccacgtatatttggcatcgcaccagcggcagcctacgtcgcatccgcccaggcggatgaaataggccggtttgcccgtatggaatccttcgccttgaatcgtatagaaatcctccaccagaggcaatttccgccctccgtccaacaagtcgtaattcgtcgcttccttcatcggactattcggtcaccacgtaaacatccttgtaattccggcccaactggtcgtagtccagcccgtatcccacgataaactcgttgccgatgtgcatggccggataatcgatcggaatctggcgctggtatgctttcggtttgaagaaaagcgtacacacgcggatactggcgggcttcttcgtcttcaactcctcgaccatgtgttcgatgctggcgcccgtatccacaatgtcctcgacgataatcacgtcccggccttcgatgttgttgcccagtcctatcagacacttgacatcccccgacgaggaggtaccgcagtacgaagagagtttcacgaacgatatttcgcagttgaaatcgatcttcttcagcaggtcgctcatgaacataaacgagccgttgagcacccccagaaacagcggattccgtttctcccggtaatcctcgttgatcttcgccgctaccgcagccacggcttcttctatctttgcagccggaatcatcaccttgaattttttatcatgcaattttatgacgttttctttcatcgggatacggattttattgttatttttacaaaagtaaataatttgagccacaaagttacacaatccggaagaaaaattctatgcttgcaaaactcatccgcaggatcaaatgttgttccgtccaggaaatcctgatgatcgtatccatcatcatgctcttgatcgtgatcgccaaccgaacctcggcagggataaaagccagatcggcgtcttcgggacagattacacaacaccaaaaacaggctgccccaccgcaggagtaatcgatacgatcttttttcgcaaagttgttcctactggcgggaacagacaaaatttccgacatgactttcaacttctgcctcaacctttttttggctgaaaagccgagaaacgcaacatgcaaaaaatcaggagcaaaaaaacctatactcctgatttttaaagcctttattttacccatccccattcagcaagatgctaaatggaagtaaaatatatcctccgaagcactattccgattcctttaacttcgaaatcggcataaaccggttgtccaatggttccgacttatggattgtgcgcactccattaacgacagccacacagttgtccggcacatccgtaaaaattacggcattggcgccaatgcggacattattcccaacctttacccctccgattatcttcacaccggctccgatatatacattatctccgatgacgggggctcccggtctctgactatccggcaatgtattcgatccgatcgtcacctgttgaaaaatcacgcaattttcaccgataaccgccctctccgaaataaaaactccaaataaatcgtgaggaaaagtaattttggatttaatccggacatcaaatccaatgtatgccccatatagcagcaaattaacctgccacaaatatcatttcagtttagacggacggatttgacaagaacgatagaagtccccctccgataaaatagcctgataatcaacggggcaaatcccttaaatagaaataatagctctttcataaatcccttttcgtaccaataaccgttataccagcccggagaaacccatgaaggccattgccaaaataccggccgtaatcagcgccacgggaaccccctgcacggccttggggacatcctccagttcgagccgctcgcgaataccggcgaacagcaccagcgccaatgcgaagccgatggccgtcgccacggaataaacgatgctctgcaacaggttgaactccttggagatcatcagaatcgccacgcccagcacggcacagttcgtcgtaatgagcggcaggaaaattccaagcgcctgatagagcgacggagacaccttcttcaacatgatttccaccatctgcaccagagccgcgatcaccagaataaagacgatcgtctgcatgtattcgatccccagcggcaccaatacgtaagtctgaatagaccatgcaaccaccgaagtaagggccatgacgaaggtcacggcagctcccataccgagcgaagtttcgactttcgacgacacgcccaggaacgggcagatgccgaggaattgagccagcacgacgttattgacgaagatcgcgccgatgataatggcaaaataagagagctccatacctatttcttgagaaatttattaaacaatgccatcagataccccagtacgataaaagcacccggagccagcacgaacaccaacggcatgtagtccgtaataccgaacgaataaccgaagatggccccgctgcccaacacttcgcggacggcccccaccaacgtcagggacagcgtgaagcccagaccgatcccgataccgtcgaagatcgaagccaccggtccgttcttcgaggcgaatgcctccgcacgtcccaggatgatgcagttcaccacgatcagcggaatgaatacgcccagactggcatacaacgccgggacatacgcctgcatcagcatagagataatggtcacgaacgatgcgatcaccacgataaaagccgggatgcgcaccttgtccggaatcaggttcttaatcagtgagatgaccaggttcgacagaatcagcacggccatcgtcgccacgcccataccgaaaccgttctccgccgaagtcgtcgtacccagcgtgggacacatgccgagtaccagaacgaacgtcggattattcttgataatgccgctcgtaagtactttcaaattattcattttgacctccttcctgtgcattgttcacggtctgacttcctcgctggaggcggttggaacggccttcacgctccaatccccgctctcggtaccgctcttcacccgcagctcgcgtcccagcctctgcattcggccgagcagccgtcgcgcccgtcgcggcttccgctcccgtttcttgattgttcgaagcaccggacgcaccatccgctcccgcatcccgggtagccgaagcccccgaagtaccgtccgcacctgcattttgagtattcgaagcacccgaaacggtgttcacggcagcttcgacgcctgccttttcgcaataggccttataagcccgactcacggcatcgacataagcccgcgacgaaatcgtcgccgccgtcagggcatccacgtcgccgccgtccttcttcacgcccagtttcatttgggccggattccggccgacaaaactcttttccagcggattgcccgcaccgaccatcttggtacccagccccggagtttccgcctgttcgagcacccggatattgaggatctgaccatcaggggcaaaaccgaccatcagccggatcaccccactgaacccgtttttagtcatcgattctacggcataacccaccacacggcctccctcggaagccgtatggaccgtcaccggcaagttctcgacggtcaatgccgtatcctccgtttcgtcgaactcgggcagcacctgtttgagcgcctcgcgggtcgccttgacccgtgcctcggcaatcggctcctcggtaatcatatggaccgctcccacgcctgcggaagcgagcagtgtgatcacgaacagcaccataaccatattgaataatgtactcttcatcctccgctcctcctattttaacccgaaacgccggggtttgacatatttgttgatcaggggcacgaccgaattcatgatcaggatcgcaaatgacataccctcgggataggcgccccacaaacggatcagtaccgtaatgatgccgatgccgactccgtaaatcagcataccggtatgcgtcatcggcgaagtcgaatagtcggtagccatgtaaacggcacccagaatggctccgcctgcaagcagatggaacagcgggaactcccacaacgcttcaccgtgcataccctgtccgaggccgaccagaaagacgaacacggccatcgttcccaggaccgccaccggaatatgccacgtaatgacttttctccacagcagatagacggctcccaccagcaacagcagggccgagacctcacccagcgaaccggggatcgaaccgaaaaggacatcctgataattgaccgacgtatgcgacaccagctccgctttgacggctgccagcggcgtcgctcccgaaaaagcgtcggccaactgtccgaccggacggggaaaagtcgtcatctgcaccgggtaggcgaacaacaggaacacacgacccaccaacgccggattgaacggattcttgcccagccccccgaaagtcatcttggcaatggcgatcgacacgaaagcgccgatcacgacgatccaccagggcagcgacgccggcaggttgaaagccagcaggacgccggtcaccacggccgacaggtcgctcaccgtacaaggccccttaagcagaaatttctgaatcaggtattcgaacagcacgcaactggccaccgaaatacaggtcaccgccagggcgctccagccgaacgccaccaccgaaaacaccagcgcgggcgtcagcgccagcagaacgtcccgcatgatcttttgcgtcgattccgaaccatgcacgtgcggagcgggtgctacgatcaatttatttgccatacgctatctcttttttcttatttcttggttgcatgggcggcggcgcgggcacggatcaacgccccgacctcctgttttcccattcggataaagtccagcagcggaatatccgccggacaggtaaactgacagcagccgcactcgatgcagttggtcacccactccgcctcgagccgctcccacagcttgcggcgcgagagtttggccatcagataaggctccaatcccatcgggcaagccgacacgcatttggcgcatttgatacaggagctctcccgaccacgcagggctgccgcacccccgagcaccgtaatacccgaacagcctttgaccaccggtgaggcgaggttgctcatcgcccgtcccatcatcggcccgccgttgagcactttcacatccccggccggcacgcctcccgcagcctccaacaagacagccaccggcgttccgaaacggacgagcagatttttcggagcctccacctggcgacccgtaacagtcaccacccgctcgatcagaggtttgttcttctgcaccgcatcgtacacggccaccgtcgtcgaaacattgcagacgacggcacccacgtcgatcggtaatcccggcggcggcggaacctcccgacccgtaacggccgctatcaactgtttttcgcccccctgcggataacggacccgaagcggaacgacccggattccggggtacgacgaagccagccgactcaatcgggtgatcgcatccggtttgttgttctcgattccgaccgaagcgccgctcacgccgagcgcccgcatcaggatcgtgacgcccacgagcagctcttcactccgttcgagcatcacccgatggtcggacgtcaggtaaggttcgcactcgacaccattaataatcaagtgctcgacctttttcccggcaggcaccgtcagtttgacctgcgtggggaacgccgcaccgcccataccgacgatacccgcctccttgatcctggcaagaatctccggagccgaaagcgtacattcgcgcacgagctccttcgaagtgtcgatcccttcggcccattcatccccctcgcgacggatcgtaatcatcatctggcggattccctgcccgttgggcagcatatccacccccgtcacggtgcccgacacgggcgcatggatattggccgacacgaaaccggcggcttcggcgatcaactctcccaccttcaccttgtcgcccttggccaccttcgcaaccgccggcgcaccgatatgctgcgacaaaggaacattcaccacatcgggcaacgccagtacctcgacggcctccgcccgactcaacttgttatccgacggatgtactccgcctctcggaaatgtcttcatagcgtttgttttcggttttatcgttcggatcaggattcggttttttcggtcttcttctcctccgaagccggcttctctcccgctgccgacgtttgcttcgatgcaggagcggctttaggctccttgggcagcggctccataccgaccagacggatggcaccggtggggcattcgttcacgcacttgcggcagagcttgcatttccaggagtcgatgaaagccaggttgttctggatcgtaatggctccgaacggacacactttctcgcattttccgcagccgatacagccggctttgcaggctttcatcaccaccgcccctttgtctttcgacacgcacgaaacataaaccgcccgctgcttgggccacttcttccgcaactcgataatcgacttgggacaagccttgacacacgcgccgcaggccgtacatttgtcgaaatcgacctctggaagcctcgtttcgggatttatcgctatggcatcgaagttacaaaccgtcacacaatccccgtatcccaggcagccgtacgtacaccccgtttctccgccatagagcgaagcagccaccgcgcaggacgtaacaccgtcgtacgcattgatccggggacgtttctcgcaactgccgccgcagcggacggtagccacctggggctccttctccggagcagccttgcccaggtaggcagcgacggtcttcatcacttcggccccgcccaccgggcagaaaagcgaagagatatcggcccgcttcactagcgcatcggccaaaccgcgacatccggcgaatccgcagccgccgcagttcgcaccgggcagcatcttttcgacctcgtcgatccggggatcttcctcgaccttgaacttttgtgccacgaaatagaggatcagcgcggcaaggattcccaacacgcaaagtgtaagcactgtgtaaagtaatacctccatattattcggatattgtgaaatgaatcgcattatcgatcttccggcgcagaagccagagaatcccatagtacaggacgacagatcccaatcctgcaagtaccgccgccccatcgcccgcgccgagcagatagcagactgccaccacgccgatcaggacgacgaaaggcacgacataagccaacaaaaccgcgaccgctcccgtacgtcgggttatagcgaccgtcaccctgtcgccgggacgatacgtcgccgcagccggagtacgtatctccacgattttctgcccggtctcacccaaaccgcaggcttcgcgggccttgcagctcccacaagcgccatgagccgtaatttccacacaaaccctctccgcatcgacgcgcttcaccaccccgctatgttcgatacggtccatcgggtcactttacatatttatgggtcaatggcatacggtactcatgcccgaacgaggaggacgagagtcgaagcaccggcggatactgaaaacgcttcttttcgttgcgcatgaccatcgcatagattttctgtacctcgtcgctgtcgaatccggcattgatgatctcttcacgcgactgcccatcttcgatcagacggtacaggatggcatccaccacctcgtaagagggcagcatgtcgctgtccttctggttgggccgaagctccgaagaaggctctttggtcaggatgttttcaggaatgggagcaccgaatttccggttgatatagcgggccaggtcatacatctcggtcttatacagatcgcccgtcacgctgaaagcgccgccggtatcgccgtagagcgtacagataccgagcgcattctcgctcttgttggaacagttgagcaggacatagccgttcttgttctgcagggccataagcatcaacgtgcggatgcgggactggatattctcctccgtcgcatcgaaatccgtaccgccgatcaccgggatcaacgtatcgacgatactgcggtaagcctccgtgatcggcacgacatggaactcgataccgaggttttcggccagttgcttggcatcctcgaccgatccttccgacgaaaactgtgagggcatcatcaatccccgcacgttctccgcccccagcgctgcaaccgccagacaagcgaccacggcggagtcgataccgcccgaaacgccgacacaggcctttttatacccgtttttaacgaagaaatcccgcagaccgcaacaagccgcctcgtaaatgaagcgggtacggtcgttcaccgacacagggacggactcgacgctgcaagcgggattttcggtatcgaacacctgaaagtcctcttcgaaacttttcagcagccgcaccagcttgccccggttgtccatcacgcccgacatcccgtcgtaaaccagctccgtagcaccgccgacctgattgaccatcaccacattctttcccttgacgtaggcgatattccggattacgtcgtaccgacgactcaagtcgcccttgcggtagcggcgggcatggatattgatgacggtttcgaccgacttgtcgaaatccggggtatgaaaaagatcgtcgcctacgaccagcgcacagcggcaaccccgtatcgtaacgtattcgcaacctttcgaaggggtcagaaatcccaattcgcggcgcacggtgatattctgttttcccacatagcggacgactcttccttgttgaatcaacgctgcggcactgatcgtcccctccttggtgagaatcggaagccccacgatcgcatccaccgtatcgcattcggcagcaatccgcatcaacgcatcttcgcactgttccaaaaaaggatttttccgcagcaaatcgaacgaaggagcaccgctgatcgcctgctcggcaaaaacgacgaggtccgcgccttcggctttcgcacgacgtacggattcgatgatcttgtttgtatttcctgcgacgtcgccgaccgtataattcaattgagccagagctatcttcatctatcgggtatttcaaaaagttacatcatcgcaaagttaattattatttggaaaaaacaacgatttcgcggcaaaagtttcatccgaacgcaacgatcgtatcgaaaaaaagcaatcggggtttcgaaatcctcattcggaaaagaggccgtccccgtttcgactcaacgaatacagcccgaccttccgtgggaaggtcgggctacaaatcgttcaaccccaaacgcttgctattgctgctcttcaggatcggccaccagaatacgaccgcagtattcgcaaatgatgatcttcttgccctgacggatctccatctggcgctggggcggaatgcggttgaaacagccgccgcacgcatcgcgccgcaccgtcaccacggcaagtccgttgcgcacgttatggcggatccgctggtaagcctccagcaaccgcttgtcgatcttggcctgcgctttggccgcctgagccgtaaattccgccacctgcgaggccgtttccgcttcgatgctctgcaattcggtctgcttggcttcgaggtcctttcggcgctccgccatcagggcctcggtctcctcgacctgcgcctttttgaccttgattccggcagcatactctttcagacgcttttcggccagctcgatttccaactcctgatactcgatctccttactaatcgcatcgaactcgcggttgttccggacgttgttctgctgctccttgtaattgccgatgagtatcttggcctgatccacctcgcgcttacgctgcttggagagagcattgagctcctcgatttcggcattgatattctcgacacgcgccttcaaaccggccaattcgtcgtcgagatcctgcacctcgagcggcagctcacccttcaccttgttgatcgaatcgatctggctgtcgatcttctggagatcgtagagggccaggattttctcctgcatcgaataatcaacttcagctgtctttttctgtgttgccatatcgtgtttttattgtttagacggaactatgtaaccgatcggattacgtgaatttacactcttgcgaaccgcaaaggtaaataaatttttcgataaaatatcaaacaaaatgtcgattgcgcaatattcgctctcgaaatggccgatatcggccaccacgaacgccccgtcgggagtcataaaatcgttgtatttgaggtccgaagtgacatacacatcggcctgcgcacgacgcgcttcgccgagcagcgaggctcccgctccggtacatacggccacccgccgtacctgctccttgaccagctcggaatggcggattacctgcaccggcaggcgctcctgaatacgccgcataaaatcccgcaccgacatagactgcggcagttcgcccaccaccccgaagccgacccgcccgtccgcaggatcggtcggttgcagcacccgtaactcttccacgccgagcatctccgccaaccgccaactcatgccgcccggcgcactgtccaggttggtatgacaggcgtagagcgctattccccgacggatcgcccgctcgacgcaccgctccacataagtagccgaattgaaccgcttgagggcatggaaaacgatcggatggtgcgtgactatcagatcgcaccccgtctgctccgcctcgtccaacacctcttcggtcacatcgacagccagcagcgcctgatgcacttcgtcctcgggccgtcccacgataagaccggcattgtcgtacgattcctgcaaacggagcggagcatatcgttcgatcacttcagcaatatctctgattttcataatcctactacattatttgaaaaggcgattatattttcaacgtaccatatccgacggtcgcttgttcgcggcctgtgctcccgtccataatgctgcccaccccgaaatcctcacctcgaagggacttgcggcgctacgcgccccaaaagatataccgaagtatcgggttcgttcgcatacccggtcgggcctatcgccgtagcggtccgcaacgtcaccgccccctccgaatcggaggcgaaggcaaaatgtacccgcctgccgtatttcaaaacgtccgtctaaaacaacgactgttcatagaaggcgaacaactccttgctctccgcctcctctttctccttcttgcgccggggctgacgcgccgccgaacgtttcggcgccggcttttcgctccggggacctggttcgatcacctgcacaggtcctttactctccgctccatcccctccggcatcgtccgccaactcctgcgcggcaggcttcttccgggtacgaaccgggagcgccgatacttcggccgcctctccagccccattttccgcgacaaccgcccggtcctccgcactctccttgagttcggcccgcacctcttcgagcagggcccggacacgctgaagacgttcgagcagctccgcatcgcgcgaaatggttcctttattctgtttcagacaacgggcggctccgtcgagggtcatgccccgctccttgaccagatgatagatcaatttcaggttttcgacatcggccggagaaaaaagacggttgcccttcttgttcttctgcgggcgcaggatatcgaatttcgtctcccaaaaacggatcagcgaagcattgacgtcgaacatctccgacacctcgcccatcgaatagaatagtttcttggccataacatgtacaattacaggttgaatatccgcaacgagttgggatacatattgtttacccggttctgaatccgcttggcgaaacccagggccgctcccccgtgcgtcaccagattcatcccctcggcgaaagccgcagcctccgcctcctgcttgcgcagaaaccgcagcgcctcctcttcggacaactcggcaacaggcaccgctccgcgatccaatccgcaaaacatcgccagcgcatgatcgggcttgagccgctccttgaagatctgccccatcgcaacgcccgaggcgatcacgcgcagcgattcggccagcattttcaccgcctcgtactgcgattcgtaatacgcataatagacatccgccaccgccgcaaaacgcatccgcccgggttcggcgacccaacgggctagttccgcacactccctgcgtccggcgggcgcgaaaatcgttcggcgggacttgggcacacggacacggcttccgccatcggacaccttacgggccaccgccgcaaaaaatccctcgccccgggtccggtgcggatagaaacggaacgtccggaaaggaccgacccgaccgcaaaccacaccccacgccggcgggcaatcgaaagcggtcgattcgacgatctcttcacccgcttcggccagcagtccctccagcgacccttcgttttccagtcggttgaacgtgcaggtactgtatatcagcaatccgccgggacgcagcgtcttccacgcttcgcgcagaatctccgcctgccggacggcacatatcttcacattgttctcgctccactcgtcccgtgcctcgggtgtcttgcggaacatcccctcgccggaacagggggcatccaccgccacgatgtcgaaccatccttcgagcaccgcgatctgtgccggctcgttcaccgtcaccgccacgtttcccagtccccacttgcggacgttatccgccagaacagccgcccgctggcgattgacttcattcgccactaccagcccgtcgctacctgcgagcgacgcatagagcgtcgtctttccccccggcgcggcgcaaaggtccagaatccgttttccggcgacctcctccccggccagcacgtgagccaggaactgcgacgaagcctcctgcacgtaataagccccggcatggaaagccggatcgagcgtaaacgaaggccgctccgtcaggtaacgtcctgccggcgaccagggaatcgcctcggctccgctccagcggcagggacgctgcggatgcaggcggacggatgtcggcgccgggccttcgagcgcctcacacagcgcacgcccctcctccggtcccagttcggccataacccgccgcgtgaaagattccggcaacatagggactattttttagcgttttcgagctcctcccgcttccggtcgagacgagcgcagatcttctccatcaccgcagcatccgcaacgaaatcctcacgatccttatcgatcacgagcacttcgccccggtagatatgttcgatccagtcgtcgtaacggtagttgagccgccgcaggtactgttcgtcgatgttcatttcgtaggcgcgaccccggcggcggatctgcgaaatgagcgtcggcacgctggccttgaggtaaatcaacaggtccggccggggcaccaggttggtaatcaacccgaagatactcatataagtatcgaagtcccgacccgacatcagccccatgcgatgcaggttgtcggcgaaaatataggcatcctcgtacaccgtccgatcctgaaaaatatcgaccggaccgctgcgcagaatatccatcgtctgctgaatgcggctgcccagaaaatacatttgcagattgaacgaccaacgattcatatcgttgtagaaatccccgatgtagggattgtcgctctgctcgtaataggccttggcgccgtagcgctcggtcagcatctcggtcagcgtggttttgccgctgccgatatttccggctatcgcaatgtacataaatcggatgttttgacgacgtcacgcacttcacgccgcacggcggggccccttcccggtcccgccgcccggcaagtccaccgtctgcggcggcacggcagaaaaccgcctcccgccgcaatccccggcccccggcaaagcgacgcgtgtcgtcgcgttatttattgttcaatcttcagtaactgttccacaaccgtacggtcgttgcgcatgcggggcagcttgttcttgcccgtcttctgcaaccagcgcagcgtcgttcccggcggcacggcatggatgcggggcggatcgagcgccgtctgccgcttggcgtcgtaatccgaattgacgctgcgaagctcccggtccagcacttcggcaaaatgctccggcgtatcgggccgctccgaaaactccagcacccattcgtgcgctccccgggtattcagccccatgaaacagggcgccacggagtactcttcgaccaccgcaccggtttgctcgcaggccgccgcgagcgcccgctcggcgttatccacgatcagctcctcgccgaaggcgttgatgaactgacgcgtgcggcccgagaaacggatgcgatagggattcgtcgaggtaaactccaccgtatcgccgatctcataacgccacaacccgttgatcgaggtcacgatcatcgcataaacttccccgacccgaacgccttcgagcggcacgatctgctcgccgctgcgaaattcgtaataagtcccgtaatcgagcatcagcagcatatcgtcccgcgtcagatcgtcggccagcgagaaaaaaccctccgaagcgttgtaagtttccagataggtcatcccctccgacgggatcagcttggcgaacgacttgcggtagggcgtaaacgccacgcccccgtgcgcaaaaaattccagatcgggccacacttcgagcaggttgctcttgcccgtatattccaacacccggcgcatcagcaccaggttccacgaaggcacgccggcaaaggccgtgatcttctcccgggtacactcccggcagatcccctctatcttccggtcgaaatccgggatcagggccgtttccatcttcggcgcccggaaccaaccgctccagaacggagtctggctgatcagcacagccgacaaatccccgatgagagctccgttctcccggacatacgaaccgcccagcgtcagcgtcttgccgtcgaagatcttcgtctgcggcttggccgaagcatacaccgccgccacgtcccgcataccgagcgtatgattccaccacacggactcccgcgtgacgggaatgaacttgctgcggtcggacgtagttcccgacgaacgggcgaaaagtgtcacccgccccggggctgcgacattcttctctccggccagcatccgctcgatataaggcttgaaactctcgtagtcctgcactccgacccgtgcggcgaacgcctcgggcgtaaggtgcttggcaacaccgtgccgacgaccgaactccgtatcggccccccgcgcaatgagctgtcggaacatctcggcctgcacttggtccggatgtcgccgaaaacgatctatcgccttcatccggcgggcgaaataggtacgtaacaaactgttccgaatcgacatcctgcgctgctcctccttatcgttaattaaagaaatatcctattttggagatcgacgccggcatagcgaaaaccaccacgcgatcgtaggcgctcaactccatgtttcccacggcgatgaaaaccttgtcgccgcgcaccacaccgccgataatcgtatcctgcggcagcttcaactccttgatcggagccttcgtcgccggggcgttgggcttgacgatgaactccagcacctcggcctcgctgcccgtcagacacttgatcgcctgcacgtcggttgacatcgtgaagcggaagatattcgacgccgtaaccagtttcttgttaatgatcgtatcgataccgatactctcggccagattgatataatcgaggttctcgatctcggcgatcaccttcttgacgcccatgcgtttggcgagcatcgccgccagaatattggtttcgctgcgccccgtcaccgcgataaaagcgtccatattggccagcccctcctcgagcatcgcttcgatatggcggccatcctcattgataatcaaagttttgtccaacaattcggccaaccgataggccttctcggcattgtagtcgatcaacttgatattgacctcgtcctgcaattcggtcgcaatgcgtataccgatgcgcgaaccgccgaggatcatcatgttgttgatctccacgttggaatgccccgagaactccatcacctccttcacggcatcctgccgggcgatgacatacaccatgtcgccctccataaatatttcatcctgccgggcgatgatggtctgaccgccgcgagcgatcgccaccgtccgatagctgagctgcgccgcatcgtccttgaaacccgaaagttcgcgtccgatgagcgacgaggtcggatcaagacggaaaaccacgagcgaaagccgtccgctcgaaaaatcgacgtactccgtcgtcgaagtgtgccccaacagattgatcacctcctgagccgccaccttttccggatagaacaggtagtcgatacccatgttgataaaaatctccttgttattgggctccaggtattcgttgttgtcgatccgggcgatggatttcttggccccgagctgcttggccagcaccgctgccaccacgttgtcgttctcgacatgattgacagcgatgaacaggtcgcactttcgcaccgaagccttccgcaacacggcaaaggtcgtggagtcgccctcgaccgtcagcacgtcggccaggctggccacatcggccagcagcttcggatcgctgtctatgaccgtgatgtcgtgcccgttgccactgagcattttcgccagatggcttcccatttcgcccgcacccgcaataacgattttcataccggatttactctgtcagcatacgcccggatcattccgggcagcatttttgcaattaataacacaaatgtataaatttgcatcggaacacccaaatttccactattaaatttcagttaccatgccaacctggttaatcataattcttttggcgattctggccgtcggacttttcgtcctggccatgtcgctcaccctgattttcaagggacaccacatcgactccgaaatttccaccaacgaaaacatgcgcaaactgggtatcaaatgcgccgttcaggagacccgcgaacagatgacgggactcgaagattgcgcatcggagcccggatgctcgggcaactgcgccgcctgcacccccgaagcggcagccgcagtacacggctccgcaaaaaaataatcggcgacaaattctccgcaaaccgaaaacacgggcaatctgaattcagattacccgtgtttctattttctcggtttcaaccccacgatgccgagaggcggtcagtccgccgcagaacactccccgaccatcatctccgcctccgacctgcaacccggcattttacgggcgcgacagaaaaaccaagaattaaccagatccgtcttgttgtaacgcaacggacgataatccggcagcgaaagcgtttcgccccctacttcggagagaatcaactcccccgccgcagtatcccattcatacgtggaagtagtccgaaaatagtaatccaccgcgccttccgccagcaaacaaaacttataggagctgccctgctccacgacctccagatcgggatggctctttcgcaattcctcgatatactccgcgagttcgggcgacttgtgcgaccgggacacggcgacccggggatgttcatgccgcgccgactctacaggcaggcgccgcatactttcgacgatctgcccgtacgagtattccgcgtcggaatcggccgccaccccctctttcaggaaagcaccgcccccgcgccacgcgagatacatcttgcccaaatagggaacatacaccaccgacgccacgctccggttattctccatcagggcgatattgaccgtaaactcgttgtttcccttgataaactccaccgttccgtccagcgggtccaccaaccagaacagctcccagttgcagcgctcttcgtaccgcatctcacgcccctcttcgctcagaatcggaatacgggtaggtcccagataggtcttgatcgtttcgtgcgcccggcggtccgcgacggtaatcggagtcttgtcgctcttaatgctgatgtcgtaatcctccttgtttttgtaaacctgcataatggccgcaccggcccgcaccgccgcattgaaaaggttgggcaaaaggtatgatttgagctcgttgtcaagcataatgatatttttgatcggtaagacaggataaaggtactatataattcccggatccgtaaaatttccggcaataaaaacccggcagccgttacacggccccgagcgcagcattccgcttcccggcgggaaaaggtgccgaaacagccccgagccacagaaacagtccccaaagcaacagaatatcgagcagcaacaaagtcatcggcagccacccgaacgaccacgccgcaatcgcacatccggccaaaagcgccattccggtcaaagtcaaaatccagacatagcgggacgggcgcaactcataaaacaacggttcgtacaacgtgatcctctccttgcgggacaattcatacccgtcggcccggtcgaaacgacccaaccggccgacatactcccgggcataaagtcgcagcgaaggtcctacggcagtccgcacgaacgatatagagtggatcggatgaaccgccaactccatcgccagacggtcgatcgcaccccgtttgaggcgcaggttgcggccgatcggcaaaatataatcgtacgacgcggctcgcacggccgcatccgacgaaacggcggaaaacgcctccatctgatcgagcagcgtcagacgattgacaccccgcgtctgggagcggtagaatccccgtacacccaactgagaacaggcttcgaacggatgataatccacccgcatcatccggtaatgccggagcatctcgtgaaacaactccggtttcagacgggcgtccatcaccaccagcaattcgtaactggcatactccacatcgagcaggtcggccacctgggaaacggaatctatgtcgtggcaaatcgccgaaattccgataaaatcgggcgaatcggaaaccacgccgaacatacgggacagcaaacgacgcttgttacgcgccctcaacacttgaactaccagccaccagacacgcaccacgacggcaaccgtcacgcaaatcgcacctaactcaatgaaccacatactatccgacgttcaatttatacgaatcgaccaacgacacataatatcgcttctcctcttcaggaatgaatacctgcaaagcgttcgcggagtatccctgccgggcaatataacgcagcagtaccctgcgctgaacgggattcattccgcccacgaatttttccacttcgggacgcgtaatcacactgtgcagcgtacaaagaacgtacatcgcaccgacggactcctcggaccggttttcggcaacgatccgcagcaggatctcctccgcatcttcgattccgaaacgccaaacgacactgagtctcagcatccgcagattccggttcggcgacaggatcaacggttcgtaatcgacaggctgcacattctggcgcaacatacggagcacctcggacagttcgaaatacgaaagccgatgggaataggcgtcgattttcgaggaaagcgccgacatatcggccatcatctgcacgctcaacgcacagaagcggacataacggttcctgctatgcgtataacgttccactgcccgaactgttttttcatcgacgggcattcgggaaagcagatgcaggtaataagccctgcggtaacctccattgcggcgaatacgacgcagcaggaaaacatcaagcctctgacgctcgacgatccgacgcaacggcgccggatcgagcccgtacgtagaatccaccaggtcggcaatatcctcggcgataaggcgcctatcccgcgaagacatcgcctcgggacagagagcgcactcttcggttccggagaagagcatccacaacacgctgttcaaatacttttcgcggcgctcggcatcccacctgaggcaaaaacgacctgcaaaccgttgcacgcaccagcttccggccaaaacagctcctgaaaccaaaacgaccccgatgcaccaccaaaacgtcatttccatttttcccgatcgattagctcgttgatgactttccgccgcaaccggtgcaggctcaccggcaaggtcatgtattggttcacgcccatccggtatatactccgtaccatctgttcggattgcggccacgaaatcacgaagacccgcgtacgccgggttttatccgcccgcagcgtgtccatcacttcctgccggcacatttcggcagcagtacccataacgatcaccaggtcgaaaggcgactcccggtgaagcacaagcatcgcaccgaccgtatccgcgcactccacacacgcatccaggtcattcaaggaaaaagccacggccttgcgcaagacgaagtcctccgacacgattaagatacgatacatttgatatacatactgtttacacgatcaaagatacaccgaaaaacgtgccaaaacaaatgtctgcaagaaaaaattgcctgcccttgtttattcaataattatccttatatttgcacgttgaaatttatgtataaacacatacaatttaatcaatgtacgttatagtagagattgcaggtcagcaattcaaagctgaaaaaggtcggaaactctatgtccaccgtcttcccggcgaagaaaattcgtcggtgagtttcgacaaggtcctgctcgcagacaacgacggtcaggtcaaggtaggtgcacctgtagtagaaggcgcctcggtgaaatgtaagattcttaagcacctaaaggacgacaaagtcctcgtgttcaagaagaaacgcagaacaggctatcagaagcagaacggacaccgtcagttcctgagccagattctcgtggaagaaattgtcgcataaccttaaatttagagaaacatggcacacaaaaaaggtgtaggtagttcaaagaacggccgcgagtcggaaagcaagcgactcggcatcaaacttttcggtggtcagttcgctaaagctggcaacatcatcgttcgccagagaggtactgtccacaatccgggcgagaacgtaggtatcggcaaggatcacacgctcttcgcactggttgacggcacggtttccttctgcaaaaaacgcgaaggtaaatcgtatgtaagcgttactccgttgagcgagtaaaagaatcgctatacagataaaaaatgctacgagtttcgtagcattttttattttcccaaaactatctatcattttcctcctttaacggaaatttcttgattcaatgtattcgttatatctgttataaatcttccccgttagcacgattgtattcgttatcgtaatacattattatgtaatattttccgtaaaagtctgatatcataaaccacacaggtctttttgaacaagaataaaaatcttccaacttacgtcttaaacggaccgctgcaatctctgtttcaatttctgcggtcggatgctccaattgttcttccgtatatttagataacagttcagggtctgattttgccgtccaacctttttcatcaaatgcgagttgatggaaaatagcctcatagcgtttgtcatgaactaacatttcataagaaatatcttcatcttcaggaatcatacaattatctgccaatgatgtatatttaggattatcagcgaactgttcacaaaggttattaaatcttattcgaatattcgtctcatcaacagtattaacatcagcaaccataatacggctaactttatttttggttgtcactacataaatatcgacttctagaccattaaattctcctcttagagcacctgtcgattgattatattgaaaacctttttccttcagcctgtggatcatctcactcttgctcccatcgaccgggattccgagaaatcgggtaacgtcttgttgcgcatgtgcagccattgaaaacagaagcgacattgtcattaaaaataaatttttcatatcatcaagttttttctgtcctccagctgccacaagaacctttataaaatacaagaagcgtggagctgcaatgccacatcttaagttagaggtcctgagaaaaccttgtagtacagataatggatatagcagcccacgctaaagcgtgagaaccactatgccaatccttgtactacgtttgaaatttctcaggtttctaacttacaagacaagcataacgcttctttatatctaatatgtcttgaagagggattgcacccaattcgaatgtaaaagtaataaatatctgcgacaacccctcattccgcaacgaatattttgtgtagcgaacgaatcggaaactctgcacgcccctctccgcccgcctttctcttctgaccggatggaataattacgctccttatccgcgtctcgaattgctccttcaaccactccaccgggtttccggctcatgacaagcactaatttcccatcgtctgtcggagagcgtgcgaacggcagacgacatcctcctacttcgtaaaagagaaataaatgtaaattatacttgcattattgtaaaatatgctttacatttgtcttgtcaataataatcacctaaaaattaggacgactatgaaaacaactcttttactgcccaacggttttaagaaaatcggctgggcgatcttcgttcccgcatttctgctcggctgttcgatctgcttcttcggcgaaaatttcgaccgctggcttttccgcgaaacggtaatgaacaacatcgccatcatcggcacggtcgtcggcgccctcttcatcggcttctcgcgcgaaaaaatcgaagacgaaatgattcagcacatccggctcaacgctctgatggctgctatgtggatcaactacctgctcctgatcgtcgtgtctctgtcgatctacaacatcaactaccttacggtaatggcctgcggcatggccactccgctggtcatcttcctgctcgtctatcacttcaatctttacagactgaaccgcaacctgcaccatgaagaataacatccgtgtccaacgggccgtcgtccgcctcacccaacagcaattggccgaacaggtcggcgtcagccgccaaacgatcaatgccatcgaaagcagcaagttcatcccctcgaccctgctcgcactcaagatcgcacgtaccttccggcaaccggtcgaagcgatcttccaactcgaagaggaagattagaaccggtgcaacaagcacga

SEQ ID NO: 10403 - DNA, 12385 bp, Unknown
  gut microbiota DNA sequence
cgcggcttggccgcgtattcaattcttacccacccctcaatcccttcatcgggaggggacttttgtcgtccttcggagttcggctgcctccttgtcttgttcccggtttttcgttgctcttttcgttccttttggttgtagtttcgcggcagagccgcgtgttccaattttatccttccctgaatcccctcctcgggagggaactttggtcgtccttctgacgccggggtggttccttaccggcgttgcgggcgtttccttatctttttcccggcttgtcgtccccggccgttgcgttttcttccgtttctcgcttccagttgttgcggctccttttatcttttgtcccggccgctgcggttttcgtgtcggttatttgttgtgtcgaagggcatcgacggtcttcagtcgggcggcccggcgggaggggatgtaacctgcgataagtccggccagcaccagaacgatcgtcgcgcttaccgctaccgagaggttcaacgtcggattgacgaagatgttgaacgtgttctcctcaccgggcggagtttgtgtcatgagcttgttcactccttccatggcgaatacgccgagcaccatcccgatatagccgaatgcggcggtaatcatcaccgattcggtcaggatcagccggatgatcgacgagggtttggctccgagagccttgcgaatgccgaattcgaaggtgcgctcctgcaccgttaccagcatgatgttgctcacgcccacgatgcctgcgagcagcgtccccagaccgatgatccagatgaagaggttgatgccgccgaagacgagcatcatgttcttgtaaccttccatgcggttgtagatccagacggcgctttcgtcgtcgggcgcgaaggtatgttcggcagccagacgattgcggagccgttgttcgaattcggccatcttctgatcggtgtcgatgtctttcaccgaaagataggtctgtcctacgctcggatcgctgtggttgaagagcagttgggcggtcgtcagcgggatgaaggtgaatgtgtaggagccgaactgatccatctcgaaaacgccgatgatgctgtacgatgttccattgaccaggaggtgctgtccgacgggactttgaccgtgaaacaggacatcccgcacgtttttatccacgacgatcaccttgcgccgctcccgaaggtcggtatcgttcaggaagcgtccgtcgagtaccctgacattcatgatttcgcggcattccgggtcgctgccgactacggccgcattgttcaggaagtcgcgtccgtgggagaggttgtattgtcccggtccctgtacgcgggcggaaaccttgtccacttcgggaaattcggtgcgcaggatctccaggtcgcggttggtgatgttgatgcgccgccacttgtcgtagcccttgtagggttgcgaggtccagccgccgttgatgatgaccgaattgacggccatcgacccgaaattggagagcgtgccgtttttcagtccgttgcccgagccgagcaggatgaccagcatgaagataccccatgcgaccgagaagcccgtgaggaacgtgcgcagcttgttgcggcggatcgacgcccagatttccaacagcaactctctcatggccggaggttttgtatcgaaccgatcacgccgtccttcaggtggatgatcttgtccgtctggtcggcgatcgattgttcatgggttacgcagatgatggtcatgcccgtcccgtttacctgccgcagcaggtccattacctcctgcgaggttttgctgtccagggcgcccgtaggttcgtcggcgagaatgatctggggcttgttgatcaatgcccgggcgatggccacgcgctgcttctggccgcccgacatctcgttgggcatgtggttggcccagtcgcggagtcccagccggtcgaggtattcgagggcttcggcattgcgcttgcggcgtgaaacgccctggtagtagaggggaagggcgacgttttcgaccgcgttcttgtagtttatcaggttgaacgactggaaaatatagccgatcatgttgttgcgggcagcggcggcctgcgtctcgctcaggtgtttgatcaggcgcccgttcaggaaatatttgcccgtgtcgtagtcgtccaggatcccgaggatgttcagcagggtcgatttgcccgatcccgaggcccccatgatcgaaaccagctcgcccttttcgatttcgaggtcgatacccttgagtacatgcagcggagcgccgttgtggtaggtcttgttgatgttttcgagtacaatcatatcgagagggagtgatcccgtttttttatggtcgttgattttgttcgctgtttttgtttcggcgtatttcctgttgatccgtgaagtgttcctgccggtcgaaaccgaagggttctgcggggtgtttcctgtgccggcgttatgtaattcctcgacttttggaaacgcttgcaggcactgcgtccgttcttatcgtttgttacgataaagatagaaagtatatttgtgaaaaacaagaaaaatttatcgaaaatcaataaaattttacccccccccgatagatcggtcgagagggggattttgtgtggaaaaaagaccgtcccatcctctgaaaaaggaggcgggacggtctttagttattccgcatacacggttattccggtttcggcaggagtcctgttttttgatataccttataatatatggatcttgcgagaaaatcacttccgcgcagagcggacaggcgtccgcgaacgattcctgcacatggagtcgaggagcctatttgagccgcaggaacgaatagccgaagcgttcgcaggcggctttttccaactcttcgcgggccgaggggtgcgcaatgtcgatcagggcgcgggcacgctcggcgagtcctttgcccagcaggtaggccgcaccgtactccgtgacgacgtattgtgtctggaaacgggtggtcaccacgccggcgccgggcgtcagcagggctttgatcttggagtgtcccttcgaggtggtcgaggggagcgcgatgaaggttttaccgccttcggagagcgcgccgccgtacatgaagtcgtgttgtccgcccacgctcgagtagatcatcgtgccgattgagtcggcgcagatctggcccgtcagatcgacctccagcgccgaattgatggccatgaccttcggattctcgcggatgcggaacggatcgttcgtccatgccacgtccttcatgatcaggtcttcgttgtagtccatgtattcgtagagccgcttcgagccgagagccagcgacgcgaggttcttgcccggaagcacttttttctgcgagttgtcgatcacaccgctccgaatcaggggtactactccgtcggtgagtgcttcggtgtggagtcccaggtgtttatgatcgcccagggctgcgagtaccgcgttgggaatgccgcccacgccgatctggagggtcgcaccgtcgggaatcagctcggcgatgtagccgccgatcttacggtcgatttcgctgggctgggcggtcggaagctccaccagaggttcatcgacttcgacggcggccgtgagtttcgagacgtggatcagcgcgtcgccgtaggagaacggtacgtgggggttgatctgggcgatgacgaccttcgcgcattcggcggccgaaaccgcgaggtcggccgaggtgccgaagctgcaatagccgtccgcattggggcgcgaacagttcagcagcgctacgtcgatcgggatgattcccttgcggaaaagccccgggatctcgcccagaaaagccgggatggcctgtccgtacccctgagcaatccagttgcgtacggagttcgacacgaagaggctatatacgaggaaactgtctttgtattcgggcttgcagtagggcgcttcttcccgtccgatggcgaaggccgaatagaccttcaccccccggagttcgtgtccccggtcggccatcgctttcacgagcacttccgggatcgaaacgcttccttgaatataaacgctgtcgttggatttgatgagcttcgcagcttcagcggcagtggtgtagttgatcatgggtctgtttttctaagtcgtttccggcagtcggtcggtgaaaggaaaattcggtcccgtcgtcggccggagacggtaggttttgtcttttttgttggttatttgaaggagccgaatttattcggctccttctcttcgttgggtgcgaatggtcgttcccggatgtccgtgccggattcttttctccggagtgcaactccgggacgatttcacagcgacccggagctgcaatgccggatttatttccgggcgtagtcctgcgcgaagtcgcggaggcgccggtcgagcaggtcgtactgctcctcgcggttcatctgcgacacgcagacgcgcacgccgttctggaggctgcccgtcgaggtgagcgagatcgcgcagataccgtagcgcagcagtgcggccaccaggtcggaactcggcatcgaaccgtagcctaccgtgaagaagaatccgtcgctcacgtgttcgttctggtctttgtcatagacgatgtggaaaccgtgacgctcgaagagttccttgacgcggtgagcgcggtgtgcgtattcgcgggtgtgccccacgaagtccagcttgccgtccgccgccgctttgaacatggccgccaaagcgtattgagccgagtgacttgcgcctgacgatgcggcgtagaggaatgtcagggcgtaggattcggcgaaacggccgatgccgtaacgctccttgagagccggatagaagcggttgcgcagtttgtccgagatcgctgcgatggcgatgcgctggccggcgtagctgaagatcttcgagccggaaatcatcagcacgtaattgtctgtgtaacgggctgcggtggcctggaacggagcctggaacggatgtcccagctccttgcggaaatccatgcccatgtaggcgaggtcttcgagaacgatcgtgtcgtatcgggtggccagctcgccgatggtgcgcagctcgctctctgtgaggcagatccatgccggattgttggggttcgagtagatgatcgccgcgacgttgccctgcttgagatagctctccagcttgggaccgagtttctcggcgcggaagtcgtagatgtcgaacgattcgtgcttgatgcccaggatgcgcacctgctggcgctgcaccgggaagcccgggtcgatgaacagaatggtgtctttcttggggtcgcactgcgagctgatctggaacaggcagaagccgccctgcatcgagccgacggtcgggatgcatccctcgggggcgacgtcgatgtcgaggaacgccttgacgaagcgcgaagcctcgctcttgagcggggcgatgcccgtgatgctggggtagatcgaagcgtgtccctgggcgagggcctgctgttcggcttcgacgccgacagtctccggcggaaggcccggaacgcccatttcgaggtgcaggaattcggtgcccgagttcttctcgagggcgccgccgacggctccgacctgacggatcgtggcctgtgcgaagttttcgatgtccatggcggcgagctgctcgtcgaacatcttctgcggaatgagagctgccattacttgcggtgtttttgtgcgtattcgtatccggcgcggaacgccttgaggttcatttcgacgatctgctcgcctttgcgggcgaagatgctgcggatgcccgcctcgaacttgtcggcgtcgagccccaggaaaggagcggcggcgcccagcagcacgatgttggccgcacggggcgaggattgctccttggcgatggcatcgacatcgatcaggatcgcatgtttgcgcttcccgagttcagccaatacggcctccggttcggggtagttgtcgatgtttacgaacggcgtagtgttggcgatcacccagccctccggattcaggtagggtacgtagcgcagcgcctccatcggttcgagcgagatgatgatatcggccgcgccttgggggatcaggtcggagaggatctcgtccgaactgatgcgcaggttcgactgtacgtcgcctccgcgctggctcatgccatgtacttctgcctgtttgatgtggagtccctccttgagggcagcggctccgatgacggtggcgatcgagaggatgccttgtcctcccacgccggaaagtatgatgtcccgtttcatggtcgtactactgtttttttgcgttgtggcgtttggcggtctggatgcactcgcggcgcgggatgatgaccgaaacccctttgtattcgatctcttcgcggatcgtgcggcggatctcctccatgttcttgggcaggggtaccacgacgcggatgtgttcgggctccacgcccagtccggcgcagatctgctcgaggcgtcccgtgccggccgaatcctggccgccggtcatgccggtagtgaggttgtccgagattacgacggtgatgttgctcttttcattcacggcatccagcagggcggtcatgcccgagtgggtgaaggtcgagtcgccgattacggctaccgaagggaactgtccgccgtcggcagcgcccttggccatcgtgaccgaagcgcccatctccacgcaggtgtcgatcgcccggaacgggggcagcgaaccgagcgtatagcagccgatgtcgctgaataccttgtggtcggggtagtgctcgcgcagcacgtcgttcagtgccgtatatacgtcgcggtggccgcagccctggcaaagggccgggggccggggcatggtgagctggctggccgcctcgctctcgcggcggggcagaccgagggcgccgcgtacgttgtcgggcgtgagttcgcccgtgcggggcagctcgccgctcaaacgtcctttgaccggaatcggagtacccagcagaccgcggatcatctcctccaccagaggttgtccctcttcgacgatcagcagcgaacggcactccgaagccatgcgctgtacgagtgccgtcggcagcggatattgcgagatcttcagcacggggaaggggcagccttccgggaagttctccataatatagttgtaggccagaccgcaggcgatgatgcccatggatttgtccggtccgtcgatgtagcggttgtggcgcgaatgttcggcctcctgctcgaagagtttgttctcctcgatgagggttttgtaacgtacgcgcgagttgcccggcatgaggatccactggcggggccgctcggggtagtggagcgtgttttgctggcggggttcgccgatttcgaccacggcacgcgagtgggccatgcgggtcgtcacgcgcatcagcaccggaatctggtatttctccgagaagtcgaacgcctcgccgatcatctcgtaggcttcctgttgcgatgcgggttcgaagcagggaatcatggcgaatttggcgtagaagcgggagtcctgttcgttctgcgaggagtgcatcgagggatcgtccgccgctacgaccaccaggccgccgttggcacccgtcatggctgaattgacgaaagcgtcggcgcagacgttcatgcccacgtgcttcatgcagaccagggcccgcttgccgacgaacgacatgccgagggccgcttccagtgcggtcttttcgttggccgaccagttgcagtggatgccgcgctcgcgcgttagggggtgcatctggataaattccgtgatctccgtagagggggttccggggtaagcgtacacgcccgaaagaccggcgttgagggctccccatgcgatagcctcgtcgccgagtaataattctttctttatcatggtgtctgttttaggttcattgctgttttgagttccgtttcccgcctcgtataaccgaacgggcttggtggttatatcctcggctctacgaaacagttcgtttttacgccgttgttttccgctttggcagagttcgaacacctccgattctgcgctcggtttatcgaaagcgttgattttctttcgactatttttcgcctcggcaatcgaaacgaaggtttcattgcgctcggcttaaggaagcaacttaggtttctgacaaatttagcgtttttttttgaaatatctactgtgacggtggtttttattccggattttcggtaatacggcaaaattgatgacgattcggaagtaaaaggtccgagctctgttttttgctttcgccggatgaagcgtgggaaaaaagcccccttcgaaaagggggcttgatgaagattccgggagaaccggttgccggtcgaatcgtgggtttgagatgcgatcggaccttcggttgccggggttgtttattgcacatcgacgaacggtccgcaataataaccgttcatttcgttggtcgcttcatagaaggccagcgcgatcttttgctttgcggtggctccgtggatggtactcttggtgttgtcaccctggttgtcgtaggttttgcctgcatatgcgatggacagtattcgtccggcatccttttcgttggcaaaggaaacgagcagaccgtccagtgcctgcggtgcggctttgatggttactacgccctccgcctgccggatttgctccaaatcggtcagaccggcctggggtgccagatagatcgtgtagtaatcgtcgctgcggcggtcgatgacggcggattggagttcgaccgggtcgttcgttccgaccgtataactgttgccggagtagtaggagtatagttcgaacgccccgtccgcatacccttcgaggtgcatatcatgaacctgcagatcgaacgagattcggtagttgtcttgcagggcgtatttgtagagggtgatggtgcccgtcgcgccttgaaggtccgtattggtgacggtaaccgacttttgttgggcaggatcgacgatttcgagttcgaacagcttgtcgatccgggtgatgtcgatcggagttttagccgtcgccagggcgttgtcgaagcggattcgaacgtagtattcatccacctggtcgatcagcgctcccatgacggggctggccggcgagagatggatttcggaaatcgtttcctcttcgagcggttggtaataggcgcttccgagcggagttttcaggtcgttgaggctgatgaagctggtccgctcggcgtcctgctggtcgtaggtgcaggtaccgtagatgcggagtttcttgccggttgcggccgaggtcatttcggcatatccttcgatcttgtccccgtcgcgggtgacgatgaagccgccgtcggtgattaatgaatggtagtcgatggtcaccatcgaaatatccgatgcgatggggtgttggaacgacatggagttgagcagcgaataccgttcggacgcactcttcatgttgatcgatttatttagctggttcggcgtgaagctgagggatatgtaatcgttttttccgccgttgccatagagcatgtcctggtagttgtcgtatccttcgagcggggagatgaagaaccagagccgatcggtttccttgtagaagaagaccgatttggcggcgatccgctggtcgccgtattcgatgaacggctcctctccggaaggtacttcgagtccgggatcctgcgtgtcgagcgttcggaatttgtattcggtagaagtgagttccagaccgccttgtgtaaaacctgttgccacgatcgtatagtcgctcgacggaagcagactgttgtatgtgaaggttttggtttcggccggatcctgaacggtcgcttgaggcgttaccgtcgcggatttgatcgtataggtataaacatctacatttttcggcgtgatggtgaaagttacggtattggcttcggccttgacgtcggaaatggtgagcgtggcgctttctccgggaggcgggggcgtcgtttcgtcgtctttacaactctggaaagttcccaatagcaggatgcaacacagtaaatggaaggttgctttactcaaagatttcatagtcggattattttagggttgtttttttgataatttatgtgctcgatgttccggttgtgcctttgccgctgaaagcgacgtgttccaaccggctctcccttcgtcacggggaccccgtgcagcgaggtttcggacaggttgggagttctgcgtgtttgtttatttgattgctttttatttggcgctcgtggtcaataattccgaagtgaccggagccgacattttcccgttgttatcgaccgggatgaggaccagatagctttctgcgaaatagtagtcggtggagaacgtcgtgtcttcggtggcggcacggtattttacgccgttttgtttgcagatcgtttcaccgagattggctgctgcatcgtaggctgttttttcgatcattgcgtaatagtaacctgcgcaatcggctccgggggttacggttaccgaggcatagaaagatacgccgtaattgtccgtgatcgaatttaccgcgatggtcgccgtcgcagagccggtagcttcgtagccgagggtttcgaactcgaccaccgtcggaacgccgtatctgtcttcgttgtcggcttcgggcagggcgatcagtacgtattgcgtatcgtatgccaaacgggatccgttgatgtcgttgtcgctgtatagcgttatcggataaccactctctttgccgatcaactctcgttgaacgtatgtatccgcattgccgccgtatttgcggtcgaaatcggctttggtgatgaagttgtaataagctttttcgaagccgttccgtttgacggagaaagtcgctgaggtgaacgatgcggtcttcagggcaatatcgaccgtgagcgacgtatcgtagtcggtgcctgcggcttccgtgtggaactccttgtattgcaggggacccaacttgccttcggcatcgtatgcgaacgagaagaagtaatattcgctgcccggcgaaagccggtctgttttccaggtgccttggaagtcggccgtgatgtcgtagtcataggtcttcgcatccagtccggcctggacgaattgttccggggtgcctgcggcttcgacgtcggacttggtcgcatagccggcatagtaggaaacgacgccgtcctgttttgtcagggcgatctccaactctttgcccgcaacctgcggttcgcccagcgtgacagcggcctgtcctgctccgagttcgtcgcgggcggggatcgtcagcggaatttcgatgatttcgccgtagtcttcacagacgacatcgaccccttgccggacaacgggagcggcgtagagaaggacttgctgcgaccgggtcgaaagcagggttttgttccactcttcgaacgaggcggttttgaggcccgctgtcagtgaggcgacttcgaggtaatggatgaactgctcccgggaatcgaccttgaaatgctcttcgaaatcggcgctggattccgtaaggtccgggtcgaaaattttcaggaaatagagcgggaatttgccggtgtccacgtcggccttgagatagattccgtgtgcggtcgccacggcgtcgatccgtgcgaatgcggtataggcgggggtcgtgaacgaatgcgtggcgggttcggacggttcgtctttgccgttataggctacgactgtcaatacgtagtcggtttccgcctggaggctgccgaccaggaaggtcgattgctgtggcttttcgacgacggtcatttcggctgttccgtcggggacatcgaccttgtaggcgatccggaccgcattgtcgagtttcagggtgaagcggatcgaactgtgggtcgtagcgacctcttcgatcgaaacgacggcggggccggtcggaagggcttcggttttgaatgcgtgggtgacgggatcggcggcctgcccgttttcgtcatatgcgacggcggtgatttgatagtcggtcgccgcctccaggttgtcggttgtataggtgccgccttcggagccgtttacgaacgtaagttcggccgttccgtcgggaacatcgaccttgtagccgaagcgggctgcattggcggttttcagggtaaaggttaccgaattataggtggctttcacctcttcgatggagatggttgccttgtcgggatccggcgtggtcggtttttcgggggtcgtgaatgttgcggtggccggattcgaagggcgctggtcggcgttataggcgatcgccgtcagcttataagaggtttcgggggtcaggtcggttatttcgaccgttttttcttcggagctttctatcgaaacgaaatcggcgtcatccccccccctcgatctcgatcttgtaagccatcgagatagcattggtcggaattaatcgaaaagaaacgttgtctgcttccggggagagctctgcgat

SEQ ID NO: 10404 - DNA, 59844 bp, Unknown
  gut microbiota DNA sequence
cctggttcactccctgcctccctttcttttagctaacctcttctctacaaaattaccaactctatctcatctcctgtttactgcgcaaatctaaggtattcggtacgatttaattccttacgaaaacaaaaatagggattttttcttaactttggattttcaaccgacattttcaccggcaggcgggttcccggatttcgaagccacgccgaacacggaaaacgaccggaaaatcccgtgtttccgacaaacggaagcgaaacggctgcccggagcgtcggaaaaaacgaaaaaacagcccgacggtgcccggcgacgaagacggggcggattcaccctctccgccgaaccggaaccgacaacgacacattcaaccgcaatcgcaattatgaaagaaccgctgaccatcgccctgatctacgatttcgacggcacgctcgcccccggaaacatgcaggaatacgacttcatccccgccgtcggcaagagcaacaaggagttctggcacgacgccaaccaactggccgaggagcaggacgccgacatggtgctgacctacatggcccgcatgatccaggaggcgcggtcgaaaggcctgtccctgcgacgcgaagcgttccaggagtcgggccgccgcgtgaccctctacaaaggagtccgggagtggttcgcacgcatcaacgcctatggcgcagcgcggggcatccggatactgcactacatcaactcctcgggtctgaaggagatcatcgaagggacggaaatcgcccatgaattccggcggatctacgcctgctcgttcctgtacgacatcgacggagtcgcctattggcccgccgtagcggtcaattacaccaacaagacccagttcatcttcaagatcaacaagggcgtcgaatcggtcttcgacagcaagctcgtgaaccagtacatcgaggaggacaagcgcccggtacccttccggcgcatgatctacgtgggcgacggtacgaccgacatcccctgcatgcggctggtgaagaactccggcggacattcgatcgccgtctataaccccgagatccgaaacgcccggcgcgaactgaacggcctgatccgcgacaatcgcgtaagccacgtctgcccggccgactactccgaaggttccgaaatggatacgctcgtcaagacgatcatcgacaagatcgaggcggatcaccggctggagctgctcgaaactccccgcacgtagcacaaaggaatccgttgcgattcgacggaaagccatcacccgggttccgcaaaaacacacagcacacgcaagcaatccgaaatgatccggaaattcgacgaaaccgaacaatacgatacgtctatgaaaatcatctttgcaaccaataacgcccacaaattgagtgaagtgcaagccgttctcggcccggatttcgaactcgtcacaccccgttcggtcggcatcaccgaggagattcccgaacaacaggacaccatcgcgggaaacgcttcgcagaaagcccgctacgttcatgaccgcacgggctgcgactgcttcgccgacgacacgggactcgaagtcgaagcattaggcggtgcaccgggtgtgcactcggcccgctacgccaccgacgggcacgacttcgccgccaacaacgaactcctgctccgcaacctggagggcgtcggcaaccgccgggcccgcttccgcacggtcatctcgctgatcctcgacggcgaggagcacctcttcgaagggatcgtcgaggggcacatcgcccagtgcgcttcgggctccgaaggcttcggctacgacccgctcttcattcccgaagggagtgccaagacctacgcagaaatggacccggcagagaaaaacgctctctcgcaccggggccgcgccgtgcgtaaattagcggaatttttgcataaccgggggaaataagctacctttgccccgcttatggaaatgaaacgataccaaaaggaggagaacttctcgcccgagaagatcgcaaaactccgcgaacactataaggcgattctcgaactgctgggcgaagacccggcacgcgagggtctgctcaaaacccccgaacgggtggccaaggccatgtcgttcctcacgcagggttacgaggacgatccgttggcgatcatccgctcggcgaccttcaaggaggagtaccggcagatggtactggtgaaggacatcgaattatactcgctctgcgagcaccacatgctgcccttctacggcaaagcgcacgtggcgtacatccccaacggatacatcacgggcctttcgaaaatcgcccgcatggtggagagcttcgcccgccgcctgcaggtgcaggaacgcctgacggtgcagatccgcgactgcatccaggaagccctcaacccgatgggcgtcgccgtcgtgatcgaagccagccatatgtgtatgcagatgcggggcgtcgaaaagcagggttcggccacgactacctcggcattcaccggagtattcctctcgcacccgcctacgcgccaggagttcatgacgctgatcagcaacaaataccggtaaaataacgacggccgtccgctggcgacggcctgcatccgatagaaaaacgcccgatcgtcgggcgttttttatttttgcgtttactgcttcatcagacctctttaggagcgcagcgccccgagttccttcctaaaggaggagccgaattacagatgcggcgcaggtccgcgaacaagcgcccccggattcggcgctgcaatcgtcggataagaatgtacatcgaaagatatgattgcctttatttcagccccggaggggaggtatggcagaattcctcacaagcggcgtcagaacagctccaactggtcgatcccggcattgaacgtcagccggtggtggggcgtaagcccgtaacggcggatcgccaggcgatgttcgcgggtcggataacctttgttgcgctcccaaccgtattcgggaaaatccccggcgaggcgctccatatattcgtcgcggtgggtcttggccagcaccgacgcggcggcaatatccgcatatttgccgtctcccttgacgatgcagcgatacggaatgtcgagcgtcgtgcggaaccggttgccgtcgatcgccagaaatcccggacggatcggcaattccgcgaccgccagcgacattccttcgaacgaagcgttcaggatgttgatctgatcgatccgctcggcagaaacggcctttacgacccaggcaagggcctcgcgctcgacgatcgcacgcagcaaatcgcgctgacgcgcggtcatctgcttcgaatcgttcagcaacgggtggctgaagtccggaggcagcatcaccgcagcggcaaaaacaggccccgcgaggcacccgcgccccgcctcgtcgcacccggcttcgggcagctctttctggtagcaattctccaacatccgaaacaaagttattatcgcacgatttcgatgcccccttcgaaaaccgacaagccagcgccgatctccgcaaaaacaagggaacccggggtgtgcgccgaaacgcttcggacctccccgaaataccgcacgcattttcgcaaaattaaaaatatcggcaatcatatccaattttacaccgacgtttcgatcaccccggatttgccggagcctccccgaaattcctccgaaaagcaggaggcaggcttcagtacggaaccgtaactaccgcccaaggcggcagacaacggccgttcgaggcaaagtcccgggaccagaaacagatccggaataaaatcgtatatggttccaaaataattacggtttcgtccgcttttttcctaattttgtagccgggattatatactccaatgtacctttgggggagtgttgcgccccgagttccctccgaggaggaaatttaggggagggcagccttacaggcgcggcttcggaccacgaataagcgcccctcggattcggcgctgcaatcgtcggataagagtgtgcatcgaaagatataattgcctttgtagcggccgtttccgacaagcgaacgcaatgctgaattttcggcaccttgccgggaacagaaaccgcagcccgcattcggacaaaaccatcgtcgaaccatgaaaccggacattatccgccaacccttactgctggccatcgcgtccatactggtcgtcatcgcagccgccatgacgaccgggacaactatttcaccggctccggaaacgatgatttccaccccgctgggtgacctgatcggcttgttccaggaacgattcccccgctgctcccgcatcctttgcggcggcctgctcctactgacgggcattctctgcgggaggctggcggtccgctacggactctaccccgtcagcagtacgctgaccatccccctgtacggactggtcgcctgcggaatccttctgggtcgggagtatctgacggaatccgtcgcagcgttcgtcctgctgttatcgacccagaacttcttcgcctgcttccgcaacggctacgcgatcggagccgtgttccgggcttcgtttttcctggggctgctgccgctgctctatgccccgctgcttcccctgccgctgttggtcctggccgcagcattctgcttccgacggaccttgcgcgaagtcttcgtatcgctgtgcagcgtcgtactccctttcctggccgtctgctacatcgcctgggggcagggagccaatcccctggatacccccgccggattatggcactccttcgtcagcgacagcggataccggattttcgccaatacgcctccgctcgtccccgcacttctcggaatcgtccttttcatcgtactctgcgccatcttcttcggactcatcagtttccgcacggtaagcatcaaagcccggggcatgctgacctacaccatcctgctctttacggtgacgggctgcctgatagcggtaccgagcgtcacgccgggactgctggccgtcgcagccgtacccgcagcactgctcatgcccctgaccttcatccgcatccaacgtaccgtcggaactctgctgtatctcattttgtacatcacttgcattgtaaatatattgcaataaaaaacgcgtaaaatgttgaaatagtatatattttaacattttcgatctaattttttcctattttaatttgaaatatacaaccttagattgtatatttgattcataatcttcgataaaaggctatggacaccggccttcatcgagccataaaatcttccgattatgaacgaatcctacgacacccaaaccgttaatccgtcgatcgaaaagtatgtatcggcctccaacaacggcatcgaaacccataagttcacccgctgcgtgatcggatatatcctcaacggagaaaaatacgtctattacgacgataaatgctacaagttctcccagggagatcttttcttcctcggtatgggttgccactataccaaaaacatccccgcgcagggacatccctacgaacagatcctcgttcgctatacctcggaagagctgcaacgcatcctgctgcacctcaacatcgcctacaagctgaatatcaccaacaaccaccagtgcgacgactgccgtaccctgaaccacgccacgatgccgggctggagttcgatccggcgttttttcagccacatcgacgattgcctcacggaaggatcgctcctggacgacccgaccgccgaaaacctcaaaatgaccgaactgctctacctgatcgtttcgcacggggattgttgcatcaaaagcaagctgctgggcaacgtcgatgcggcccgggacaacctccagcaaatcgtctattccaacatcttttccgatatttcggtcgaggagatcgcaaaacgctgcaaccgctccctgacttcgttcaaaaaggaatttttccgcatctacgggacctcgccccaccaatggctcatccggcaacgcctgatccatgcccggttgcttctgatctcgaccgacaaggcgatcgccgaaatcggcaccgcatgcgcctttcccaacacctcgcacttcatcaaactcttccgcaaacaatacggcatgacacccgcgacctaccgcaaccggcatcgcggacccgaagagttgcagccgacaccgcaagccgaagccgccgtacgggaaacagccgtttcggtaacggcgtaacctcatccgacccgacccgcaaaggcatgcttccgcctctgcaaaccgtcctctcccgcacctcggggacggcgtggttcgcttcgggccaccgccgcgaattttccggcggcaggacaccgattcggataaaatccttatctttgcgtggaatccgttttccgtatcgaccggccgcatttcggcacgattcgaacgaattcggctccgcgtccgaccttcaccgtcccggacgcgccataacgcatacgccatggaatttttcaatcgcatcatcactcattacggctgggaaggcacggccctcgcgggcgtccttctggtcatgttcgggatccagttatattactacctgttcgtttacgggcgcatacccaaatacaaggacacccggcgtccggagatcctctccgaaacccctccggtatcggtggtgattcccctcttctcggaagattacgccttcgtggaggagatcctgccgctcatcgtcgcccaggagtaccccgacttcgaagtggtgatcgtctatgtaggccgggacaccgacttctacgacgacctggtccgcatcaaacagtcgttcccacagattacggccaccaagatcgaactgaatccccgcttcccgatctcgcccaaaatggcgctcaacgtcgggatcaaatcggcccattacgagcaccttctcttcaccacaccggacgtgtaccccacctcggaccgctggctctcgctcatggcgaacggcttccggcgcggcgaaatcgtgctcggctactgcggcatggagcgcgggaaagggtttgcgagctacctgatccgcacctggcggatgatgcactcggtggactggatctcaagcgccgtatgcggcagaccctaccggggcatgcgccagaactacggattcaccaagcggctctatttcggcgccaacggcttcagccacctcaatatgaatatcggcgaagacgatttgttcatgtcgcggatcatcgcccccggcaatgtcagcgtggtcctctctccccgcgccaccctgcgtgaaaagagctggggagggctcaagtggtggatcggcacccagcgtttcttcgggggagccattcctttttatcccttgtgggtcaagaacttcatccagtgggaactgggcagccgcattctcttctggctggcggcgatcgtcgccctggcggtgatgccctgggaattcaagatcgccgcaggggtactgctgctcgcgcgttttgcgatcgtactcgtcgaggcgcggcgcatcagccgccgcctgggtgaagagaaaatctgcggacgttacttcctgtacgacctgctgagtccgtttttcgccctgctgctggggctgttgctgctgcgcaaagacgagcgggtatggagatagccgactatatcatagccgacgaccgggtgctcgtggagctggtattgcagggcgacaacatcgccttcgaataccttttcgagcgttacaaggaggctatacaccggcttttcatacagcgcaccaacaaccccctggacgccgacgacctgctgcaggaaaccttcatcaaagtctatatcaacatccaccgctacaacccggcctacaccttcggacagtgggtttacaccatcgcccggaacaccttcgtcgatttcatccggcggcgccaggaggacctgcccatcgacgacaaattcacggcaccgccctccaacaaccccacgcccgaagagaacatcatccgcaaacagcagcgcacgcagatcgaacgctacctccaggccatgccgccgcgctaccgacaactgatcgtcatgcgtttcttcgaagagtactcctacgaagagatcgccatgaagctcgaactcccgctgggcaccgtcaagacccagatccaccgcgcccgggagcagatgtgccgcctgatcgccgcagatgaaaaatcctgacgtttccgaccggcgaacgccgcagaacgaaccactccgacctgcctaaaaaaaacttcaacgcccacaaaccttatgattgccctgatcgacaaatacttccccgacctgacccgcccgcagcgcgggcaattcgaagcgctgtacgcactgtacgccgactggaacaccaagatcaacgtgatctcgcgcaaggatttcgaccaactttacctgcggcacgtgctgcactcgctctccatcgccaaggtctgccccttcgccccgggagcgcgggtgctcgacgtggggtgcggcggcggcttcccgtccgttccgctggcgatcctcttccccgaggcgcatttcacggccgtggactcgatcggcaagaaaatcaaggtcgtacagggcgttgcggagggactcggcctcgccaacctcacccccctctgcgcccgggccgaaacgcttcccgaacggtacgactatgtggtttcccgcgccgtgacggagatgccgaccttcgtcggctgggtctgggataagatcgaccgggggcaaaagggcgccctgcccaacggcatcctctacctcaagggcggcgacctcgcggacgagttgagccgtaccggtatgaagtggacggagtacccgatccccgcattcttcgacgaagcgttcttcgaaaccaaaaaggtggtgtacgccgccaaataaacggggattcacccgacgaccgttccgactgcctggccatgcaggaactgtaaaaggccccgcagacgaaagacaggcccgattatgaaatcgtaccgtcccgatttttcggaatcgcaactcaaggcctctaccaccgggaaggggcgagaagccggaacaaacgacccgaatgccgcgaaacggcagtagccgacagcggaaaaccatccggcaacagggaaggcaggaagaacaatgctaaaaattcagaaattcaaacgacatagccttatgaaagaaacagtactggtaacgggcggcgccggatacatcggatcgcacacggccgtcgagctgatccaggccggattcgatgtggtgatcgccgacaacctctcgaactccgaccttcaggccgtggagggcgtccgccgcatcacgagcgccgaagtgcccttcgagcagatcgactgctgcgacctgcaggcgatgcgacggctgttcgaacgccacgaattccgttcggtcatccacttcgccgcgtcgaaagcggtcggggagtcggtcgccgaaccgctcaaatactaccgcaacaacctgctttcgttcctgaacgtcgtggagctgatgtgcgatttcggacggcccaacatcctcttttcctcctcctgcaccgtatatggcgaacccgacgcccagcccgtcaccgaacagacgccccgcaagcccgccacgtcgccttacggcaacaccaaacagatctccgaagacatcctgcgcgacgccgtcgccgcccatcccggtctgcggggcatcgccctgcgctacttcaacccgatcggctcgcatccctcggccctgatcggcgagcttccgagaggcgtcccccagaacctggtcccctatgtgacgcagaccgccgccgggatccgcgaatgcctgagcatcttcggcaacgactatccgacgcccgacggcacctgcatccgcgactacatcgacatcgtcgatctggcccgcgcccacgtagctgccctgcaccgcctgatcgaagagcgcggcgccaccccttacgaggtcttcaacgtcggcaccggacggggcgtttcggtgctggagctggtccgcggattcgaacgggccaacggactgaaactcaactaccgctttgcgccgcgccgcgccggagacatcacggcgatctgggccgatcccacgctggcgaacaccctcctgggctggcgtgccgagcggccgctcgaagaaacgctccgcacggcctggcaatggcagctgcacctcggacagagataaccttcccgccgacagaacatattgcggagagcgcatccggagccgttccggatgcgctctccgcatactcctccctcccgttccgacatccggccccggctggtccttcgcaccggaccgaccgcctcccctgcgcctgcaaaggcttttttcatctttttcgcaacagaaaggagaagcgattgatattttttgtatttttgcatcaattgggaaaataatgaacttaaaatgccgaaattgcatgaagagaaggtaaacgtcctgaaaaaaccggaatggctgaaaatccggcttcaccgcaccgcagaatacgcggacgtgcaacgcatcgtcagggaccactccctgcacacgatctgcagcagcggtctatgcccgaacaaagccgaatgctggagccgcaggacagcgaccttcatgatactgggtgaaatctgtacgcgcaactgtcgattctgcgccaccctttcgggccggcctctgccgcccgatccttcagaacccgccaaactcgccgaaagcgtccgtttgatgggattgcggcatgtggtggtaacctccgttacacgcgatgacctgcccgacggcggcgcggcccactgggccgaatgcgtccgcgcgatccgggcggaaaatcccgacgtcacaattgagctccttattcccgatctggatgcgaaacccgacctgctggacacggtgatcgcctccgggcccgatatcatcgggcacaacatcgaaaccaccgaacagctgacccccctggtgcgttcgcgggcccgttaccgtacgagcctcgacgtgctgcgctatttaagcgaaaagggcgccgtcgccaagagcggcctgatggtcggactcggtgagagcgatgaagaagttttacagaccttgcgcgacctgcacgccgccggcgtggagatcgtgaccctcggccagtaccttcgtcccactctggagcatcaccccgttgcggcgtacattactcccgaaaaattcgactggtaccggcagcaggcgctcgacatgggcttcagctactgcgcgagcggtccgatggtgcgttcgtcgtacctggcagacgaagcgctcggctcggtgcgtctgaagcgacaggtttccgcgaaagcctgagtcttcccgccgcgcgggaaaaggtctgcgacaaagaaagtgttgaaccgacgctttccggatttacggtatccgtacggagccggacggagaggtgtcgtaacgtaatttacgatgtttgtcgaataccgggacctcggacaaatggactacaaagcctgctgggagtaccagcagaggcttttcgacaccctcctgcgggccaagggaaccccggcggagggcgcgggctatttgctcctggtggagcatccggcggtctataccctcggcaagagcggccatgcggagaacctgctggtcggcgaagagtatctgcgcagcatcggcgccgaattttaccacatcgaccggggcggcgacatcaccttccacgggccgggacagatcgtgggctacccgatcctcgacctggagcgcatcggactttcgctgcgcgactacatcgacgcgctcgagggcgcagtcatccggacggtagcccgttacggcatccgggccggacgcatcgccggcgcctcgggcgtctggatcgaaggagcgcagccggcgcgtaagatctgcgcgatcggtgtgcgggcgtcgcgttacgtgaccatgcacggcttcgcactcaatgtggcaaccgatttgcgttatttcacccatatcaacccctgcgggtttacggaccggggtgccacgtcgatcgaaaaggagatcggtcgcccggttccgatggaggaggtcaaacgacgcctcgtcgaagatttatgcgagaatttgaatgttaaaatatataaataataacaaatatgcccatagaaaaacgatgggtagtgaagcctcaggggaatccggaggcggttgccgcgatggctgccgcgacgggcatctccccggtcctggccaatctactcgtacagagaggcatagacacgttagagaaggctaagaaatttttcaacccccagctttcggacctgcacgacccgttcctgatgaaggatatggacaaggcggtcgaacgggtggagcgggccgtccgcaaccgtgagaagatcatggtgtacggcgactacgacgtcgatggcacgaccgccgtcgcgctggtttataaatttctgcgccagataggtcacaaggacctgttgttctacatcccggatcgttataccgaaggttacggtatctcgaccaagggcatcgaccacgccgcacgcaagggtgcgacgctgatcatcgccctggactgtggcatcaaagccatagagaaagtggactatgccaaacgcaagggcgtggatttcatcatctgcgaccatcacctcccggccgaggaaattccccgcgccgtagccgttctcgaccccaaacgcgccgactgttcctatccgttcgacgaactgtcggggtgcggcgtgggattcaagctagtgcaggcctactgccagaaaaacggaattccgttccagcaaatcgagccgttgctcgacctgctggccgtcagcatcgcctcggacatcgttcctctggtggatgaaaaccggattttagcccactacgggcttctgcggctcaacgcctccccctcgaaggggctgctctcgatcatcaagatctgcggcctggatcgacacaacatcaccatcgacgacatcgtcttcaaaatcggaccccgcatcaacgccgcaggccgtatgcggatggacgaaaacgacgaaaacgccgctccttcgggcggctatgcggcggtcaatctgctgatcgaaggcaacgaaagcctggccgaagagttcggctcggtgatcgacggcttcaaccaggaccgcaagtgcatcgaccgcagcgtcacgcaggaagcccacgacttcatcgaggcccacgcggagctgaaggccgccaagagtacggtgatctacaacccccgctggatgaagggcatcgtgggcatcgtggcctcccgcctgatcgaaacctactaccgcccgacggtggtgctcacgatgagcaacgggttcgtcacgggttcggcccgctcggtgcccggcttcgacctctatcaggcaatcgaatcctgttcggacctgctggagaacttcggcgggcacatgtacgcagcaggactcacgatgcgtcccgaacgggtcgaggagttcacccgccgcttcaatgcctacgtcgaagagaacatcgacccgataacgctgcaaccccaggtggagatcgacagcgaactcttcttctcgaacatcaccccggcgttccgccgcgacctgaaccgtttccagccgttcggccccggcaaccccgcaccggtattcgtcacgcggggcgtggtcagccacggcgaaacgaagctcgtcggcgccgactgcgagcacctgcgcatggacctgatgcagcgccagaaacccaacacgacgattcagacgatcgccttccagcagccgacccactacgagtggatccgcgcgggacatccgatcgacgtctgctatcagatcgtagagaaccactaccggggctcggtttcggtacagctccgcatcaaggacatcaaacccctgcggagcaagcaataatacggccggcaacatccgtaaaaaccggagctttcaggctccggttttttacggatcccgcccgacgacaccggcggcggcattccgtccgaaccactccttcccgctcccgaaacgaaaaaatccgatacaacaaagtcgggttttagtttctaattattagaaaaatcactacatttgacacaaaatagtaattgttagaccttttctacccaatatgagtaaacccttcaagcgttatctcgtcacctcggcactgccctacgccaacggcccggtacacatcggccacctggcgggcgtctatatcccgtcggacatctacacgcgctacctgcgcctgaaaggatacgacgtgatctcggtctgcggcagcgacgagcacggcgtgcccatcaccatcaaggcccgcaaagagggcgtcacgccccagcagatcgtcgatcgctatcaccagttgattaaatcgtcgttcgaagggctcggcatgtcgttcgacatctactcgcgcacctcgtcgaagacccacgccgcgacagcgtcggagttcttccgcaagctctacgacgaaggcaaattcatcgagcggacctcggagcaatactacgacgaggaaacccagacgttcctcgccgaccgctatatcgtgggcacctgcccccgctgcggcaacgaccgcgcctacggcgaccaatgcgaaaaatgcggatcgaccctttcgccggacgaactgatcaacccgcacagcgccgtatcgggttccgtacccgtgaaacgcgccaccaagcactggtatctgccgttggaccaatacgagggtttcctgcgcgaatggatcctcgaagggcacaaagagtggaaaaccaacgtctatgggcaatgcaagagctggctcgacggcggtctgcaaccgcgtgcggtgagccgtgacctggactggggcattcccgtaccggtcgaaggggccgaaggcaaggtgctctacgtctggttcgacgcgccgatcggctacatctcggcgaccaaggacctgacgcccgactgggagaaatactggaaggacgaagagaccaaaatggtgcacttcatcggcaaggacaacatcgtcttccactgcatcgtcttcccggccatgctcaaggcgcacggcggctacatcctgcctgaaaacgtccctgccaacgaatttctgaacctcgagggcgaaaagatctcgacctcgcgcaactgggccgtctggctgcacgaatacctggccgacttccccggcaaggaggacgtgctgcgctacgtgctctgcgcgaacgcccccgaaaccaaggacaacgacttcacctggaaggacttccaagcccgtaacaacaacgagctggtagccgtgctgggcaacttcgtaaaccgggctttagtcctgacacacaaatacttcgacggtgcagtgcccgcctgcggcgcactgacggactacgaccgcgaaacgcttcgggaactctccggcgcgaaggaagccctcgaaaacaacatcgaaaactaccggttccgcgaagccttgaaggaggcgatgaacatcgcacgtctgggcaataaatacctggccgacaccgaaccgtggaaactcatcaaaaccgatcccgaacgggtcaagacgatcctgaacatcgctttgcagatcaccgcaaacctctcgatcgccatcgaaccgttcatgcccttctcggcgaagaagatcgtcgggatgttgcaggcaggacccttcggctgggagaaactgggcagcaccgacctgctcgctgccggacatcggatcggcgaagccgtgcttctcttcgaaaagatcgaggacgacgtaatccaacgccagctcgacaagttggcggcgaccaaagcggcgaatgcttcggccgaagcagcacaacacgttgaagatcaaaaggaaacgacgactttcgacgattttcaaaagatggatatccgtgtttcgacgatcctcgccgctgaaaaagtcgccaagacgaaaaagctgttgaaactgaccgtcgatacgggcatcgacaagcgcgaaatcgtttcgggcattgccgaatactacacacccgaagaactcgtcgggaaacaggtactcgtactggtgaatctggaaccgcgcgaactgaagggcatcctctcccgtggcatgattctgatggcccaggacgcttcgggcaaattaaggctgttacaacctgacgatcagacaaatccgggtgcgacagtcggataataaagatatttcttgaacaaaagatacaacctttaatattaaaaaacaatggagaacatcgattggggctctctcggcttcaactacatgaagaccgatttcaatgcccgctatacttgcacggacggcaagtggagcgaaatggaaattacaagcgacgagtacatcaacatgcacatgtcggcatcctgccttcactacggcacggctcttttcgagggcttgaaagccttccggggcgctgacggcaaagtacgtctgttccgcgtcgaagagaatgcaaaacgcttgcagtcgtcggcaaaacgcctctgcctgcccgtaccgacgatcgatatgatcgtcaaagcctgcgtagaagtggttaagcgcaacgagcgtttcatcccgccctacggcaccggcgcatcgttctacctgcgtcccgttatgttcggaacgacggcaggactgggtgtaaaaccctccaaggatgctttgctggtggtttacggctcgcccgtaggcgcttacttcaaaggcggcatcaagccgatgaaggtcgcaatcgaccgcgaacaggaccgtgctgctccacgtggaacaggcgacgtgaaggtgggcggtaactatgcagccagccttatgtcgggcgagcacggacacgagctcggctatgcgagcatcatgtacctcgacgcaaccgaacacaaatacatcgaagagtgcggtgcagccaacttcttcggcatcaagaacaacacgtatatcacgccgaagtcgaactccgtacttccgtcgatcactaacaagagcctccgtcaattggctcaagacctgggtctgaaggtcgaggagcgtcatattccggtggacgaactcccgactttcgaggagtgcggcgcttgcggtacggcagctgtcatctcgccgatcggcagcatttacgacatggacacgaagcaaacctacacctacggcgacgaagtaggcaaggtttctctgcaactctatacgcttttgcaggacatccagtacggccgcaccgaagacaaacacaactggtgcacgatcgtcatgtaatcgacgcctgcaaaactcaagaaaaaaggatgttccacgtggaacatccttttttcttactgcatattttctttgccaccacttacaaacagccgtaaaaaaatcgggaatagccgcagctactcccgatataaaagatagaaaaatacaatcgcacaatttatcgaccgatcttaatccgcattgataaacgacaaatacatccaaaaacgattgtcaaatttgggaacatagcggttaaactgcattacccgatactttaccgaccgaatttcaccagcaacacattcacatccgccggagaaactccgggaatacgggaagcctgccctatcgtcgcaggtcggattcgggtgagtttctgccgggcttcgatcgtcagggcattcatcgaatggaaatcgaaatcggccgggatacggatattctccaggcgatgcaatttgtcggcaatgaatttctcccgttcgatataccccttgtacttgatttggatctcggcttcctcgacgacctcggcatccatctcctgctcgcgcagaaaatcgccgagcttcggtaaaacacccgagagcagatcgaaggtcacattgttacgcatcaacaagtcgtgcagtttccgaccttgcgaaatcgcgtcgcaaccgagcgatttcaaacagtcgttaatttcgtccggtttgacactcagtccgcgagcgaatgctacgagcgattctacgagtcgattttttttgcagaaactatcgtaccttttttgcgaaatcagcccgattttatatccgatcggagtcaatcgaatgtcggcattatcctgccgcaagagaatccgatactcggcacgcgaagtgaacatacgataaggctcatccacccctttggtcaccaggtcgtcgatcaataccccgatgtaggcttcgtcgcgtgccaataccagcggttcctcccccatcctgcggcgatgcgcattgataccggccatcaccccctgcgccccggcctcttcatagccggtcgtcccgttgatctggccggcgaaatagagtccgtccaccagcttggtttcgagcgaatggtgcagttgcgtcggcaggaaatagtcgtactcgatcgcataacccggacggaaaatatgcagatcctcgaacccctcgatggcgtgcaatgcctcccactgaatgtcccagggcagcgacgaggagaacccgttcaggtaatattcgttggtcgaacgaccctccggctcgagaaaaagctggtgctggtccttatcagcgaatgtgttgagcttgtcctcgatactcgggcaataacggggaccgatcccccggatcgtaccgttgaaaagcggcgaatcgccgaaacccttccgcagaatgtcatgcaccttcttcgaagtatagaccaaaaagcacggaagctgattctgcaccggatgcgtatcggcagaaaaagagaatttcgagggattttcatccccgtattgcggttccagaatttcgaaattgatcgtccgcgcatcgagtcgcgcaggggtcccggtcttcatccggccggcttcgaaacccatcgccacgagcgattcggtcactccgtgcgaagccgaatcccccgcacggccgccctcggcgtgcgaacgaccgcaatacatcatccccgccagaaacgtcccggcagtcaggatcacgcagtcggccgagaactccacccccatctgtgtccgaatcccgcgcacttgcggccgaccctcctccgcaggctgctgcccgaagagcagttcgaccgcagtgtcctgccaaagatagaggttgggggtattctccagcgtacgccgccattcggccgagaaacgcgacttatcgcactgggcccggggactccacatcgccgcccctttcgagcggttgagcatgcggaattggacagccgtaaggtcggtaatccgccccatctgccctcccaaagcatctatctctctgactatctgacctttagcaacaccgcctacggccggattacaagacatatcggccaacttggtcatgtccatcgtcacgagcagcgtgcaggagccgagccgcgctgccgccgaagccgcctcgcagccggcatgaccgccgccgaccacgatgatatcgtaatgtaaaaccatatctccttttccatgaattgcggaaaacaccgccgcccgtcaatccgacgaccgaccgccgcacggcaaagatacgaacaaagtcgcttatccgaaaaagccgaaaccgcacgcaacggcaactttcgcccaactatccgccgtccgacggcgaaagtcggatcgaaaacggcaacctcacggcaaaacgtcgccgcagcgccgaaaagatcggcaagcacgggctgtcccgccaaaaacggattctcccgcttccggcacactccggcgacccgcgcgggaaaatcccgaactttgtcagcattttcccgcaaaaataaacttctctccggcaaggagccgacaatccatgccgcccattccggaagaatacaaacgattaaagggttgcggacacaaccaacggccggatccgtccccgcacggcggaaacgcctcctacgaaagccgaatcttcgcagtccacctctcccggctaccgattcgccgcgcagcggacccgatcgacagcccccacaactgctgccgcagccaccgcagccggcacttcccgcaagcaaagtcgtccgcttcagtcccaacgaaggaaaacgcgattacagcgtcctttttggaggcgcagcgacccgaattcccctccgaagaaaggacttaagagagagtcggcattacagacacggcctccggccgcgaacgaacgaacgtcgaatgacggacattgaaatatacgattgccggggaaaatccatctttcttcgggaaccggttccaaacaaaagacgaatccgcccataaaccgccgtttcagcgtctttaacggcccatcctatcgtcgtgagaacgaccgttatggtatattcgaacgattttaaggagcatttcaggcgttaaaaatacatcctttcgtgaaagagttcgcaaccctgcggccggctccctctgcaaaccgtcttttcagcaccttgagccgcccatcccgccgtcgggaaagaaccgaccgtatgatatattcgaacgattttacgggatatttcaggcattaaaaataatcctgccgggaaagggacccgcaactccgcgaccgaatcccctcgcaaagccctatttcagccctttggacagctcatcccactgtcggaggtagcgatcctccttgcggtgcatttgagcgttcgcacggggtgtcttatccttctgtccgcacagatggagcaaaccgtgcaccaccacgcggcgcatttcggtcagcttcgcggcgccgtattcgcgtgcattgtccgcaacggtttccacgtcgatgaaaatgtcgcccgacacgatccgggcgcccttgcggtcgctgtaatcgaacgtgatgacgtcggtatagtagtcgtgcccgaggaactgccggttcatctccagcaggcgggccgccgagcaaaaaatataggtcacatcccccagttcatacccctcttcccgggctacgcggtccagccacacggccgtgagccgtttctgcggcaggcgataggtacagtcatcggtataatagcgtacggccatagacggttattttttgaagcaatccgaagcacgcatctgcactttgggcgacggtccgtaaataccgaacaccatcttgtactcgggctgcatggtcgtcacatcgacccccgatccgatcgttccgatctgctggttgcgggccaccttgtcgtccttgcccaccgtcacggaattgaggttggcatacgaagagatgtattcgccgtgggctatatagacgtcgtatttgttggtgatccggttgcgtttcacctcgacgaccttgccttcgtagatcgaaatcacctgcgcccccttcggccccgcgatctcggccatattgcccttgtagcgcttcaccccgccgccgaccaccggcagccgcagattcgaagtcttcgccgtaaaggtgttgccctccttgttaccccgggtcagcttgcgcagctcgtcgatcgccacgtcgagccgctgctcgcgggcgattttctgttgcagggcagctttttccttcttggagagctgcttgatgttggcacgcgccgcctgcgaatctttctgcaggcgggtccgctgcgtggtcaggctgcgcttcaccgaatccagcgcccgctgctgcccggtcagccgggtccgctcgacggacacctgctccgaaagcgtcacgatctgctccatctgccgttcccgcatggccgccacctcccgcagattggtgatgcggcgggccacctgattgaagtcgctcgaagagaagaggtaggtcagataattgttgtgtttgtagttgcggtatgcctcgcgcaccatctcggcatagcgccgtttatgggcgtcgagcgatgccgacagcccccgggccacgctgtccgtacgagctacctcgacctcgagcttgcgggcatcccgctccgtcacgtcgagcagctggttgcgcgaatcgatctgacgggccaaacggcgcaccgtctcctcggccgaagcacgtcccttcttgagcttcgaaatctcctgctcctcccgggcgatctgcttttcgaggtcggcgatcaaccgtttctgcgccgcgatctgctggtcggtattctgggccgcaagcgaccccacaccgagcagaaggaacagaaacaaaacgaccttcggcaaacggatgcacagcgtgcggaccgacttcgcccgccgcaggaaacgatacgaatggttcaaggcttgtcgcatagtcagggcttggatttgagttgccggatacgctcttcgatcgcctggggatcatcatatcccttctccagcgccttgcgccagtaggtttcggccatgaacttctccccgagagccgccaggatgtccccgtaatgcaggtagagttccggattctcgctgcggtcgaaagagatcgcctgctgcatcgttcgacgagcctcctgcagccgtcccagacggaacagcacccaggcataggtatccagcagcgtggcgttgttgccgtccagctccaccgcacgggctgccatggcaaaggcccggtcgagccggcggggatcccgggacgattcactgataaaataggcgtagttattgagcaccatcgggttatcgtagtaataatgcagcgaacggtcgtaagcctcgaaacaccggcggcggtatttgtcccgttccgaatccttccgtccggcctcttccagctgatgataggcgtcgccgatatatccccacacgactccgcgcagggagtccgtatcggcgtatttgagggctttcttatagctgccgatcgattgcgacaactttccggcatacccctgggcgtgtcccttgcgggcatacagctcggtatttccggggaaaacctcgagcgcccggtcgatatacagataaaccgaatcgagccgcttgcggtaagtttcgatgtcgatcaccgcacggtaatagtccaactggggaggctggtcagccagatgcagcttgtagagggtcagcgcctgctccagctctccggcattgatcagatgctgcgcatacagttcgacgacatccttatcgtcgggatagcggatcgcaagcgtcgagatcaggtcgttgagctgaaagaagttgtcccggtaaaaacggacgtcgagcgtcagctgccggaaaatgcggaccttttccgacaaggggagttcgtcaatttcgaaaagccttttcgacacggccagataagcatgcgaatcgttgcgcttgttgtagaattcggcgagcgaagccagcgccgggacattcatggagtcgatctccaacgcccggttatactcggctatggccaacgaatcctgtttggcagcaccgtacaggtcggccagaatcacgtggttttccgcttcgtaaggaatcgcctcggccatctccctggcttcggccagcgcacggtccaactgccccgtgcgaatcagcaactggcgtttcatcgcccccaacaaaggcattttaccgaaacgcatctcggccgaatcgagcatatcgatcgccgaatagggcatcccggcctgctggtacaggatcgccagaatacgaatgttgtcgggattggtcgggtcgagcgccgaaagccgcacgaacagcggacgcgccttgtcgagttctccctcagcaagcagtttttgcccgtaaagctgcccgtaccacttgttgagcgagtccagccggtaagcacgccgtgcccacgccgtaccctgcggatcgccgtcgggagtcaccgaagagaggcggaaccaggccggagcatacgcggaatcgagctccagggcctgcaggaacagtgcccgggccgccagggtgtcctctccgatcaagagttttttcacaccctcggtatagtattcggtcggtcgcagcgagtcgggccacgaggcctccgccgcaggtgcgggcaacgcctcctcctgcgggacgaaccccgtggagaaagccgtgcagagcaccagaatcgcaagcatccgcttcattgaaatcgttgagtttgtatcttcgttcttcgccggaagagtgcaatggacagacgcaacccctcccttcgtctgtcgggaaaacgtcggacaaccgcttttcgtattcccgcgaacgatacggcacttcatccccggaacatcccggcatccggcgggcgattgccgctccccgacccggggagcgtaccgcagcgcctaaagcaccgtatcgaactgatgcaggaaccgcacgtcgttctcgaaatagagccgcaggtccttcacgccgtatttgagcatggcgatacgctcgacccccatgccgaacgcgaacccggaatatttcttcgaatcgattccattggcctcaagcacattgggatcgaccatgccgcagcccatgatctccagccaacccgtgcccttgcagacgttgcagcccttgccgccgcagaggttgcacgacacatcgacctcggccgacggttcggtgaagggaaagtacgaagggcgcatgcggatcgtggcgttctcgccgaaaacctccttggcgaagtagaggatcgactgtttcagatcggcgaacgacacgccctcgtcgatatagagtccctcgatctggtggaagatgcagtgtgcgcggtaagaaatcgcttcgttgcggaaaacgcggcccgggcagatcacccggatcggcggcttctgccgctccatcgtccgcacctgaatcgacgaggtgtgggtccgcagtagcacgtcggggttcttggcgataaagaacgtatcctgcatgtcgcgggccggatgctcgggcggaaagttgagcgccgagaagacatgccagtcgtcctcgatctcgggaccctcggccaccgtatagcccagccgcgagaatacctcgacgatctggttggtcaccagcgaaatgggatgacgcgaacccagctcctccgcagaaccgggacggctcatgtcgggaatccgctgcgaggagtccccggcggcgtccgcaagttgcccccgcagggcgttgatccgctcctgcgtccggttcttaaggttgttgagcttctggccgaactcccgtttcagctcgggcgccacgctcttgaactcctccataagggccgtcagctcgccttttttccccagcatccggattcggaaatcctcgatctcggccgcagctttgggtttgaatgcctccacccgttcgagcagctcgttgattttatcgttcataacctaaagtttacgctttattttgtacttttacgcacggtttaataggcaaagttaataaaaatatcaggatatgaagcggaaaatcctctcttttctcgcggcgggaatgcttttcacccttccggcagcggcccagagcgtcggggtggtcatgagcggcggcggagccaaaggactttaccatatcggcgtattgcaggcactcgaagagagcggcattccgatcgactacgtgtcgggaacctcgatgggttcgatcatcgcgggcatgtacgccgcaggatattcccccgaagagatgcgccggatcgtcgcttcgggtgtggtcaaacagtgggtttcggggcgcatcgaccccagctacctgccctactaccgccgcaataccggcaccccgatcttcctctcgatccgcctcaacatgaaggaccacccggacgaccccaacgcgagccgtttccgcctgccttcgtacctgatctcctcgaatcagatcgacctggccctcgccgacctgttcggcccggccacgacagcttcccggcgggacttcgacagcctgatggtgccgttcctctgcgtggcgagcgatatgaacacccgccgtccggtggtgctgcgcaagggcgacatgggcgaagcgatccgttcgtcgatgtccattccgctggcgttcaaacccatgaaaatcgacacgatgctactctacgacggcggcatctacgacaacttcccctgggaacccctcgacaaggagttccatcccgatttcctgatcggcagcaaatgcacgtcgggaaacaacgacatcacggagaacagttcgctcgtcgatcaagccttctcgctggccatgaacaagaccaactacgacatgcccgaaggacgcagcctgatgatcaaccgggccgtcaatgtcagcatgctcgatttcaacagcgccgactcgatcatcgaagcgggctaccgcgacgcactggcccggattccggccctgcgggagaaaatccaccgcaccgtcacgcccgaagagatccgcaccaagcgggcggctttccgcgaaaagtgtcccccgatcatcttcgacgactacgagttcgaaggactcacccatgcacaaacggcctatgtacgcgacgtcatgcggctggacgacacctacgacggacggcagcggcagatgagtttccccgaattccgcgacgacttcttctccgtcataggcaacgacgaattttcggtcgaataccccgaattccggtacgacccgctgcgggaacggtattcggtcaagctgaagatgtccgcacgcgaaaacctccggttcctgatcggcggcaacatctcctcgacggctttcaaccaggcattcatcggtttcgactaccacacgatccgccgcgtgtcgcaatgggctttcgccggtatttacatcggcccgacctatgcgaccggttcgctgggcgggcgcacggacttctacctttggaaacccttctcgctcgactattcctacaatttcgaagtcctgaacctgcggcacggcaacttcggcaacctcacgccgatcgataacaccgaatcggtcaagaacaaccagggattcctctccatcggactcaccatgcctctgacacacaacagcctggcatcgctgcggttcaacggaggacaacaagcctaccgctacgacgccccctttcccgacacggatcccgacaccgacctgacgcgcttctccttcttcagcaccaaactggatatcgcccgcaacacgctcgacaagattctctacccgcgccgggggtccgaaatatccctctcgggcatctacatcacggggcgcgaacggtacaaacccgccgaattcggacgtaagcgaagtttcaatgcccaccgcgaatggttcggcgccaaattccagtggaaccgctatttcgacctgcccggctgcaaatggttctcgttcggattcaacatcgacgccgtctggaccacgcacccccggttccagaccgaaacggctacattgatgtcgctgccggcctatcagcccgtcgtacactcccagatggctttcatgcccgactaccgggcgaaaaacttcctggccggcggtctgatgcccactttcgatctgctgcccaatttcttcctgcgcacgggattttatgccatgtaccgcgacaaccgggggctgcccggcgaaaagatgcaatacatcaccgaagcctcgttcgtctatcacacgcccatcggaccggtcagcctgtcgctcaccaaatacgacctgaagagctggcacaatatgtacctcactttcaatttcggctacgcgatcttcgctcccagcgggcatttctattgattatttcccagtcgccctattcccgaaaggccgtacgcaaagcatccggtaaaaactcaaacgggtcaaaccggaaacagaaaatccgccttgccgcatgatgcaagtcgaatcataaaataaagagggctgcgcaatgcagtcctcttcataatgcaagctaaatcagtcgtaaccgatcgccgcgaattttcagtcctattttcccgaaattattttggcacgttcataatcttcgttggtcagaatatacgtccaacgcgcccggcggggcgtgaactcttcgtaaatccactgccccggatcacaaatctgccgggttttgaaacgctgcgtaaaatccgaatacttctcctctattcccgatggaaatctaacaggcccatatttgtcatcgacatcgtaatagacctccatctccgtaataagaggagaaaaggtggtgataagacccggtacatccatagaccaattagatgttacgaatctgtttgtatatttttttccgggatctacaagcccattcatatggtctataaattcatcgttttttgtcgggcaaaacgtaagagtgaagtaaattttgtggtcactggcattgcacaaacaaaaataggtgtaaaaagtatctggatcggaattttcctgagaaatctgcgtatcgaaatcgacattcgcttcaatatattcagccgtcggatctccctcgaattccggagcgggataataattatcgtccttatcgcatccggtcgttgcaaccaatgcgacaaacaacaaaaaataatgaattattattttcatagcaaaaataatttatagtttataatcaggccattggtgactatcttcgacattgtaaatataaccaaaacatccacgacatccaaataaatcgaacgcgaaccatccgataccgggacaaacttttacacaacaacttccggagaagatccatatccggcgaaataatcgtcggatttccccaactgataccgaaacctgccgcatcgttcccatcccgacaattcgaattccgtcccggtacaaaatggcgggggcgcaccgctgtcggtacgccccctggcaagcaacaattgtttaactaataataaccctccaaattactacttattatttgcctgctccggttgtgttttctgactctctgcagcggcaggaatctcggattccggcgttacggcttcgatctcgacagcctcgacctgctcggtcgctaccggttccgtcgcggccgtatcctgggcggccttctgggttttctgaccgcaggaagccatgcttccggccattacgattacagctgctgcaatgaataactttttcattttgcgattgttttttaactaaaaaataatttttttccttcggttccccaacctctgtattcattacatcgtcaaggtgtatgccaatccgccggcataaatcattatgctgttaatcaaagatataagaaattgataattttatatgcggctgtggaacggtgtggaaattcccaaaatgatgtggaatatttccacacccgacgactattcgatgccgtacagatgcagtttgttgtagagcgtcttgcgatcgatccccagcagccgggccgcctgggatttgttgccgccggccgccgccagcgcccgccggatccgctcttcctctcccgccggatcgcgcaaagcgatcggcgccggaacagcctccgacaattcggcgggcagctcggccggagtgacgtactcgcccgtcgtcagcagaaccgcccgggtcacggcgttcttcagttgccgcagatttccgggccagtcgcaggccacgagcagtttttcagcctccggatcgaaacccaccacgtgtttgtcgagctcgcggttggcctggtccagaaaaaagtcggcatagagcataatatcctccctgcgctccgcgagatcgggcatatggagcacgaattcatcgatgcggtggtagaggtcggcacgaaacgacccgcgcgcgatagccgcctccagatcctcgttcgtggcacagatcagacgcacgtccaccggaatttcgcgcaaccctccgacgggttttattctgcgctcctgaagggctcgcagcaactggatctgaacttcgtagctcaagttgcccacctcgtccaggaaaagcgtaccgccctgcgccgattcgaaagcgcccttcttatcggacagcgctcccgtgaaggagcctttgatatggccgaaaaactccgaagcggccagttcacgcgacagagcgccgcaatcgaccgccacgaagggtttgcccgcccgtttgctgcgcagatggatcaaccgggccacgtgctccttgcccgtgccgctcgccccttcgagcagcaccgacatattggtaggagccaccagacggacgtattcgtacagtttacgcgaagcgtcgctgtgcccttcgatgtaattcaattcgccttcgtccaaggccctgtcccccttccggcgcggtttcgcgggcgccggagccatcgctgcggatgcgggcatagccgtttcggggtgcggggcatccagcgcctcgcggatcttgcggagcagctcgtccggctgaacgggtttggaaacatagtcccttgcgccgagcttcatactcaccacggcattgcggatttcggcataaccggtcatcacgatcacgggtatcgtcacgccccgttcggcgatccactgcaacagatcggtcccgtccccgtcgggcagacgcatgtccgaaagcaccagatcgtagctcccctccgcgagaagccggcgcccggcggcgatgtcggcagccgtatcgactccgaagcccttcttgccgagccacgtgcgcagcatcagcgaaaaggttacgtcgtcatctatgatcaatatcttttccataccgaaatttcattcaaaaaaaccgaagccatccgcagaggcttcccgcaacgctcctcttcggcgaggctccttctccggcatcgtccgacaccgaagcgtccgatcctctgcaacttcccgtccgggcatgatgcgaacggacggccttctgtcggaatacgcccccggcggagatcaacggtcgcaaagatactctttttttgccgcccggacaatttcgccgaccctttccgctacaccgagcgctgcgctgcgcaaagccccgtccgcagaaccttccgaacgctccagacggcgcaatgccgcagcgagctcctcctcgcccagcaacgtgtagatcggcaccattttgtgagcgatcgcacgcaaagcgaccgcatctccggcgagcgcggcccggcgcaaggtttcggcatgggcctcgttctcggcgacaaaggtccggatgatctcccgcgcggcttcggcgtcgtcgcgggcgaaagccgtcagagcttcgaacccgcgaaccgcatcctcttccggaagacactcctccggggcaacccccgcctccggcacgacacggcgtaacacggccaccagttccgcccgcgcgaaaggtttccgcagcacggctgcaaatccccgttcgacataggccgactcatcgtccgaacgggctgaaacggctaccaccggcagctccgcacgaacggcccgaatccgtcgcaacacctcgaacccatccactccgggcatctgtatatcggtaaaaaccagatcgaaagcagactcctgcaccaatttttcagcgtattcgggaaaaggacagctctccgtttcgattcccaactcccggcagagaactgcggtcatctcaagttgcagggggtcgtcatccaccagcaggcagcggaggggtcgtccgccctccatacacactctgcccggacacatccccgctgcggtttccttttcggaagcgtcgtcctccgcctccccgaccgggacggcgaccaggaatcggcttccggcacccggttcgctctccagctcgatcgtaccgccgagcagcttcacgagacgatcgacgatcgagaggcccagccctacgccgctcacgccgcccgccgacggcaggcgcacgaactcctgaaagatgcgctcccgctcctcggggccgattccccgacccgtatcgctgacacggaacagcagccgcccctcttccaaccaggcgtcaaacgcgacgaacccccggtcggtgaacttgatcgcattggaaagcaggttctcggcgatctgccgcacacgcgagggatcgcccgcgacctgtcccgaaagttcggcggcgagcgtacaccgcaattcgattcctttggccgcagccaccggctcgaacccggtgcagacagccgtaaacagatcggccggagagaaggcgatgcgattgacggcgactttgttggagtcgagtttgtagaaatccagcaggtcggtcaccaactccaacaggtgatcggccgagctcttcatatgatccagataaagcgcaccccgcttgcccaggtccagacgcgtaagtagatcgatatagaccatgatcgaacccagcggggccttgatgtcgtgcgtaatggtgagcatcagcttctcacgggcctccagcaaggcttcgttgtggcgattggccgcttcgagctggcgtttgtaacggttgctgcggttcacgtcccgccagaggattccgacgaagagcagcatcaccagcagcgatccggcagccaccgagcccagaatgacgagcgagctgcgccgcacctgttcacgagcctgcatccgctcccagagataggccgtctcctcctcctcgaagtcgataatcaggcggtaaatccgctgattgatctgctggttgttgcgttgcagccgcaacccctcccgccacgccttgtcgtaaagggccagccgctcgctggtcacccgctgctccagatcctgcagcactacggcgatggtatcccccagactcatctgccgaggcggagcgtcgatccgcacccgggtcttcaccaccacctgcgaatcgttcttgggcgggctgaacaggtcgccgaaccggcggaagaaattgcgcttctttttcggagccacgcgcaccgtatcgcggaccaggatcgtatcgggttcgatagtcggttgcgacagggagtccagcatgggaatcatccgctggatattttcgctcaacaacgtcgccgtgcccgccgaacgcaggttgcggtccagagccttgatcccctgctccttgccggcgatcagccgcacgatcgtgtccagacgcatctgctgcgactcgtcgtccgcacgcatacggagcgaatcgatgcactcccgtaccagccggagttcgcgtttgtaacgattctcgtagctggcataaccggccaccagcatctgaccgtatgtttcggcctcatagagatggtagagagtctgattgaccagtccgcgccgccgccgaagctcctgctggctgtggtccggttcgaggagcgctccggtctgacgccagacgtagatcatggccgtcaggccgatcagggcgatcagcacgtaacccacgacgattttggtgcgtacgaatttagactctttcatcatagcggatcgacttatccttcgcccaaagatagcatctgtttcggtgattttcgctgcggaaagcctttttctttccaaagcctttccgcaagggggtctgcaccctatttgatccgggcgatgatcctctccagcgtcagctcacgcaccgcatcgcgtccgatccggcgggctgccgccccctccttcgccgccagtctacgggccagcgccagcgcatcggggtaaagcccccggctacgtttgccgatctgccgcagggcccaattcacggcttttccgatccggacgcgggaatcctccgcaccccgttcgatcagcggcagaaaggccctgaaatcgtcgtccgaagcccgtttatccccgacggcgagcgtagccagcagagcgaaccccgcccgtcgggtaaactcctcgtccgaagcggcgtattcgcgcaccttgccgtaagcgtacgacgtatagcggaacaggttgatacaacactggtcgcacaggtcccacgaccgaaattcggcgacccaggcatccatctcctccggacggaacagcgccggatcggcgatcatcgacgccaggatccgcccttcgtgcaccggcctgcggtagagttccagcgccagcgcatgatcccggccgatcttcagcgccagacgccgcagatcgaccacccgcaccccgaccgccagccgggcgtcgattccgaaccgcaccattccctcccggaactccggattggcatgggccgcaagccactccaagacctcttcgcaggtcatatcctttccttttttcgtcttcatctctatctcacttatccgcacgaatgaaattctaaaaatagtcatttattttatttctgcaaaccgatccgaaaagaaggacggttttcataccccgcaatgcgtaaatttcatccgaccgtttttcaacatcgaaaaggggagaacgctgcgagcgttctccccttttcgattcgcggacatgcgcctgcaaagcaaacgcacattcgccgtatttccagttacttacgcttcttgtccgctttcttggcgtttttcttcgaagccttcgtctcctttttcttcacatccttctgatcgcatgccttggtgcagtcgctcttcacgagggtcatctcgtcgagcagccagtccgcacccgcgaacttgtcgatcacgaagagcacatagcgaacgtccacgccgatagtacgctgtacatccggctcgaaggcgatatcgcccgacatagcctcccagttaccgtcgaaagccagaccgatcagctcgccgcggctgttcatcatcggcgaacccgagttaccgcccgtgatgtcgcagttggccaggaacgctacgggaagttcgcccttgcagttggcatagggaccgaaatccttcgcctcgtaaagctccttgagcttggcgggaacgacgaattcgggattcgaagaatcctccttctccatcacgcccttgagcgtcgtgtagtaatcatataccacgccgtcggcaggttcataaggcaacacctgaccgtaagtcagacgaatggtgaagttcgcatccgaataccaggccttgtcgggctgcatgcgcatcagaccggctacgtaaagacgatgtccgtccgcatatttctgcaggttgggtacggccttctcgcgcagctccttcatcttgttcagaaccgacgtagccaacactaccgccggatcgttcttgatctgctcggacgtagcggccgatgccttggcctcgtccgtgaagaccgaattgtcgtacaggtaatccacataagcgtcgatgtcgccgccgaactgcgcgtcgatcacctccgcgaaaacggtcggcagatccttcacgttctccttgaccatcgaaagcatcttccgggctaccttgcggtccgtcggcaggttgtaatccttgtagaagttggcgtaatactccttcgcctgcgctttcgcttcgtcgcttacctcctcggccgtcagcatccggttagccaccagagccggggtcatgatttcgaccgaacggaccatcgcctcgctcaaatactggagcggaccggtgtaggccatgttgtcgttcaccgcctcgcggatcatgccgagcgcatcgacgaatccctcctcaggcagcgtattctgctcggcccaagcctggaattcggcttcctgagcctccttcaaggctttcacgtccagttttttcagaccgcgcagcatgccgatcgtattcttccaatagttcgacgaattggcatatttcgaagcgtactggatacgcaccttgtcgctggcggccatgtcctccttcaggatgtcctgacgggcgccgcgaatgtcgatacgctggggacccgaaacctggaacatctcgtcgatctcgtacgaagtcatgtaacgctcggtcgaaccggggaagcccatgatcatcgtgaaatcgtcggccttgtaaccgtcgagcgataccttgaggaactcttcggccttgtagggtacgttctcctccgaatattccgccggacggttgtccttgccggcatagatgcggaagatcgagaagtcgcccgtatgacgcggccacatccagttgtcggtttcgccgccgaacttaccgatcgacgtcgggggagtaccgaccagacgaatgtcccgataaacctccatcacgaacgcgaagtactggttgccgccgaagaacggctggatgttgatcgtcatgccgggattctcggcccgcaatttctcgtacagcgcctcgatgttcttatcctccatttccgaacgctcctcgcccttggcgatcgaggggatgttgcccagaacctcgggcgttacgtcgatgattcgacggatgaaagtgaccgtcagccccggagccggcagctcctcctcgttggacatggcccagaaaccgtccttcaggtagtcgtgctccaccgaagagagggcctgaatcgaaccgtaaccgcaatggtggttggtgaaaacgagtccttcgggcgatacgacctcgcccgtacaaccgttaccgaaaatgacgatcgcatccttgagcgatccgtgattcaccgaatagatatcttcggccgtgagctggcagcccttggctttcatatccccgatgttcatcttctgaagatagggcagcagccacataccctcgtctgcagcggcagtcagcgatacgactgccgcagccaggcataaaatcagttttttcatctctccttaaaatgtttgtttacttggtttataaaaaatatatagttgaatttctctgttcgcacttcatacgaccggctccgcatccgcccaaccggatcggaacgccgcactctctccgttccttcccctgttctcttttttcgcccttcgccgcaaccgggcaggcaggttcgccctcatttcccctttttggccgccgaccggaaatccgccgttccgcttccgtaaccgcacaggctgtgcgaccggaggatcgccctccggcgagcgaaaaaactacttgatggcgatcatgttgaggatcgaacgctcggcacggcgacgtacctcctcgtcaagcgatatttcgggctgctcgtcgcgcagcgtggtgaagatattctccagcgtaatcatcttcatatacctgcaattgttgcatccgcacgcctcgtcgtcgggaggggccgggataaacgtcttctccggatagcggcgcttcatctcggtcagaatccccgcttcggtcaccacgataaactccctggcggaacttttgccgcaatagtccagaatagccgccgtcgaaccgacgaaatcggccacctgcacgatataggccctgcattcgggatgcaccaccacctgcgctgcgggatgctgccgcttcagttccaggattttttccaacgaaaactcctcgtgcacatggcaggcgccgtcccagatcaccatattctcgcgtccagtcagcttttggatataggaacccaggttccggtcgggagcgaagatgatcggctggtcggccggaatcgactctacgaccttcagggcattggacgaggtgcagcacacatccgtcaaggctttcaccccgaccgaagtattgacgtacgaaaccaccttgtagccgggatatttcgccttgaaagccgcgaaagcggccgcatcgcacgattctgccagcgaacatcccgcttcgagattcggaagcagcaccttcttttcaggcgagagcaccttggccgtctctgccatgaaatgcacgccggcgaagaggatgatccgggcgtcggtcttctgcgcctcgatggagagcgccagcgaatcgcccaggaaatcggctacctcctgcacttcgggcagcgtatagtagtgcgccaggataacggcgttcttctcgcgtttgagccgctcgatttccgttttgagtttcgatgagttatcgaccatcgttttttattttttatacttttattttattaaaagaataattaaaaataaatataatgcctgttgatagtgttgataattataccgtatttcgggttatccacagcatagcttttcgaagttccgtattctgttctgccgataaggtccgggaggttgtcgaaacccggttttttgaaagttaccgacaaatgttcaaaaccggtttcgacatttcgacatctccggattgtcaacattcgcttctctttttccgtgcatatcccgaatcatactttgcgaaaacttttttttgccgttttcttgttttgtctataccgggcgaaagatggattttgcaaacggtttcgggtttttcttttcaaaagttattgcgggtttatcaacatcgttcgtggggttatttgaccaccttatcaacaatccggtcggctatctcccggtaatagggttcgacgcgggcgtcgatcgacaccgacggcgttcccgtgtcagcgccttccataatggactgtatgataggtatttctcccaacaggtctatgccgttttcctcggcgaagcggcgggcgcctccctttccgaagaggtagtaacggttttcgggcaactcttccggggtgaaccaggccatgttttcgacgatgccggccagggggatgttcacctgcggattgcggaacatctccacgccgcgccgcacgtcggccacggcgatttgctggggggtcgaaacgatcacggccgtgtcgattttcaactccgaaatgatcgagaggtgaatatctcccgtgccgggaggaagatccacgagcaggaaatcgagcgctccccagcgtgtctggtggatcatttgccgcaaggcgttcaccgccatcgcaccgcgccacagcaaggcgtccgaaggtttcacgaagaagccgatcgacatgattttcatatccatcgcttcggccggcaggatgatgtcctgcccgtccacctgttcggcttcgggcaggtaaccttccagaccgaacatcttgggctgcgaagggccgtagatgtcggcgtcgaggatgccgacccggaaaccccggttgcgcagggcgacggcaaggttggccgtgacggtcgattttccgacaccgcccttgcccgaagcgatcgctacgatgtgggctatgtcgcccgtcatggtcggtttgtccgcagcttgcggtttcttgggagcggcctccttaataataacggtgatggatcctttcagggcgggaaaattctcttccagcagcgcttgaacctgccgtttgatcttcagagcgaagggatcgcgcactttggcgaaattcagggtgacggttatcttgtcgccgggagtcgaaacctgttcgacgaatccgctctcgacaagaccgtgctgggtctccggatggaggatacggttgagtaattccttgactctctcttccatattttcagttaagttggtagcaacgatcatgcaaaccgggcggcaaagagcctgctcctgctcgtccggatgcggcttatctggacaaagataactattatttccgatataataagtctttatggaaaattatgttatcgataaacgataaatattatttgtttttcataaaattaacggttatatttgccgcatattaactccgattcggaggggggccgggattcggcgatgcggaaaagtttcgccccgttcgcgcctcatgcgccgtttcgcagcgaatgaatattaaataaatcggtatgaaatttttgaaaatgtttttcgccggtctgctcgcttttgtcgtgggcagtgcggtgatgctctttctttccgtggtgattttgttcggaatcgtaggttccatgacctcttcggaaccggtgacggtcggagagcacgcgattttgaaactggatttttcggaagacctgatcgagtcgccgagcagcgatcctttcgccggcatcgatttcgccacgatgacggccagacatcaggttactctttacaatgcgttgcgggccatcgaaacggccaagaacgatccccgcatccagggtatttacctgcgtccgaacggaggcggagtcgccacttacgccattctggaggagctgcgcgaggcgcttcaggatttccggcagggtggcaagttcatcatcgcctataacgaaacctacggtcaggggggatactatctggcatcggtcgccgacaagatctacctggagcctcacggagggatgcagtggacaggtgtttcttcgacgctgatgttttacaagggtcttttcgacaagctcgatattcaggccgaaattttccgtccgacagcctgcaggtacaagagtgccgtggagccttatttcctttcgaagatgtcgaatgccaaccgcgagcagatgcagttgttggtggattcctattggaatgtgatggcggaggccgtcgccgagtcgcgcggcatcgagctttcgaccttgaaccgattggccgacgggctcgaagtgtcgctggcacaggaggcgctcgatcatgggatggtggacggattgctgttcgaggatcagatggacgatgtgttccgagagcacggcgccgtggccaagagcgacggacagttcgagttcgtgacattgggacaatacgtgtcgcagttgaatgcggatcttaagaatatctcttcgtcgcagatagcgatcgtctatgccgacggtgcgatcgtcgatggcgaaggctacggtgacgatatttacggcaatacgctggctgcgaagttggccgaagtacgtcgcaacgacgatgtcaaagccgtggtgctgcgtgtcaattcgccgggcggcagcgcgctggcttcggatgtgatctggcgcgaggtggagctgcttcgggagaagaagccggtgatcgtatcgatgggcagctatgcggccagcggcggttactatatttcgtgcggtgccgatgccatcgtggcggacaagacgacccttacggggtcgatcggggtgttcggaatgttcctgcgcctggaggatgccctgaagaataagctgggcattacgttcgatgccgtgagaaccaatacgtcggccgatatgggcgtgatgcgtcccctgacggcgaccgaacgggcggcgatcatgcgctcggtggacgaggtgtacgaaactttcacctcctacgtggccgaaggccgtaacctgccgctggaaaaggtgctcgacattgccggcggacgggtttggagcggcacggatgccctcgctctcgggttggtggataccaacggcggtctgaagacggccatcgctattgcggctgacaaggccgaattgggcgataagttccgcatcgtcgagatgaccgaggctccgaccggcttcggggcgttcttctccggattcatggccaaagtcaaggccgacatcgtggccggagaactgggaccctgggccggcgagtggcgcaagatccgtgaggcggtgggacagcagggcgtagtgatgtattgtccttatgcggtacagccggagatgtaggaaatcgcggacggaatgcccggactcactttaagttttcgatcgattatggagatattgaaagtagaacacgttaccaagcgcttcgccagacatacggctctggacaatgtgtcgctcacgattcccaaggggtcggtttacggcctgctcggacccaacggtgcgggcaagaccacgctgatccgcatcatcaaccgcatcacggcgcccgacgaggggaaagtcatcttcgacggccgcgaaatccagccgcaggatgtctatcgcatcggctatctgcccgaggagcgcggtctgtataaaaagatgaaagtgggcgaacaggccgtcttcttcgcccgcctgaaggggctttcgcgtcacgaagcggtgatgcggctcaagaagtggttcgtcaaattcggcatcgaatcgtggtgggaccgcaaggtggacgaactttcgaagggtatggcccagaaagtacagttcatcgtcacggtgctgcacgaacctgagctgctgatcttcgacgagcctttttcgggtttcgatccgatcaacgccaaccttttgaaggaggagattctcggcttgcgcgacaagggttcgacggtcatcttttcgacccacaacatgtcgtccgtcgaggagatctgcgaccatatcacgcttatcaacaagtcgcgcaacattcttacgggtcgtgtggacgagatccggcgcaggcacggcaacaacattttccaggtagcctatcggggcgatgcggaaacgctgcgcggtgtgctcgaaggtcgctgcgaggtgctcgaacagcccgagccggagttcggggcggcctattcgtcgctcaagctgcatgtggagcgggatgccgacgtgcgggaggtgatcgcccgaatcaacgatgcggtggagctgcgctccttcacggagatcatcccgtcgatgaacgacatcttcatccgggccgtcgggggaaccctcaacgcggagtaatcggaagaaaacgaacaagtaaaagtagaaagccatggcaaattcgaagataggaattatcattacccgggaattcaacgaacgggtgcgcaagaagtcgttcatcgtgaccacgattcttatgccggtgctgatgatcggtctgatggtggccccggcgctcatcatgcgctattcccagggggaaacccggcatatttccgtgatcgacgagagcggtgtgatcgctccccggctcgagagcagcgaggaggtggtctatgagccgaccgacctgacgctcgacgaggctcgcagagagcataccgaccgtttcggcatactctggatcggcagggacataatgaccaatcccggcaacgtgaagctctataccaacggctcctcggcgatgttggtcgaggagagtgtgtcggggcagatcgccgacatcatcgagaaggagaaactcaaggactataacatcgaaaatctgtcgcagattctcgacgaggtgaagactacggtctatatgcaggtcttccgcaacgaccagatgcaggacgacggcagcgacaagcaggccaattcgtcggccgtatcgaccgtcgtggggctcgtgctcggtatgatcctctatatgttcctgatgatttacggtgcgatggtcatgcagtcggtcatcgaggagaagaacaaccgggtgctcgaagtggtcgtctcttcgatcagccccttccggctgatgctgggcaagatcctgggtatcgcctccgtcgcggtggtgcaggtgctcatctggggcgtgctggtgtgcggcgtgggtgcgctcgtcatgccgcacctgatccccgccgagatgatgggaagcgtcgaggcgatgcgtgccgggacgctcgatccgacagcggcgggcgtcgatatggagatggtgcagacgcttgctacggcgaccgatttcggatatgtcttccagattttcgcctacctgctgctctacgtgatcggcggttacctgctctattcggcgatgttcgccgctgtcggttcggctgtcgataacgtgcaggacgcacagcagttgcagaccccgatcatgctgccgatcattttgagtatcttcgtgatgatggtggtgatgaaggaccccaattcgccgctggtcttctggtgttcgatgattcctttcacctcgcccgtggtgatgatggcccgcatcccgtgcggtattccgacctgggagatcgtcgtgtcgctcgcggtgctctacgctacgttcatggctatggtatggctcgcggcgaagatttaccgcgtgggtatcttcatgtacggcaagaaacccaccttcaaggagctttacaagtggatccgctacaaatattagcgggcacgctgcgggggcggccgggttttacttttccgggcaccctttttgcaggcggtgaatacataaaagttttttcataaatagattttttgatcgcgggtcccggttgtcgtaagacggccgggaccttttcgtgatccctgtccggagtctgttgaatcgactgctgccgcttgttgccggttcgaaacaaaagaaccgtttccatcggatttcgggccgaagtccttatttttgccggggatttgccgggcggaggatcgtttgccgacattcgcggtatttatggcgagtttgcggtgcggatgcgggcgacgggtttccgctatcggttcttcggtattcatttcgtaccttatttattaatcgataaatttattgacttatgttacacagaaaaatcggatggatgctgctttgttcagcggttctgctggcatcgtgcaacgacgacgaaacgaatggcaacggcggaaacggccctgccgtaccgcctgcggaggtgactgccgatgtagattatgaagttttcggaggagaggatatgccgctgctcttcgatatgcaggcgaaatacaccgatgccgccggaaagaccgtgacggcggatgtcgcttcgctgccctggagcatttctgtcaaaggagcgaaggttcctttcgaggcgactgtcgaactggtactgacggctaaggaagaggttgcggaacaagccgcctaccgtgtgggactcggctcgggcatttcctatacaactaccgacggccagtataaggaggcgaccggtgcctcgacgatgaccattggaaaggacaaggtggagaaataccggcaaaccattttgggaagaacgtacaaaagtaccgaacggatcgaggtttccgggaaataagacctgaacgaaagaactgataaaaggctgtcaccctcggtgacagccttttttattgtggataaaagaatcccctgccgaaacgtcggcaggggatttcttattgaacggagcgtgccgttaccagataatcacgcgctcctcgaccggcatatacatcttgccgtcggtgatgttgaaggcatcgaagaaatcctggaggttgcgcagcgtagcgtccacacgccattgaccgagcgagtgtacgtcgagtttggtcagacgggcgatctcctcgtcgcggatgttctgtgcccagacggtcgcgtagctcaggtagaagcgctgagccggcgtgaggccgtcgatcggttcgggctcggtgccgttcagcgagttcttgagtgccgtgtaagccacgcgcagaccgccctgatcggcgatattctcgcccagacagagcgaaccgttggcgaaaatggccggctggtcgccgcgtgcgggcagcacctcgatcgcgtcgaattgcttgaccagaatgtcggtcttctgtttgaaggcttcggcatcggcgtcggtccaccagttgttcatgttgccgtccttgtcgaactgacggccctgatcgtcgaatccgtgcgtcatctcgtgtccgatcactacgccgatagcgccgtagttcaccgcgtcgtcggctgccgggttgaagaacggcggctgaaggattgctgccgggaagcagatttcattggtggtcgggttgtagtaggcattgaccgtttgcggagtcatgtgccactcttcgggatcgacgggtttatccgttttggcaagcgcatcgcgggtcgcccattcgctggcacgctggatattctcccagtaggagagggtcggatcgatttcgagcgtggagtagtccttccacttgtcggggtagccgatttttacgcggaaagcggcgagtttctcgcgggcgcgcatcttggtcgagtcgctcatccagtcgagctggtcgatgtgttggccgagggccgtgcggagattctccaccagggtcatcatgcgggccttgtcctcggcggggaagaacttctcgacgtacatttcgcctacggcctcgcccagggcgctgttgggaatggccatggcacgtttccagcggggacggggctcctgcttgcccgacatcgtgcggccgtagaagtcgaacgatgcggcgtagaagttatcgtccaggtagggtgctgcggcgttgaggtattgcgatgccaggtagtagcgcaggtcttcgatcggagtggtttcgatcagcttgttcagcgcctccatgtattcgggctggcagacgatcacacgctcgggattgattccggagaatgcgaagagctgtgcccagtcgatggcgtcgtagttctttttcagatcggcggttgtcatcgggttgtacatgcgctgcaagtcgcgcagctcgacgttcgaacgcatgttcttggccagttcggtttcgatgcgcatcacggcgtcggtcgctttgcttacctgggactcttcgagtccggccagcgtgaagagccggttcagataagttttgtaggcttcgcggatcgactcgttctcggcgtcgaggtagtagtcgcggtcgcccatgccgatgcccgactgtccgatgtagagggcattgactttgctgtccttcagatcggcctcgggaccgaagctgaacaggggcgagctcgaagtcatctgcatcacggacaggatcggagtgagttgtttcttgtcgtccagagacaggatcgtttccaattcggcccggatgggagcggcgccctcctggttcaggcgtaccgagtcgaggcccagcttgtagaggtcggcgatcttctgattgaccgtgcccttcgcagggttctccttggtcatctgggtgaagagctcgttgatgcggatttcgttgttgtcgttcaacacgttgaacatgttgtagctcgaatgttcgggcttgagcggatttttagcctgccagccgcccgtagcgtactggtagaaactctcgttgggggcgaccgaagtgtccatgttggacggatcgagcgccggcgtcgagttggtcggtttgttttggcagcccatcatacaaagaacggttgcagcgaaaagaatttttttcattggttgtttactctaaaatattttaaggtttctgtctgttttcgattcagtacgaagaacggttcgacgggaccgcgctccgttcgtgcccggcttatttgcggatggccgccactcccggcagctccttgccttcgatgtattcgagcagtgcaccgccgcccgtcgaaacgtagctcaccttgtcggccaggctgaacttgttgatgcaggccaccgaatcgccgccgccgatgagcgagaaggctcctttcgaagtggcttcggcgatcgcttcggccacggctttcgagccggtagcgaacttgtccatctcgaaaacacctacggggccgttccacaggatcgttttgcagcccaggatgtgttcgcggaaagtctttttgccctcctcgccgatgtcgagacccatccagccgtcggggatgtcgttcaccggagcctggcgcgtatcggcgtcctcggcgaatttgtcggcgatcagcgcatcgggcgagaataccagcttcacgccgcgctcctcggctttcttcacgatttcgagtgccgtggggaacatctccggctcgcagagcgagttaccgactttgccgccctgcgccgctgcgaaggtgtaggacataccgccgccgatgacgatcgaatcgaccttttccatcaggttttcgaggatcgagatcttggtcgaaactttcgacccgccgatgatcgccgcgaacgggcgccggggattcagcatcagacgatcgaccgcctgcaattcgttctccatcacgtagccgaacatcttgtcgtgggggaatttatcggcgatcagggctgtcgaggcgtgtgcgcggtgcgcggtgccgaaagcgtcgttgatgtagcagtcggcatacgaagccagccgctcgacgaactctttctgcgaggctttgaccgctttttttgcagcggctttctcctcttccgaagcatcttcggcaagtccgcggggcttgccctcctcctcggcgtagaaacgcaggttttcgagcagcatcacctcgccgggtttgaggttccgggctgtttcggccgctttttctcccatgcagtcgccggcgaaaatcacgggtttgcccagcagcttttcgatcgcggggacgatctgtccgagcgaatatttcatatcgttgttcttcttgggccgtcccagatgcgacatcaggattaccgagccgcccgcgtcgagtaccttgcggatcgtggggatcgccgcccggatgcgggtgtcgtccgttacctggcccttgtcgtcgagggggacgttgaagtccacgcggataatcgcccgcttgcctttgaaatcgtaagaatcgattttgaacataattcgaaatatttaatggttgaacgtgctggttccacaaccggctataacgtgacaaatttagcaaaatagtttgtaaatgcgtcgtgtccgccggggaatttgagattgtgggggcgggaaacgatcctgtggatcgctttccgatgccggaatttgtccttttgcttcgtgccggcgctatgttttcggtggaacatagcgggttgtccgtttattccgttttcgttcgcggacgacttcggcgaccggtcgtaagcttgcggaatccgggccggattttgtcggataccgccttgcggggcccgggatttgcaggggttgccgtcggggagggtccggggtccggcggcgatcggataaaaaattcgacgacaggtatcatttttataaaaaacaactatctttgctgatagtttgatagtaaaacacccctcgaacgtcacaaaatctaacaatatgtacggtaaaattaaagaacatttggagcatgagctggccgaaatcaaagcggcagggctctacaagaacgaacgcatcatcgaatccccgcagcgtgccgagatcacggtcggcggacgtcaggtgctgaatttctgtgcgaacaactacctcggcctttcggacaatccgcgtctgatcgaagcggcgaagaaggcgatggatgcacgcggctacggcatgtcgtccgtgcgtttcatctgcggttgccaggatatgcacaagcagctcgagaaggcgatcgccgactatttcggtaccgaagacacgattctctatgccgcttgcttcgacgccaacggcggcgtgttcgaacctctgtttaccgagcaggatgcgatcatctccgattcgctcaaccatgcgtcgatcatcgacggcgtgcgtctgtgcaaggccgttcgctaccgttacgccaacgctgacatggccgagctggaggattgcctcaagaaagcccaggcacagcgtttccgcatcatcgtaaccgacggcgtcttctcgatggacggcaacgccgctccgctggacgagatctgcaagctggccgagaaatacgatgcgctggtgatggtcgatgagtgccactcggcaggcgtgctgggcaagaccggtcgcggtatcaccgaactctacaacctgcgcggacaggtcgatatcctgaccggtacgctgggcaaagccttcggcggcgcggtaggcggtttcaccaccggccgcaaggagattatcgacatgctgcgccagcgttcgcgcccgtacctcttctcgaactcgctgccccctgccgtagtgggtgcttcgatcgagatgttcaagatgctcggcgagagcgatgcgctgcacgacaagctcgtgaagaacgtcgagcatttccgcaagggtatgatggccgccggcttcgacatcaagcctacgcagtcggctatctgcgccgtgatgctctacgatgccaaactgtcgcaggatttcgccgcccgtctgcaggacgagggtatcttcgtgaccggcttctactatcccgtggtgccgaagggacaggcccgtatccgcgtgcaggtttcggccggccacaccaccgagcagctcgaccgttgcatcgcagcgttcgtgaagatcggtaaggagatgaacgtaatcaaataagtttacaaccgactaaaacgagtttttccatgcctaaagcaactttggacgctatcgacgggaagattctccagtacctcgtccggaatgcacgcatgccgttcctcgagatcgcacgcgagtgcgggatttcgggtgcggccattcaccagcgtatccgcaagttgcacgattcgggggtgatcctgggaagccgcctgatcgtggaccccaagatgctgggtttcgacgtatgcgctctgatcggtatttgcgtgcaggatccgatgtatatgatgcagacgatggagaaactcaaggagattcccgaaatcgtggagtgccacttcatcaccggaaatttcaacattctggtaaaactctactgcctggacaacgaacacctgatgaaaaccattttcgacggaattctgcgtatccagggcatttcgaccacccagaccttcatttcgctcaacgaggctttccaacgccaggtgagcatcgatttcatccgggctgcggagcgttgaaaagaggacgggaataggaaacgacgggacgtgcctgcgggtgcgtcccgttttttatggctcccgggtcctgcatccttgcgaatcccgaaaattgtgactaccttgcagaggctatggaaaatgagaaaaaaccgacgatcattcgtcttaccaaggagtttacattcgaggcggctcatgcgctggagggttacgacggcctttgccgcgagattcacggccactcctatcgcctgttcgtgacggtcaaggggacgccttgcgccgacgagtcgaatcccaagttcggcatggtgatggatttcggagagctgaaacggattgtgaacgaacagatcctctcccgcctcgaccatgctttcgtcatgcgccgcacggccgaaagcacccgtgtagcggaacagatcggctgtcgcttcggccgcatcgtgctggtcgattatcagcctacgtgcgagaatatgctcgcggatttcgccgcccgcatcgaagccaacctgccgtcccatgtcaagctccacgccctgcgtctgcacgaaacggcgacttcgttcgccgagtggatggccgaggataaccgatagaatccgatgaaaaaactctttcttgtcgatgcctatgcattgattttcaagtattattatgcgttcatggggcgtcccatgcgcaatcgtgcggggatgaatacctcggtggtgttcggtttcacgaaatttctgcgcgacatccagaaacgggaacatcccgacctgctgggcgtcgcgttcgacccgaaaggcggcagtttccgccgcgaaattttccccgaatacaaggccaaccgtgccgaaacgccggaggatatcctgttgtcggtgccttatgtcaagcggatcgtcgaggcgatgtgtattccggtgctggaggtgcccggttacgaggccgacgatgtgatcggcacgctcgcgcacaagggcgtcgaggcgggttacgacgttttcatggttacgcccgacaaggactacggacagttggtgtgcgacaactgtaagatctacaaacagaaaggcaacaacggtatcgaaatcgtcggccgggaggcgatccgcgagaaatacggcatcgagaatccgcagttggtccgtgacatcctggcgttgtggggcgatgcttcggacaacattcccggcgtgccgggcatcggggaaaaaaccgcctgcaagctggtgcaggagtgggggacggtggaaaatatcctgcaaaacgccgatcggatcaagagccggcagggtgagaagatcgccgagtggggcgacaaactcctgttggccaagcggctgacgaccatctgcctggacgtgccgatcgactttcgggaggaagatttgacggtgtgcgcccccaggatcgacgagctgaaggcccttttcgccgaactggatttccggatgttcctgaacgatctgacgaacctggctcctgccgaaccgctgcccgaagggccccgtcaggcggcccagacccagctggccgaagtcgcgcgcgcgaagtccgcagcggctaaaaaggcggcgttggcggggcagggagatctgttcgcccccgcagccgattctggggaatccccggcatccgaccgggagtcggcgtcgtccgatgaacagacggcggaaagcgaggagttcgccacggcgcaaaccacaccccacgcctatacgatcgtgcgtacggtgcaggagctggaggctgttctgcgcgaagtggcggcctgtccggagttttgtttcgataccgaaacgacgggattcgacattttcaacgaccggatcgtggggctttcgcttgcggtacgtccttacgaggcgtggtatattccgttcaatgaatccaatacggccgaatatgcggcccttatccggccgctgttcgccgacgggaagatcgccaagatcggacagaacatcaagttcgacctgatggtgctcgctcgcctgggggtcgagattcgcggccggctttacgatacgatgatcctccattacctgctcgatcccgagtcgcgtcacaacatggatgcgctggcgatgcgctacctcaattaccggccgatttcgatcacttcgctcatcggcaagggagcccggcagctgactatggacatgatttcgctggagcgggtggccgaatacgctgccgaggatgccgacgtgacgctgcgcttgaaacaggtgctgtggccgaaggtcgaggagttggatctggccgggctgtacctggagatcgaggagccgatgatcgctgtgctggccgagatcgagatggccggggtgcggatcgattcggaggcattggccgagtatgccgtcgaactcaataagacgctcaacgacctggagggagatatccgccgtctggcggacgagccgtcgctcaacgtcaattcggcgcggcagttgggcgaggtgctcttcgggaagctccgcatcgcggagaagcccaagatgaccaaaaccaagcagttttcgaccgaggaggagtacttgcagaccttcgcccacaaatacgagatcgtcgataagatcctcgaataccggggcgtgaagaagctgctttcgacctatgtggaggcattgcctctgctggtcaatccggtgacgggcaagatccacacgtcgttcaaccaggccgtgacagcgaccggacggctctcctcgaccaatcccaacctgcaaaatattcccgtgcgggacgagttgggacgccggatccggaaggcgttcatcccttcggacgacgagcacctgctgctttcggccgattacagtcaggtggaactgcgcctgatggcccacttgagcggtgacgagtcgctgatcgcggctttcgaacacggcgaggacgtacatgcggccaccgccgcacggcttttcggcaaagaggtggccgaggtggacagcgacgaacgccgcaaggccaagaccgccaatttcggtattatttacggaatttcggctttcggcctgagccagcggcttgacattccccgcaaggaggccaaggagatcatcgaaggttatttcgcctcctatcccaaggtcaaggagtacatggaccgggtggtggaagaggccaagcgcgacggctatgtttcgacgatcttcggccgccgccgctacctgaacgacatcgcttcgcgcaacgccgtggcccgcggcctggccgagcgcaacgccgtgaacgccccgattcagggaagcgccgccgacatcatgaagatcgccatgatccgcgtgagccgccgtttccgcgaggagggtatccgctcgaaggtgatcctgcaggtgcacgacgagttggtggtcgatatgcttcgttcggagcaggagcgcgtcatcgccatcgttaccgaggccatggagtccgccgctgcgctgcgcgtgcggctggtggtggactgcggcgtgggcgacaattggctcgaagcgcactgatgccccgtttcgacagaatagaatcccctgccgcccgatcgggcggcaggggattctatctggaaagtgcatgcggcagggtgcttcggactgttgtcttcggcgatatgtcctttgtgtgatttcgacttacgctatgccgttttctccggaggggctttcggaagttctgcgcggcacagtttcagggcttgaatccgtgcgggaaccgggcctttgtgggttgaaactgcctgcaagggatttcgaaggggaacggctatctcttcgcctcccccttcttggcgatcgagaaccggaacacgagtcccccttccgggcggttcgccacttcgattcggccgccgtggaaaagtatggcgttgcgtacgatcgccaggccgagtccggtgcctcccgcccggcgcgaacgccccttgtcgatccggtagaaacgttcgaagaggtagggcaggtgttcgggattgacgcccgtgccgttgtccgagaatgaaaattcgtagcggtcgtccgtttcgtccgtcagggcgatgtcgatccggttgccgcccgagtagttgagggcgttgtccgtcaggttgcggaaaacggagtagagcaatccttcgttgccctcgaccgtcaggggacggtcgcatgtccagtgtaccgtaaatccgcgtcgggcgctttccggggccgtgtcggttatcacttcgccgatcagggcgcggaggtccacttcggtacggtcgatcatctgtcctccttcgtccagccgggtgatcgacgatacgtcctgcaacagttgccggagccgttcggactgggtgaaacacttttcgaggaaggcccgctgcgtcgctgcgtcgatatgcggattggcgatgagggtttcgaggtagccgtggatggaacttacgggggttttcaactcatggttgatattgttggtcaattgccgcttgatgcggattttttcctgctcctcgtgcagtgcggcggcatgttcgcggtcgcgctctgcgagggtcgcctccatttgaaccatgtttttcgtgaactggcggaccacgtagtagccgaccagacacagcagcagggtgactgaacccatgaaccacagaaagttgcggtcggcgttcagcacctgcgacaacgacacggtgtagggcagcgacgagcggacgatccggtcgccgatgcgggaggcggagtagaagtaggtgcgcccgttgttctccgactggcggcggatcgtatagccgtgaccgtcggtgagggcggccgccacttccggccggtcgaggtggttcgacatctcggccgggggttcttcggagtcatagacgaccgtaccgtccaggtcgatcagggtgatgcgcagcccctcgaagaagtcggagtgcgcatcgaaaaagtcgtggggagtgcgtgcattgctcaaagcctcttccagttgggcgttgatgatctgcaactgcgaatcgagcagctccgtgcgcagctccttctcccggtggtattggaagccgacgaagcagacgatgagcagccacgagaagcccagcagccagaggaacgattgcgtctgataggagtgtttacttttcaaatccatagccgtagcccaggcgggtcaccagatgcgagccgtagggcccgattttcttgcgcaggcgcgtgatgtttacgtcgatcgtgcggtccaggacgatcacttcgttgttccagacccgggcgaggatctgttcgcgcgagaagatcaccctagggtgggaaaggagcagggtgaggatttcgaactcctttttggtcaggggaacctcctgtccgttcacccggcagaccttgctctgcaggtcgaggcagagcccttcgaaacagatggcttcctcctcctgccgggcttgcgagcggcgcagcacgctccgtacccgggccgtcacttcgcgcatcgagaagggtttggagatatagtcgtcggcacccaggttcaagcccgcaacggtgtcgtcttcggtgtctttggccgtgcagaagatgatcggcacggcagccgtttcgggcgaggacttgagcatacgggccattttgaagccgctgatctctcccatcattacgtcgagcagcagcagcgaataacgttcgggatgcatcgccagcgcttgttcggcgctgtaagccacatccacttcgtatccttcgagttcgaggttgaatttcaggatttcacacagcgactcttcgtcgtccaccaccagaattttgtatttccccatgaccttcgtattgattcgacgcgtcaaaattagggaataaaacggtttcgcaaatccggaaggatcgaaatttcacggaattgtaacagacggttcataaaaacgaggcatttcccggattttgtaacgggtttgtaacaggtttgaaacgtcgttatcatttccgcccggtacttttgttcccgaatgataactttaggcgtaaaaccaattaaaaaagtatggaatcaatctatttaggcattgtcctcttcctctttctgctggcgattttcgatctggtggtgggtgtcagcaacgatgccgtgaatttcctggggtcggccgtcggcgcccgggccgcttcgttcaagtggatcatgggtgtagctgcggtgggtatcctgtgcggcgccgtcatgagcaacggtatgatggatgtcgcccggcacgggattttcaggcccgaacagttctatttccaggatatcatgtgtatctgcctggcggtcatggcaatcgacgtgattcttctggacaccttcaataccctggggctgccgacttcgactaccgtgtcgatcgttttcgagttgctgggaggtgcgttcgctctggcgatggtcaagctggccgcagacgatacggggcttacctttgccgatatgctgaattcggaaaaggctttgtcggtcatcatggccatcttcctttcggtggcgatcgcattcgtattcggcgcagtggtgcaatatatcgcccgattgatctttactttcaattataagtcgcacatgaagtggtccgccgcgctgttcggcggtgtggcgatgacggcgatcatctatttcattctgatcaagggtatgaaggattcgtcgttcatgacacccgaactgtcggagtggatttctacctatacccgtcacctggtggccggctgcttcatcttcttctgccttctctcgcaggtgctccactggtgtcggatcaatattttcaaggtagtcacgctgctgggaactttcgccctggcactggccttcgccggaaacgacctggtgaatttcgtgggcgtacctctgacgggctactcttcctatatggattacgtcgccaacggcaacggatccgaaaccttcctgatggattcgctgaacgcgcctgcccggacgcccttcattttcctggctctttcgggcgtggtgatgatcgtcgccctgaccacttcgcggaaggcccggggcgttatcaagacctcggtggatctggcccgtcaggatgccggcgacgagatgttcggttcgtcggggctggcccggagtatcgtgcgtgcttcgtcgtccctcgctaccggaatcgacaatgcgatgccgcagggactgaagcgctggctcgggaaacgcttcgataaggacgaggcgattctggagaacggtgccgctttcgatatggtacgtgcggcggtcaatctgctgctggccagcttgctgatcgcattgggcacctcgctcaagttgcctctttcgactacttacgtggcctttatggtggcgatgggttcttcgctggccgataaggcctggggccgcgagagcgccgtattccgcattacgggtgtgatttccgtgatcggcggctggttcattacggccggtgcggctttcgtggcgacgttcctgctcgcgcttgctatctattacggcggtacgatcgctatggtcgtggtcgtagcgctgacgattctcttcctgatacgcagcaatatccgctaccgccggaagatgaaggccgagcacgatgatgttttcaaggggatgatgacttcccgcgacaaggccgaagtgtggacgttgctccgccgacatatgaccgagtcgctcatggcatcggtaacgttcgccgaatcgaccttccgtcagattaccgacggtttgctgaaggaggatatcaagagcctgcgcaaagctgaacgggcgctcggaggagaaaaagacctgctcaagcgggtgcgtcgtcggcagatgctcgccatgcgccgtatcgaccgcaacctggcgctcgaaaagaacacctggttccacacggcgagcaatgcttccgagcaactttattactgtctcaaacgtctttgcgagccgtgcaaggagcatgtcggcaataacttcaacccgatgcccaaagtttatctgcgggagttcctgcccattcggacccggattttcaacctgatggtcgagattcgccgcatgatggagcagaacgactattcggatatcgagaacgtgctgatcgaagccgaagggttgcgcgaatccatctcgaccgagcgcaagacccagatgtaccgggtgcaggaggagggcaacagcctgcatgtttcgctcgtctatctgattacgctgcaggagtcccaggaattagtcgatacgttgcgtcagttgctgaaggcttgtaataagtttaccaaataagtaataagtcgtattttgaacctgcgatagacaaaaacagtgtcatttgcactgtttttgtctatatttgcggaacacgagatattttgaaagggttaaataggtttcaatcaatgtattatgcctgtggcccgtatctgacgacaagataaaagagaatagagttgcctatggagaattttacccgcagagtggccggatggtttttattatgccttgcgatgagtatgtcgttgtccgcagcggcccagcaacctccggtggagagggtggatgtggaaacgatacccgtgcaggacgatctggaagagatggtcatcgagtcgcagccggagagtacgaatcacccgaaacaggaaaaagatgtcgatacggatgacgacgatcgtgccgctgcggtgcggacggatgccgggcaggacgagaacgtcgggcagggcgagctttcgcagaaggacaggaggcgtgacaagggcgacggtcgtgagaacgacgatgaggatgatgacgaagatgaggatgatgacgaggacgaaggagtccgagttcagactcatttcgaaatttcggcagcttcgggagcacaaaaggaggagaaaaaggctccacccgtgacgatcgacctgttgggaacgctccgggccaaattcgagtaccagcccggcgagggcgatgcccgcttccaggttcgcaacgcccgcttcggcgtggccggcgagatctattcgaaactggcttactgtatggagatcgacctctcggacgagggaaagatcaagatggtcaatgcgtatctggggaccaaactctataagggactcggtttcacgatcggatttatgcgggtcccgtttaccatcgatgctcaccgttccccccatacgcagtattttgcgaaccgttcgttcatcgccaagcaggtgggcagcgtccgcgatgtcggagccaccctgggctggaaattcggcgagaaggttccgatcaacctgcaagtcggtatgttcaacgggtcgggtatcgacgaccagaaggatttctggaccgacaaattcaactatgcggcaaaggcgcagttcggttttgccgaggggatgaatttcgtggtgagctaccagacgacccgtcctgccgatacgcggattcacctttacgacgtggggtgctcctaccgcttgggcggttggttcttcgaggccgagtatctgcgtaaggagtatgcccgcaattcgttcgcgggcgtgaatgccttcgacggatttttctgttatgacctgcctttgcgccgtgtcttcaaaaagatgtcgttcgcaggccgttacgactatatgtccgatcacagcaacggcattcccgacgacaacggtctgctgttcgtcaatgatctggagcgtcatcgcgtcacggcaggcattacgttcagcttcggattgccttttatggccgatatccggctcaactatgagatgtatttttacgacaagggtgtcgtccccaaagtttccgaacacgacaagatcgtcctggaatttatggctcacttttagccgttttaaggatttgagaaaagaaaaccccgcattctatatgtgcggggttttcttttgccggttcggaaacatttcgtagctcgtgtcggagaagtccggaagggagggtagaggagtaggagtaggagtaggagtaggagtaggagtaggagtaggagtaggagtaggagtaggagtaggagtaggagtaggagtaggagtaggagtag

SEQ ID NO: 10405 - DNA, 17599 bp, Unknown
  gut microbiota DNA sequence
aactcaaattgaaggaattaaatgactatccctattttagagaaagttgtgttttgtaagaataccatgctttgcttgtacgtagattgtcaatagatatttgtctttccaatacgatgcacttttctccgtcaaattctaaatttccatttgtcaccattgtattgcgtgcataatgatgtagaaattcccaataagtattatcattcggtattgtacaaatttccctttctttcaactcattgttgccgatagtttcatacttgataatctctttgtctcgaacagaatataaatcactgttgaaaacaaaggtataaaagtatctgtaatcaatatcgcttttacgccattttctggatgattttggcccgtaaaatcgtatttcgatagtgtttttggcatattacaggcatttgtctcttattcaacagaagcgctgcccctctccacacctttgtcacatccgggaagagccacgagctgtttattgaaaccgacatagtctcgcgctctttgggacccctccgtgtagtacatgtgtattttgctgttggatttcataattatttgtattatggtgtatttatttgttttttactgtttgatattttgccctttccatatacggagcctcgaccgtggcgatgatactccaatctacacccgtgatttggaccgcgatccggtcgaaagtcgtcttcgggggaagatttcggatgtcggtaattaccagcggataagttttcggcttcggtttcggttcgggcaacggggtcgtgggatcccgtgccccttcattttcctgggtgtcgttgcatccggctgtcaggagtaccggggccagcagtgcgagtaatagggagcagaggcttatttttcggtgcgggatgattctggttatcataggtgtaggtctttcttggttgtctgaagcggcggttcgtgcggatttcggtcagccgggttctgtgcggtgccgattccgggagtaaccataaggcataccatcggaagtgtcggcgatatagatggcttatggctcttgcagatcggcgaaccagtaggtgtaggttttctccgtgccgtcgtcgagacgtatgtcgtaacttcgggagaaaggactccccagccggaaccggacgggcgtgcggaaaatcgggccgtcgtaacagaaggtgtggtattctccgttttcgccgttgggatccgtccccgcaggcagggaggcgatgaaatcggagtcgatggtccgcccgatggctgcggctcccagtccgtcggccatggtcgttactacgacggtttgcaggcccgaggccaggaaatcgtgcatcacggtttcggagctgcggccccaaaggggttcgacgacttcgatgccgtgcggagcgagttgctgttcccggtatttgcgaacgtcgtgcaggaagatgtcgccgaagatgaagtgcgttacaccttgtgctttgaaatgcgcgacggcttgcgacatagctgtctgataatcctccatatcgcctttgggcgtgagatcaaccgcatggaggggaatgccgatgcttgcggcctgtgcctgtaaaaggggaaaagggatcccatgcatggtcgagcgtcgggtgtcgtgattgacggtcgtcagcagggcgacgatttcgtagtgctgcgattcgatggcatgccacagtgcatgggcggaatccttgccgccgctccagttaaaaacagccttcgtacgttccatacggcaaaattagtcgatcggaggagatttcgtgtatcttttagggataaatcggagtgtgtgataatgattgtcatgataaaatgatgaatttcaccgtcttttggagattctcccaagacgatatttgaataggacgtgccgtgaaatactgctttgtaccgttttcatataaattttctgcagagggacgtcgatttgcgctttcggtttggttgtggtatggacttatttgcgactttttctgcgttccggataaaaaagtccgtgcaactattttttaattcccgaaagagtgctatatttgcacccgatttcgcgttcgatttcgatcgccgagaacgttctttgagaggagtgataaaataaaatgatcaaatttttggttgttaattttattttccctacttttgcaatccaaattggtctatatgccgatgtagctcagttggccagagcagctgatttgtaatcagctggtcgggggttcgaatccctccatcggctccaaaaaaccttgcggagccgacacggtggagttgagcgaaagcggtttagaaacataagggaagttaccagagtggccaaatggggcagactgtaaatctgctggcttacgccttcggtggttcgaatccatcacttcccactcaaaaagagcgccgaacgggttgcctgtatttccgagtcgatcgggaaggggaaactccttgcggtgcgtttttgcggaagtagctcagttgatagagcattagccttccaagctaagggtcgcgagtttgagcctcgtcttccgctccagaaatgcagttgacgcgtgatgcaaacctctttgaggagaggtattgcgtcgctcgtcactcttgcgaaacgacagacgttttgaagagcagaatttttataaaatcttaatacttttatactatggcaaaagaaaaattcgaccgttccaaaccgcatgtgaacatcggtactatcggtcacgttgatcacggtaagacgactcttactgcagcgatcaccaccgttctggctaaaaaaggcctttctgagcttcgttcgttcgattctatcgacaacgctcccgaggagaaagagcgtggtattacgatcaacacttcgcacgttgagtaccagactgcaaatcgtcactatgcacacgttgactgcccgggtcacgccgactatgtgaagaacatggttaccggtgccgcacagatggacggtgcgattctggttgttgccgcaaccgacggtccgatgcctcagaccaacgagcacgtgctgctggctcgccaggtgaacgtaccgaagatcgttgtgttcctgaacaaatgcgatatggtggacgatcccgagatgctcgacctggtcgagatggaggttcgtgatctgctgagcaaatacgactacgatggcgacaacgctcctatcatccgtggttccgcactgggtggtctgaacggcgaggctaagtgggaagacaagatcatggagctgatggatgcggttgataactatattccgattccgcagcgcgagaacgagaagccgttcctgatgcctgtcgaggacgtattctcgatcaccggccgtggtaccgtggttacgggccgtatcgaaaccggtgttatccacgtaggtgatcccgttgagatcatcggtctggaggagaagacgctgacttcgacttgtacgggtgtggagatgttccgcaagttgctcgatgagggcgaggccggtgacaacgtaggtctgctgctccgcggtatcgacaagaaagaggttaagcgcggtatggttgtcgctaaaccgggttctatcactccgcacaccaagttccaggctgaggtttatatcctgaagaaggaagaggggggccgtcacacgccgttccacaacaaataccgtccccagttctatctgcgtacgatggacgtaaccggtgaggttactcttcccgaaggcgtagatatggtgatgccgggcgaccacgtaacgatcaccgttgagttgatctacccggttgcactcaacgaaggtctgcgtttcgcaatccgcgagggtggccgtacggtaggtgcaggtcagattctgaagattctcgcctaatcccagggatatttcagtagtgcagggattgacttgcactactttttaggagcatagttcaagggtagaatagcggtctccaaaaccgttgatgggagttcgaatctctctgctcctgctaaaataaagtaagaagaatatgttcaattacgtaaaagaatcttataacgaattggttcataaagtgacctggccgacgttcgcacagttgcagaactcgacggtagtggtgatggtcgcttcgttgatcttcgccatcgtgattttggcgatggacatttcgtttgagaacattatggaggctatctacaggaccctggctaagctcggtcgttaattgtttttgtgaccatgagcgaaacagcgaaacagtggtatgtagttcgtacgatcggaggcaaggagaataaggtaaaagagtacatcgaatccgaaatccgccacagccacctggaagagtatatttcgcaggtgctgattccgaccgaaaaagtctatacgatccgtaacggtaagaaggtttccaaagagaaggtttcttatccgggatatgtattgattgaagccgcctttgtcggtcagatccctattatcattcgtaatattcccaacgtgctcggttttttgggtgacaccaaggaggacagccgcaagatgatcgctacgcccctgcgtccgcaggaggtcagccgcatcctggggcgtgtcgatgaattgagttcgatggaggaagaaaacgaaataccattctttgtcggcgaaaccatcaaagttacagatggtcctttttcaagcttccaaggtaccattgaggccgtcgacaacgagcgcaagaaactcacggtatcggtgaagatattcgggcgcaaaactcctatggagttgagtttcacacaagttgaaaaagaataattaaccaaggaaaactatggcaaaagaggttgctgcatttatcaaattgcagatcaaaggtggtgctgccaatccttctcccccggtgggaccagcattgggttcaaaaggagtcaatattatggacttctgcaagcagttcaatgccagaacacaagacaaggcgggaaaagttcttccggtcatcatcacggtttacagcgacaagtcgtttgacttcatcgtaaaacagccgcctgtagccattcaactcaaggaggcagccaaagctaaatcgggttccgcacagcccaaccgcgacaaggtcggtcaggtgacgtgggatcaggtgcgtgagatcgctcaggacaagatgtccgatatgaactgtttcacgatcgaggctgctatgcgtatgatcgctggtactgcgcgcagtatgggtatcaacgtcgttggagaatttcctaacaagtaattgcaattacaagaatgagtaagttgacaaaaaatcaaaaaattgcctacgcgaaggtcgagcccgaaaaggcttacaagcttacggaggccgcagctcttctgaaggagattacttttacgaaatttgatgcttcggtggatgttgatgtgcgtctgggcgtggatccgcgtaaggccaaccagatggtgagaggcgttgtgactcttcctcatggtacgggtaagcaggtacgggttctcgtgctctgtactccggaaaaagaggccgaagcgcaggctgccggtgccgactacgtaggtttggatgaatacgtcgagaagatcaagtccggttggacggatatcgatgtgatcatctgtacgccgaacgtgatgggtaaggtgggggcgctgggtcgtattctgggtccccgcggcctgatgccgaaccccaagaccggcacggttacgatggaagttggaaaggctgtaagtgaggtaaaatcgggtaagatcgacttcaaagtggacaagttcggtattatccacacttcagttggtaagatttcgttctctgcggagcagattgccgataacgtgaatacggtgctcagcatgattatgaaattgaaaccggctgcagcgaaaggttcttatgttaagagtattttcctctcgacgactatgagccctggcttgcagatcgatgctaaatcagtagaaactaaataagagggaggatttaagagatgacgaaggaagaaaaattggttgtcattgacagcctcgccgagcagctcaacgagtatcctcacttttacattacgaacatcgaggctttgaatgctgagcagactgcgtcgttgcgtcgcaagtgcttcgaaagcgacatcaagctggtggtcgtaaagaacacgcttcttgccaaagcgctggagcgggtggagaaagcggatgctgatttggtgaaagtattggagggttcgacctcggtaatgttcgcccacacgggcaagacgcctgcggtgctgatcaaggagttccgcaagacttccgacaagccggtactgaaagcggcgtacgtggaaggctgcgtgtatgtaggcgacaaccagttggacactctgtgcaacattaagagccgggaggagcttatcggcgatatcatcgccctgctgcaatctcctgcgaagaatgttatctctgcattgcagtctaatgcaggccaaaagattgcgggtatcgtaaagacgctcgaagaaagaaattaacaaacaagaattcaaacaaaatttaataagattgaacttatggcagatgtaaaaaaattagctgaagaattggtaaatttgacagttaaggaggtaaacgagttggctacgatcctcaaagaggagtacggcattgaacccgcagctgcagccgttgctgttgcagcgcctgctgccgccgccggagaggctgctgccgctgagaagagcgcattcgacgtgattctgaagaacgctggccagtcgaagctccaggttatcaaagttgtgaaggatatcgcaggcctgtcgctgggcgatgccaaggctttggttgatgctgctccgaaagcaatcaaggagggtgtttccaaggaggaggccgagtcgatcaaggctcagctcgaagaggcaggtgctgaagttgaggttaagtagtttctacttaaaagtttcaggacaaactcagggtatagggcttacgctgctgtaagctctatgccttttctggtctaaagattagaagtgccgacaggagctgtgtctggtctttggaagtttggatgctctcagggtgtaatctgtttacactgggggcattagcgggattagaagaggtccgctgcgggggcttcccccggaatacttaaaccttcaactttaatttggattttaccgatgtccacgacaaaaacacaacaaagagttagcttttcgacagtcaagaaccgggtgccttatcccgacttgctggaggtacagcttaaatcgttccgggattttttccagatggacaccacggccgagaatcgtaagaacgaggggctgtataaggtgtttcaggagaattttcccattaccgataccagaaacaatttcgttctggagttcatcgactactatatcgacccgccccgctattcgatcgaagagtgtctggaacgcggcctgacttatagtgttcccttaaaagccaaattgaaactatattgtaccgatgacgagcacgaagatttcggcgtggtcgtgcaggatgtctatttcggtacgattccctatatgaccgaacgtggtacgttcgtcatcaacggtgccgagcgcgtcatcgtttcgcagctccaccgctcgccgggcgtgttcttcggacagagcatgcacaccaacggtacgaagctctattcagctcgtatcatcccgttcaagggatcgtggatcgagttcgctaccgacatcaacaacgtgatgtacgcgtacatcgaccgtaagaaaaagttgcccgttacgaccctgctgcgtgccatcggtttcgaagccgatcagcagatcctcgagattttcgatctcgcggacgaagtgaaagtgaccaaagccgctctgaagaaggccgtcggccgcaagttggccgccagggttctttcgacctgggtcgaggatttcgtggacgaggatacgggcgaggtggtttcgatcgaacgtaacaacgtgatcgttgaccgagaaacggtgctccaggaagagcatatcgaccagattatcgagagcggtgccaagacgattctgctgcataaggagaatctgtcgggtatcgatttctctattatatacaatactttacagaaagatccgtgtaactccgaaaaagaagccgtggtgtatatctatcgccagttgcgtgcttcggagccgcccgacgaggctacggcccgcgacgtgatcgagaagctcttcttctcggacaagcgttacgacctgggcgatgtcggccgttatcggatcaacaagaagctcgatttggacatcgatccggcgatccgcacgctgacgcgcgaggacatcatcgccatcatcaagtacctgatccagctcatcaactcgaaagccgaggtggacgatatcgaccacctctcgaaccgtcgtgtccgcacggtgggcgagcagctttccaaccagttctcggtaggtttcgtgcgcatggcgcgtaccatccgcgagcgtatgaacgtgcgtgacaacgaagtcttcacgccggtggatctgatcaacgccaagacgctctcttcggtgatcaattcgttcttcggcacttcgcagctttcgcagttcatggaccagatcaacccgctggccgaaatcacgcacaagcgtcgtctgtcggccctcggtcccggcggtctttcgcgtgaccgtgccggtttcgaagtccgcgacgtgcactacacgcactacggccgtctttgcccgatcgagtctcccgaaggcccgaacatcggtctgatttcgtcgctctgcgtctatgccaagatctccgacatgggattcatcgagactccttaccgtaccgtgaccaacggacaggtggatctcaacaatgccgatatcaaatattattcggccgaagaggaggaggggcaggtggtcgcccagtcgaatgttccgatcgacgacgagggccatttcctgcagcccgaccgcatcaaggcccgtgaaggcgccgatttccccgttgtgacggcccaggaggtgacgctcatggacgtagctccgaaccagatcgcgtcgatcgcggcaagtctgatccccttcctggagcacgacgatgcgaaccgtgccctcatgggatcgaacatgatgcgccaggccgtgccgctggtgacctgcgagtcgccgatcgtcggtacgggtatcgaaaaggatatgatctccgacagccgcatccagatcatcgccgagggcgacggtgaggtggtatttgcggatgcaaccaagatccagatcaaataccagcggacggaagaggaggtgatctgctcgttcgagccggaaattacgacttatgaactgcctcgctaccgtcgtacgaaccagaatacgtcgatcacgttgaaaccggccgttctgacgggcgacaaggtgaccaaaggccagatcctgaccgaaggttattcgacgcagaagggcgagttggcgttgggtcgtaacctgaaggtggctttcatgccctggaagggttacaacttcgaggatgccatcgtgatttcggagcgtattcagcgcgaggacattttcacctcggtccatgtcgatgagtacatcatggaggtccgcgataccaagcgcggcgtcgaggagctgacttcggatattccgaacgtgagcgaggacgctaccaaggatctggatgccaacggtattatccgtataggcgccaacgtgcatccgggcgatatcctgatcggtaagatcactccgaaaggcgagagcgatccttcgcccgaggagaagctgctccgtgcgatcttcggcgacaaggccggcgacgtgaaggacgcttcgctcaaggcgcagccgtcgctgcacggtgtggtgatcgacacgaagctttacagccgtgccggcaaggagaacaagcgtgcgggaaagagctcggagaagctgcagatcgagaagctcgacgagaagttcgcagcccaggtcgccgacctgaccaagcagctcgtaaacaaactttatacgctgcttcagggcaagacgactacgggtatcaccgattacttcggcgtggaactctatcctgccggaacgaaattcacccagaagctgctcgatgagctctcccgcaaagtcaccgacgagaagtcgggcgttgcgatggggtacctgaacctggggacctgcaagtggacgggcgacagccacctcgatgcgctggtagagaagacgatcaacaactatacgatcgaatggaagaaggccgatgccgcgatcaagcgtgagaaatacaacctcaccaacggcgacgaactcccccagacgggcgtgatccagatggccaaggtctatatcgccaagaagcgcaagctgaaggtgggcgacaagatggcgggacgccacggcaacaagggtatcgtggcccgtgtcgtgcgcgacgaggatatgccgttcctcgaggacggtacgatcgtcgatatctgcctgaacccgctgggtgtgccttcgcgtatgaacctcggtcagatttacgaaaccgtgctcggctgggccggcaaggagctgggactgaagttcgctacgccgattttcgacggtgcttcgctcgaccagatcaacgaatatacggcgaaggcgggtattccgcgcagcgggcgtacttacctgtacgacggcggtacgggcgagaagttcgaccagccggctacggtgggcgtgatctacatgctcaagctcggccacatgatcgacgacaagatgcacgcccgttcgatcggtccctattcgcttatcacgcagcagccgctcggcggtaaggcgcagttcggcggtcagcgtttcggtgagatggaggtttgggcgctcgaaggcttcggcgccgccaatatcctgcaggagatcctgaccatcaagtcggatgacgtgatggggcgtgccaaggcttacgaggccatcgtcaaaggcgacaacctgcccaagccgggtattcccgaggcaatgaacgtgttgctgcacgagttgcgcggtctggccctttcggtcaagctggagtaagggaaggtaggtagtagtatatagaggataagaaaaaagcattgcattatgtcattcaataaagacaataaagtgaataacggttacagctccatttcgatcggactggcttcgccggaagagattctggcgcagtcgagcggcgaggtgctgaagcccgaaaccattaactatcgtacctacaagcctgaacgcgacggtcttttctgcgagcgtatcttcggtcccgtgaaagactacgagtgccattgcggcaagtacaagcgtatccgttacaagggcatcgtctgcgaccgttgcggcgtggaggtgaccgagaaaaaggtgcgccgcgagcgcatgggccacatttcgctggtggtgccggtggtgcatatctggtatttccgctccctgccctcgaagatcggctatctgctgggtatcccttccaagaagctggaggcgatcatctattacgagcgctatgtggtaatcaacgccggtgctgccgccgagcagggtgtggaacggttgcagaccctttcggagaaagagtatctggacatcgtgggcgcgctgccgaagggcaaccagtcgctcgatgacagcgatcccaacaagttcgtggcccagatgggtgccgaggcgatctatacgttgcttcagcaggtcgatctggattccatgtcctatgccctgcgtcacaaggcttcgacggaaacctcgcagcagcgcaagagcgaggcgctcaaatgcctgaatgtgatcgagatgttccgtgcttcggaaggccggaacaaacccgagtggatggtgctgaaggtgctgccggtgattcctcccgagctgcgcccgctggtgccgctggacggcggacgtttcgctacgtcggatctgaacgacctctaccgtcgcgtcattatccgtaacaaccgtctgaagcgtctgatcgagatcaaggctccggaggtgattctgcgcaacgagaaacgtatgttgcaggaggcggtcgattcgctgttcgacaactcgcgtaagagcaatgccgtgaagaacgagagcaaccgtgccctcaagtcgctgtccgactcgctcaagggtaagcagggacgtttccgccagaacttgctgggtaagcgtgtcgactattcggcccgttcggtcatcgtcgtcggtcctgaactgaagatgcacgagatgggtattccgaaggatatggcggccgaactctacaagccgttcgtaatccgcaagctcatcgagcgcggtatcgtcaagacggtgaaatcggccaagaagatcatcgaccggaaagaccccgttatctggggtattctggagaacgtcatcaaggggcatccggtgctgatgaaccgtgccccgacgttgcaccgtctgggtatccaggcctttcagcccaaactgatcgagggcaaggccatgcagttgcacccgttggcttgtacggcgttcaacgccgacttcgacggtgaccagatggccgtgcacctgccgctgggcaatgccgccattctggaggcccagctgctcatgctcggttcgcacaacgtcctgaaccccgcgaacggcgctcctatcaccgtgccttcgcaggacatggttctcggtctgtactatatcaccaagccccgcaagggcgtcaaaggcgaaggccttactttctatggtcccgaggaggcgatcatcgcttacaacgagaagcgggccgatctgcatgcgcaggtgaaatgtatggtcagcgacgtggacgagaacggcaacaaggtgcgggtactgaaggaaacgactatcggccgcatcctgttcaaccaggtggtgcccgaagaggtcggttatatcaatgaggtgcttactaagcgttcgctgcgcgacattatcgccgtggtgatgaagaaggcgggtgccgacaaggtggctgcattcctcgacgatatcaaggcgatggggtaccagatggccttccagggcggtctgtcgttcaacctcgatgccgttatcattcccgaggagaaggagaaattggtccaggagggatacgagcgtgccgacgaggtgatcgaatcctataacatgggtcttatcaccaacaacgaacgctacaaccagatcatcgacatctggaccaatatcaatacgaaactcaccaagacggtgatcgacaccctgatcaaggatgacgacggtttcaacccggtctatatgatgctggactccggagcccgtggttcgaaggagcagatccgtcagctttcgggtatgcgcggtctgatggccaagccgcagaagtcaggtgtcgagggcggtcagcaggtcatcgaaaacccgattctctcgaacttcaaggagggtctttcggtgctcgaatacttcatctctacgcacggtgcccgtaagggtttggccgatacggcgttgaaaacagccgatgccggttacctgacgcgccgtctggtggacgttgcgcaggatgtgatcatcaacgaggaggattgcggtacgctgcgcggtttgacggctacggccatcaagcgcaacgacgacgtggtgcagacgctctacgatcgcatcctgggccgcacggctctgaacgatgtgattcatccgctcacgggcgaggtgctctgcaaggccggtgaggagatcacggagtcgattgccgaggccatcgagaagtcgccgctggagtccgtcgaaatccgttcggtgcttacctgcgaatcgcgtcgcggcgtttgtgcgaagtgctacggacgcaacctggctacggcccgcatggtacagcgcggcgaagtggtcggcgtcatcgcggcacagtccatcggtgagccgggtacgcagctgaccctccgtacgttccacgtcggcggtgtggcggccggtacggctgtcgagaccaatgtggtttcgaaatacgagggtcgtctggagatcgacgagcttcgcaccgtgaagggcaagaatccgcagggagaagccgtggacatcgtcatttcgcgtcagtcggagtttcgcatcgtggatcccaagaccgaaatcgtactctatacgcacaacctgccttacggctcgatgctctatatgagcgatggcgccgaggtcaagaagggcgacatgatctgcgagtgggatccgtacaacgcggtaatcatctccgagcatgagggtaaagctgtttatgacagtgttatcgagggtgttacttaccgtgacgagcgcgatgagcagaccggtctttcggagaaggtaatcatcgaatccaaggacaagaccaagaaccccgtgatcaaggtgatcaacaaggagggcgaagaggtcaaatcctacaacttgccggtgtcggcccacgtggttgtcaaggacaatgcgaagatcaaggccggcgatatcctgatcaagatcccgcgtgccgtcggcaaatcgggcggcgatatcaccggtggtctgccgcgtgttacggagctgttcgaggcccgcaacccgtccaatccggccatcgtttcggagatcgacggcgaggtgaccttcggcaagatcaagcgcggtaaccgtgagatcatcatcacgtcgaaagagggcgacgtacgccgttacctggtgccgctgtcgcgtcagatcatcgttcaggagaacgactatgtgaaggccggcggtgcgctttcggacggtgccatcaccccgagcgatattctcaatatcctgggtctgacgaaggtgcaggagtacatcgtcaatgaggtgcaggaggtgtaccgtatgcagggcgtgaagatcaacgacaagcatttcgaggtgatcgtacgccagatgatgtcgaaagtcaagatcgaagatccgggcgatacccgcttcttcgaggatcagatcgtcgataaatgggagtttatggacgtgaacgacgagctttatgacaaggtggtcgtaacggatgccggcgactctacggccgtacagccggggcagattatctcgatgcgcaagttgcgtgatgagaattcgagcctcaagcgtcgtgacctgaatctcgtcaaggagcgtgatatcgttcctgcgacttccacgcagattctgcagggtattacccgtgccgcattgcagacttcgagcttcatttcggccgcttccttccaggagacgaccaaggtgctgaacgaagctgcgatccagggcaaggtcgatccgttggagaacctgaaggagaacgtgatttgcggccacctgattcccggtggtaccggtatgcgggagtacgacaatctggtcgtaggattgaaggaggatctggaggcgattcaggctgccaagtaatagataatttttatcataatcgaacgggagcggacggaaagtctgctcccgttttttatggggttttgtcacctgcttccggaagatggcggacttcgttgcggagttttttggtcgcttcgcagttcaagccatgtcgggcgaataaccgggacaccgaattgttctggctcgtttttgtggccgcaatggaagaacccggatcgaacggaactatttcggatgtcgatatgatcggcggtatgccgttgaaagctggctttcgatcggattatatggagagcaatatgcgaacaggacgaccgggtaggtcgtcctgaagagaagatagtagctccaccgcgactcgaacgcgaatttgaagtttaggaaacttccgttctatcccttgaactatggagccttgtaaaactgtccggcttcctcccgaagtcgtttcggccgggaggaatcgttggctttcggtcgggaagcgtgtgtcgtgccggagatcccgataaacagaaacagtgcgtaccgggaaggtacgcactgcaaatatagtgatttttacgggaaatcgggacggttttagaatttcaggttcactccgatagcgaaagtgtgcgccgacagggaatagttgcccgaaaaaggctggatagccttgtcgtttgccgtggtatgagcctggattttcgcttgctccggggccattccgcctgcgatgagctgcccgtatgtctgtgcatagaccgctttgtaagtgagtgaattgtagtagtcgcacgatcccgtccgctccgggtctgccgaggtgatatatccgtatgccagatcgatcgatacgtttttgcaggggttgatcgtcacgccggccgtgtaggatactttggtcatcgaaggggtttcggggttgaggaaatcgctccgtacggggctttcatctacgtacatacccaggcgtgccgtgacgaatttgcaggcgtggtattggacgccgatacgggtggccaccgtgttcttatagttcttgatgctcgtcggcagatcgtaaaccgatgccccggtcgtcgggtcggtaatatctacgtggagcgatttataggcgctccacaggacgtattggatgtcgaaagccatttcccacttcggggtcggtcggaagctcacgccccaagcgaggttggccggcagcgggagttccgtttcgacgcaagcgctgctcaagtcgggaatcattcccgttgcctggaggacctgcccgatttcgggagaggcatacaggaggttagccgtgccgcttgcgactttcatcttcactttcgaacgataggagaaaccgagggtccattccggggtgatgtcccacaggatacctacgtttacgccgatcgcagttttggcgtcgcctttgagccgggcggataccagggagcgatctccggcctgggtgaacagttcggcgtattgtccctgccctgcggcggtcagcaatccggcgatcgtattgttcgtcgcttcgccgacggggaacatggagcgcgacaggtcgaacgtaccccaggtgatcgtcatgccgacacctaccgagagtttattccagaatttgtaggagattgtcggctgcaacgtataggcttgcaggtcgatgctttggatcagatgtgctccgacccagttgtcgccccagttcatagacgagccgtaaggggtataaaatcccaggccgacggccagatttttggtggctttgtagttgaaataggcgtagagcggcgtcgaaatcttgttgtccgagtgggcttggatctgcggattgccccggtagtcgttgttcgacaggtacgttgcattggatttgatacccgtgatgccgaccgagaaggagaatcgggaggtttggaaggcggttcccgccgggttgaaatagatcgactcggaattgagtttcatacctgttcccacgtgtcccattcccaactgttttgcactcaaggtattcacctggtagccttcggcgcagaccgccgttgcgaacagcagggccgagatcgttagtagcagttgcttcataatcaaagttttagttgataatttgaaaaatatattgatttctgtggtaagtttatgcgctcggacgagtttcgaagcgattctcatccatgctttcaaaaatgcttgtcttaaaacggggcaaaagtacgaaaacaaactcaggtaggaaaatgttttgttcgtaatttcttaaaaaatggactaaagtggatataattggtcagaattggattcgattcaggatttgaaggagagg

SEQ ID NO: 10406 - DNA, 96778 bp, Unknown
  gut microbiota DNA sequence
ctcaatcggttaagtcaaaccgagaaaaatctaaaataattcgcactatgatcgttttccttgcagtcgcggctctgttggtcgcggcgatcgctctttttatgaatcgacccgaattcggacgtgctccgcgcggggagcggctggaacggatctggcgttcgcccaattaccgcgacggcgctttccgcaaccggcatgcgacgccgcagctcacatcgggaaagggctggtgggctacgatgtacgacttccttttcgagcgtaaggagcgcaatcgtcccgatcatgcgctgcctgcagtgaagaccgacctgaaagcgctcgatccgaaagagaacctgctggtctggttcggccactcctcctacctgattcaggcagacgggctgcgtattctggtcgatcccgttttcgaaacggcttcgcccttgccgtttttcaacagacctttcgaggggaccgatctctataaacccgaggatatgcctgggatcgacctgctggtcatcacacacgaccattgggaccatctcgactacggcacggtaacgaagctgcgcgaccgcacgggccgtgtcgtctgcccgctgggtgtgggcgagtatttcgaatattggggtttcgatccgcagcggatcacggagctcgattggggcgaacaagctgcgctcggcggcggctttacggtatattgccgtcccgcgaggcacttttccggacgtacgtttcgggcgaaccggacgctgtgggcttcgttcgtcgtcgaaactccgtcgcagcggattttcctcggcggcgacggcgggtacgatacccatttcgccgacgtcgcacgcgagtttccgaatctggatgtcgccgtgctcgaagacggccagtacagcgaggattggcgctatatccacatgcttccggccgatctgaagcgggccgtagaggacctcggcgcccggcgggtttttccggtgcacaattccaaatacgctctggcgcggcatccctgggacgagccgctgaacaatgcggctgcactcgcggcggagaatcccgaggcggggatcgtgctgccgcgaatcggcgagccggtacgtttggaccggtccgacacgctgccgggcaggtggtggacagctcccgaaaattgaaagagagcgaagatcagccttcgctctctttttttatctttctccggtattcccggcgctattttttgccctgattggctacggcttccatcagcttgcggatctgttcgggatcgcccagaaagtaatctttcaccagacgtaacttgtcgtcgaattcgaagacgtatggcacggccgtcgggaggttgagttccgagatcgccgcgtcggagatgcctttcaggtgtttgatgataccccgcaggctgttgccgtgcgctaccaccaggattgcgtcgtgaacggacagttcggggaaaatcacgcattgccagtagggcagcgcccgttcgatggtttgcttgagcgattcggtgcggggcagctcctcgtccgggatcccggcgtagcggggatcgaagcgcggattgcggggatcgtcttcggccagcggatcgggtgcgacgtcgtagctgcgccgccagatgtgcacctgctcttcgccgaagcgggccgccgtttcgctcttgttgagcccttgcagtacgccgtaatgtttctcgttgaggcgccagtttttctcgacggggatccattcctgatcgagccggtcgagaacacagttcagggtccggacggcccttttcaggtaggaggtgtaggctttgccgaaacggaatccttcggctttgagcaattctccggctttgagggcctcttcgacgcctttgtccgtgagatcgacgtccgtccatcccgtgaagcggttttcgcggttccacgcgctttcgccgtgccgcaacagtacgatttttttcatggtatgatctgtttttatttgtatttcacttcgttgaggcactctccgtgggagaatgcctgaatgttttcgagggtcgtgcgggcgatgttgtccagcgcctcgcgggtgaagaatccctggtgggaggtgaggatcacgttgttgaaggagagcaggcgtgccagcatgtcgtcgtccatgatccggtcggaggtgtcctgatagaagtaatccgcctcttcctcatagacatccagccccgccgctccgatctttttctccttgagtccttcgatcaggtcgctcgtgcggatcagctgcccgcgtcccgtgttgatgatgatgaccccgtctttcatttgaccgatggcttcggcgtcgatcatgtggagggttcggtccgtgaggggacagtgcagcgagatgatgtccgagcggcggtagagttcggtcagcggaacgtaggtcatacctgattcccgggcgaacgcctcgtcggggcaggggtcgtagccgaggacctccatcccgaaaccccgcaggatgcggatgagggcacgggcgatttttcccgtgccgacgatgccggccgttttgccgtgcatatcgaagccgaggaggccgtgcagggcgaaatttccgtcccgggtacgccagtaagcgcggtgtaccttccggttgagcgagagcatcagtgccacggcgtgttcggccacggcatagggcgaataggccggtacccggactaccgtgatgccgtgctcggcggcggctttcagatcgacgttgttgaaacccgcgcagcgcagggcgatcaaccgtacacccatgcgggccagctccccgacggttggggcatccgccgagtcattgacgaagatgcagaccgcatcggcgccttgtgccaggggtacgttgtcgatgttcaggtggctgcggtggtatttgatccgtatcccgtagtcggcgttgatccggtcgaacgattcgcggtcgtagggctgtgtcccgaaaaaaatggttttcatggcgtatatttcatttaattataacgtttttgtcgaggcggtattatccgttccgttcacggattgtgccaagagcgggagatttgccgcacaaaccgtatcgaaagcaatatgtccttcgttcggttcggatttcgaagcactctgtctcatggcactttttttgtcccgtttgtttcctgaataaacatgcaatgaggaatccgagagaacgcatacgcaacagtagggggtataaatggtggattttgagcctcgtgatgctcgggactttcatggccgtgatggacgtgacggtcgtgaacgtcggcctgccgaccattatgtcggtatttcacatccccatttcgaccgccgaatgggtcattacggcctatatgattaccatgacgctcatgctgccttcggcgggttggatcgccgaccgcatcggcaacaaacggatgtatattctggggttggtgctcttcaccttcggatcgtggctctgcggccgcgccgggagcgatatgttcctgatttcggcccgtgccctgcaaggcttcggcagcggcatcatccaatcgctcggcctggcgatcgttacccgggagtttcctccgcaacagcgggggctggccctggggttgtggtcggtggcggccgccgcttcgatctcgttcggtcctctgatcggcggttatctggtggacgattacagttggcacctgatcttcgatgtcaatgttcctgtgggactggcggccattctgtttgcaatttttatccagaaggagtggcgcggtgcccgtgcgggcagtttcgactggccgggttttctgtgcgtggtctgtttcatgccccttttgatcttcgcactggcccgaggcaattcgccttcgaatcccgaggggtggagttctccggaggtgatcggatgttttgcggttgcggctgcggcactcattgtctttatcgtccgggagctgcggtgcgaaaatccgctgttgaatctgaaactgctcggcgaacgtaatttcggcgtttcgatggctgtgctggcgatcttcggtatcggcatgctgggcggtacctatttgctgccgctttacatgcagaaggggctgggctatacggcgatcatggccggaagcgtttttctgcccgtcggcctgatccagggcgtgctttcgacctgctcgggattcctgacccgctacgtcaagccgcttttcatcgccgtgaccggcatcctggtcatgacgttgagtttctatttcgccagccggtttactcttcatactacgcatgcacagatcatgttggtactctatctgcgcggcttcggcatgggactgacctttgccccgctgaacgatttctcgctcatgaatttgagccagtgcgatatggcttcggcagccggtatctccaacagcatcaagcaactctcgggcagcgtcagcatcgccctgcttaccgttattctgaccggccgtacggcgttccattcggcgcagggcgggctctcttcggcggaaagctacgtggccggtatctccgacgatttccttttcgtcacattcgtttcgttggcctcggcactgcccttcctgtggctgctgcgcccgcgccgcaaggcggcttcgtttaagagcgaaggaacgggcacctgacgggtttgcttttatcgccttgaatccctatttttgtcccggggaatcgtcttttcccggaggattttgaaaaacgatcagcagacatacgttcccgatcccgaggtcgcttcgcggctcctggagtggtacggacgcgaggggcgcgacctcccctggcgtcgcacacgggacccttaccggatctggatttcggaagtgatcctgcaacagacccgcgtggcgcagggtatgtcctattatcatcgttttctcgaactgttccccgacgtcgcggccctcgcttcggctcccgaagatctggttctcaagtgctggcaggggctcggctactactcccgggcccggaacctgctggccgcagcccggcggatcgtggagacgcacggcggcgttttcccgacggcctatgccgacgtgcgggcattgcccggcgtgggcgactatacggctgcggcgatctgttcgatcgcatacgaggaaccctgtgccgcactcgacggcaatgtctttcgggtgctttcccgcctttacgatctcgatacgcccatcgatacgacttccggaaggaggacgttcgctgcgctggccgattcgctgatcgaccggcagcggccgggactttacaaccaggccattatggatttcggggctctttgctgtcttccggcacagccccgctgtacggagtgccctttgcgtgaccgctgtctggcttttgccgcccgtacggtcgatgtccgtcccgtcaaacaggggcgtacggctgtcgaaccccgctatttcaactacctgcacgtcgaatgcggcgatgaattggtgttgcgccgacggggtgccggcgacatttggcaggggttgtacgaatttccgctcatcgaaactcccgaaccggtggaatatacggtgctggccgcgatgccggagttttgcgctctcttcaaagatgccgggacggtatgccttgccgggaccgtcaagatgcccgtgcatcagctttcgcaccgggcgatccacgctgttttctaccggatcgtcgtggagcgctggacgccctccttgcgcgaaatgctcgtcatttcgcgcgaaaccctcggcgattacgccgtttcccgtcttacggagcgttatttatcccgctgattcttcgtctgtgcgtttgcggcacacggtttgccgtttgattgacgtgaaacctaacgaagaaaacgagataaattatgtttacaggtgtacaattcacgcatttcatccaagcaaatcccgcgctggccgtttttttgaccattgcgctgggatttttgttgggtaagctgcgcatccgcagcttttcgctcggaacggtgaccagcgtgctgctggtgggcgtgatcgtcgggcagcttcgtatcgagattcccgaaccggccaaaacccttttcttcctgatgttcctcttcgccgtgggatatgcggtcggcccgcagttcttccgggggttgaagaaggacggattgccgcaggtggccttcgccgtggtggtctgtttgctgtgtttggggtcggtatggctcttctcctggctgatgggctatacgctttcgcaggctgcggggctgctggccgggtcgcagacgatgtcggccgtgctgggcgtggcgaccgatacgatccgcgaactgccgggcggagcggaaaccgatctcagttcaatgcccgtttgttatgcggtaacttacatcttcggtacggcgggttccgcatgggtgttgagttcgatcggaccccggctgctgggcggcgtggcgaaggtgaagcagtctgcgcgcgatctggagcagaagatgggcgaagacgtcagcctgaaagccggcttcgacccggcggcccgggagatcgttttccgggttttcagcgccgataacgaatggttcgagggcgggcgtaccgtccacgaattcgaaaccgtcatgcagcgcgacggaaagcgtattttcgtcgaacggctctgccagcaggggaaggtcgtcgatgaggtgacaccccggacagtgatccgtccgggcgatcaactggtcgtcagcggtcgccgcgaatacgtcatcagcgaagagaagtggatcggtgccgaagtgtccgatacgacactgacgaattttgccgttcaggtccttcctgtcgtggtcaatcgcaagggggctgccggggagaggatcggaaaggtcttgtcggctaaattcatgcacggggtcaatatccggtccatcgtgcgggcgggtgtgaagatccccgtgcggagcggagccaaactcgatgccggcgaccggatcgaattggtcgggctgccgcaggacgtgcgacgtgccgccgcacagttgggtttcagcgatccggtgaagaccgagagcagcgttccgttgctggggctgggtatctgtctgggcggtctgatcttcggatggatgctggtggccaagataggggcgattcccctgagtctgaccgtgagcggcggcgtgctgctcgcaggtcttttctgcggctgggcccgttcgcggcgcccgactttgggaggcattcccgaacagaccgtgtggttcatgaacaatatgggactgaatactttcattgcgatcgtcggcatttcgaccggaccgtcgttcgtcgccggttttcagcaggtgggctggagccttttcctggtgggggccggtgccacgactcttcctctggtgctgggcgtgttgatcggccgttacctgttccgtttcaacgatgccctgacgctcggatgcgtcgccggagcgcgaacgactacggcggctctcggtgctgtcgaggatacgatcggcagcaatgtcccctcgctgggatataccatcacttatgccatcggtaatacgctgctcatcatctggggcgtggtgctcgtgttgctgttggcctgacggagccggtcgatgattcgggcgggtctatggttttccatagatccgctttttcgtggtgtgaatcgctaaaagcggatgaatccggcggatttttgaaaaaaaattgattacttagcattctcttttaacgattgcgacgatgagtgcgaaactggcgaagtacgaccggttgtacgagcagatcaagggctatgtacagacgaccgacgacatttgggcacggctggccacgatggaggccgtgttgcatcataagatgcagacttttttctggacaggggtgtatgcccttatcgacgacgaactgattgtccgctcgtaccaggggcccgttgcctgtcagaagctgcggcatcatacgggagtttgctgggcggcggtcagcacgggagaaaccgtgatcgtgcccgatgtggagcggtttccgggacatatcgcctgtaattcgaaatcccgcagcgagatcgtcctgccgattcgggaccgggaagggcgtgtgttcgcctgtctggatgtggacagcgaccggttggatgcgttcgaccgggaggatgaagaggggctgaaaaagattctctcccttctttttgattaggcggcgatcctgcgtgggcggcgtatcgtatcttcatcacccgcgaaatccggtgcgtctttcagcgattgtcgtataaaataaattccgctgacgcggatgtccgagcagattcggcgctgcgtcggctcgattatttttgtaccggacaggaggcggttcggcgatctttacgtacgaatccgtacgattattcgcctctttctgatccttgcacaaaaaaatcccgctgtattttacagcgggattttttttgtatttggcatttagcggattaccgttacgcggttctcctgctcggtcttgaacggagacttggtgtcgctgtaacccttgtactgcaggttctcggcttttacgcctttcgagatcaggtagtcgtaaaccttcttcgcacgctgctcggccaggcgggtattcacggccttcgaaccggtttggggatcggcatggccttcgatcacgtaaatcttgtttttcggcgcattcttgatttgggtagcgatgatgtccaggcggagtttctctttcggactcagctcggtctggccgatgttgaagaaggtgatgcctttgccggtcagatagatgtcatcggtgtaggcattgccgtcgagctggtcggccgggataggattgggaccccacttcgccatttcggcagctttcttcgcggcggcagcttcggcagcggcttttttcgcagctttgtttgctgcagccaggtcattggccagttcggcgttgtcggcctgtacagcagccagagccaggtcgcggtcggctatgacagcctggtaagccattacatcttcgacggtgtagggcgaagcctgtttgaagccgcggcggttgaaacggtacgtaagaccgatcgtggcactgtaggctgcggctactttctgtgttcccgaattcaggattgagggcatgttgctgctgggcagcatccaagccttgagttccagttcgatgtccagggccgggcatacgcggaacttgttcagcaaaccggccgtgaaagcgaacgagtggtccgtcccgtagccccagtcgcgctggaatttgtcggtgaaacccgatacgtggtaaccgaagccggcgaaaggcactgcgtaatagacgcggtcgtcacgctcgccgccgatccagttcgacagattcaccatgaagtccatgtgcgtgaagatgtacgggtctttcatgtattggttgccgaatgccgtgtcgttctggtactggccgccctgaatttgcaggcgggcacccattacggggtggaaccatttggtcagcgagaagtcggcctgccagttgatgtggttgaagcgcgacgatccgaaatcgtcttttcccagcgtgccgttgaagaccataatttgggcgcctccggcgacggtgatttcccagttgtcgaagaaacggttggtttcgtaaccggcccagcctcgtctcttgggctgttgctcttctacgacgatttcttctgcgacagcgacaacctgggctgaagcggctgcggcacaaagaacgagtgccatcgtaatgaataattttttcatgtagttcgaatttaatgtgtaataattttttgttttcgtgtatgtaaacccttacacgggagcttgattcatctctatatatccttttgtagaagctaaaagcaaagtccgggccaaaagcccggacctcgtttgacgttttgtatattttattgtctgtcggcagagaatcaaccgcatttcgagtacccgcaggacatgcacgtaagacacccgttctgataggccatcgtctcctggccgcagctcgggcacttgtccttggttttggtgccgtccgagatatattgcttcagtgctcgttccacacccagcttccaggtattgatggtttcgctgttcaggtggagcgattcgatgagcgatacgacgttggtgatcggcatgccgtggcgcaggacgcccgaaatcagcttggcgtagttccagaactcttcgttgaacaggcgcgaaatgccgccgatggtgttggtgtagccgtatcggtcgatatactggaagtcgtaccgtttcgaaccgttctcctcgcgtacctttataataaagcccttgttgattttgggcggaatatacatggcgtcctcttcgattttacccgtgaagatttcgtaagggcgtccatcctgcaggccgacgaaggcgatccagttttcgttgccgtttttgaaacgcacgatgtccgccgggatcgatttggggcgtttgagaatggtctgcccgttctcctcttttgccgcttttttcttcttatcgatcagtacgccttcgcggcagccgtcgcggtaaaccgttacccctttgcagccgcactcccaggccgtgcgatatacgtccgctacgagtgcttcggaaacgtcgttcggcagattgaccgtcaccgaaatcgagtgatcgacccacttctgaatttcgccctgcatcttgactttggccacccagtcgatgtcgttggccgtcgcgccgtgatagggcgatgcggctacccaccggttgagctcatcgtccgatatgtcttgcagtttcgaggtatcgtatccgttggcttcgagccatttgacgaagttgtggtgatagacgttgtactcttcgaacttttcgcccatatcgtccacgaaagccactttggcatcctggtccgaagggttgatcttgcggcgacgcttatagacgggacggaaaaccggttcgatgcccgacgtggtttgcgacatgagcgaggtggttcccgtaggggcgatggtcagcatggcgatattgcgtcgtccgtgttttaccatttcggcgtagagctccggatcggcctcccggatgcggccgatcatcgggttcttctcctccttgcgtgcatcgaaaatttcgaacgctccgcgctctgcggccatctttaccgaggcgcggtaggcttccagtgcgagggtcttctgtaccttcacggcgaaagccgtcgcttcgggcgtaccgtaacggagtcccaatgctgcgagcatgtcgccttcggccgtgatgcccagtcccgtacgacgtcctttgcgggccatcgtgcggatctttttccagagttcgagttccacgcggcgaatgtcttcgtcttcgggatcggcggcgatcttattgatgatcagctcgattttttccaattccaagtcgatgatgtcgtccatcatacgcatcgccttctcgacgtgttgcttgaatttctcgaagttgaacgacgcttctttggtgaaaggtttgtccacgtaactcaacaggttgatcgccagcaggcggcacgagtcgtaggggcagagcggaatttcgccgcaggggttggtcgccacggtcgtaaatccttcgtcggcatagcagtcgggaatactctcgcggatgatcgtgtcccagaacattacgcccggttcggccgatttccaggcgttgtggatgatcttgtcccaaagtttcttggcgtcgatatcctgctggtagagcggtttgtccgagtgaatcgggaactgttggtggtatttcttcccggcgagtgccgcacgcatgaattcgtcgtcgattttgaccgaaacattggcgccggtcaccttgctcgtatcgactttggcatcgatgaaacgctctgcgtcgggatgtttgatcgaaagggtgagcatcagagctccccggcgaccgtcctgggccacttcgcgcgtcgagttcgagtaacgctccatgaaggggacgataccggtcgaggtgagcgccgagttgagcaccggactacctgtggggcggatgtgcgaaaggtcgtgccccacgccgccgcgccgcttcatcagttgcacctgctcctcgtccatgcggaagatgccgccgtaggagtctgccggattcttgtggccgatgacgaagcagttcgaaagcgaagccgcttggaagttgttgccgataccggtcatgggaccgccttgcgggatgatgtagcggaagtggtcgagcagttcgaacacctcctgccggttcataggattggggtacttcttttcgatccgttcgatctcggcggcgatgcgctcgtgcatatcgcgcggagttttttcgtaaatatggccgtacgaatctttcagggcatatttgcttacccaaaccgtagcggccaggtcgtctccgtcgaaatattttttcgacgcttcgaccgcttcgttgtaggacacttcggtcgggaggcccggttgtttgttgcttgacatgatatcttgagttttatttctttatgtctttacaggaatcgggaccgatgcaggcttgttccgttcggtcccaactatacaaatttcctgcttttcttcgggattttcgaatcttcccgcgacaaattattccaaagttatcaacaatggataaaacgtgcgtcccagtgatccgggacgcacattttggaaaatggcggagtcgtcagtcctcgtttttcgcccggcaagccggtttgcccgtcgtgcatctatacggcgaagtgttgagcttactacctctgtaacatgattatataactttgttgcccctgtgtttgatgctccctgtcgggagttctttcccgctctgcggtccggtttccctccgaccggatagaaaacggcgcgtcggattcgcgcatatgcacgccgatcgcaggcggttgcggacaagcccggaaaacaacgcggaatctcgcgtcgttcgagtatatataatcgtttttatgggcggcgaagcgcggtccttccgtccgtgtttccgctgaccggacgcgttttacttgacggcgaccgcatcgatctcgaccttcgcacccatcggcagcttggatacctgatagcagatgcgtgcgggcatatccttcgtaaagaacgtggcgtaaacggcgttcatcgcggcgaaatcggcgatgtcggtgagcaggaccgtcgttttcacgatatcggcgtgggaataacccgcctcttcgaggatgtgccccagattggtgagcgactggcgcgtctggtcttcgatgctttcgggcatcgcgccggtggcgccgtcgatcgggagctgtcccgaaatgtagagcgtgtcgccgcactttactgcctgcgaataggggcccaccgctttgggggctttgggagatgcgataatggttttcatagtgtcgtattattttgattcgttaaaatttatggttgaattttctttttcgttgtacccggttctcgtttgatcggaaatagggtgcgtgctttttcggtcgcagggtatgtcggcaaccccgtttttcgccccgtttcgcatgaatgttcgattttaagttctattttcctgcgaccgggccgtttttatcttcgggaaccgtggcggagtacaaagttacgattattttggttatgtttgcacatattttgctggataaagattcaaaatcgatagcttatgacacgttttatgaaactggcggcactcgccgccctcgtgatgctcgtagcctcctgttgtccctgccgtaaacatcggaaaggcgacggcaaaccttttgtcggtaccgaatggcagcttgtgcagctcaacggtcgtgccgtaccggtggaaggcgacctctttaccgtcgttttcggtgaggacggacgtctttcggggctcggagcctgcaaccggtttatgggttcctaccaaaccacggaaacaggcggtctgaccgtcggtcagaacatggcttcgacccggatgttctgccccgatttggatcgggagcaggctttcggcgacgttttgtcgggagcgactcattatgaagtggacggcgatatgctgatgcttcttaccgacggcgaactgcgggctgttttgcaggccagatagccggattgcgcggattttgcggcggaggaacctttcggggttcctccgccggtatttacagggagttgtatttcctcttttgtccgttgtttcgatcatcgggtttttcgttccgtttttattattctattgtgtgaaatttctgttacagagaaataatgcgtcttatattttgttatatttgtaacaatataggatgcgtgcgggctgcgttgaagtagatccgcctggcgttcggttttcattcgttagtcacatggccggactttatttccatattcctttttgccgcaggatttgcgcctattgcgactttttcaaaagcgccgaggtggggcgtgtcgattccgtgctggatgcgatggggcgcgaattggacggagccgtcgattggctcgccgaccgtcggatccgcaccgtctatttcggcggcgggaccccgtcgctctgcgatcccgcccggttgcagggactggcggaccgggcggcgacgctgctggattgcagcggtgtggaggagtttaccgtcgaggccaatcccgacgatatgaccgaagagtggctggaggcgctggcccgtacgggtgcgaaccggttgagcgtgggcgtgcagtctttcgacgacgacgagctgcggctgatgaaccggcgccataccggtgcgcaggctgtcgaggctgtgcggagggcacaggctgcgggttttgcgaatctgacgatcgacctgatcttcggcgttccgggtttcggcgggaaagtgttgcaacgtaacctcgaacaggctctggcgctcggcgtgcagcatatttcggcataccatttgacagtagagaaaaatacggccttcgggcgtcgcctggagcgcgggcggttctccgaggtggacgaacaggtgagcgaacgcgaatacctggaggtgcaccgaacgctgaccggggctggattcgagcattacgaagtgtcgaattatgcgctgcccggttgccgggcccgtcacaatgccgcctattggtcgggcgacgagtatttgggcatcgggcctgcagcccactccttcaacgggaagtcgcgccgctgggccgctgcgtcgatcgacggctacctggccggtgccggaacggaggcgatttacgaacaggagcggcttacggagcgggatcgctacaacgagtatctgatgacccgcctgcgcacggccgagggactcgagctggctgcggtcgaaactcgtttcggaaaagagcgggcggagcggctgctgcggcaggcggagcctttcatggggatcggagagctgtgtttcgcggccggccgactggcgattccggcggagaagttcctggtgtcggatgccgtgatcggcgcgttgttcgaagcggacgactgattgttgaataatcaaatcattgaaatatgaacgatatgaaactgaaacccgactttctcttcgagatcagttgggaagtgtgcaataaggtgggcggtatcaataccgtgatagcgaccaaggcccggaccgtgtgcggaaagtacggcgaccgctattttacgatcggtcccgatctggggcagggggctgaccgggagttcgaggaggatccggcgctgctcaaggggtggcggcagaccctgtatgagaaggggatccgtgtccgtgtaggacattggcgcatcgtcgggcggccgcaggtgattctggtcgatttctcctcgctgattccccgcaaggacgacatcttgaagttcctttgggagagctaccgtgtggattcgatttcgggccagtgggattacatcgagccggtgttgttcggctatgccgccggactggtcgtagcttcctacgtcgaaactttctgtaagtccgcaaaccgggtcgcggctcatttccacgagtggatgaccgccgccggaggactttatctgcgtcgggagtcgccttacgtggccacgttgttcactacgcacgctaccgtactgggacgcagcatcgccggaaacggaatgccgctttatagggatctgactacgtacaatgcggacgacctggcccgtcgtttcggcgtgacggccaagcattcgatcgagaagaaggcggcggccaacagcgacgctttcctgaccgtgagcggaattacggctaccgaatgtcgctatttgctggggcacgaggtagatgtcgtgacgcccaacggttttgaggacgatttcgtttggcaggacgacgactatcggatcaaacgtgaagaggctcgtgcggctctgatcgctgtggcggaggcttgcctgggccgcaagttgcaggataatccgctgatcgtcggcacgagcggccgatacgaattccgcaataaggggctggatgtgctgctggagggtatgaagcggctggccgggttggaacgcctggatcgggaggtcgtgttgtatgtcatggtgcctgccgccaaccggggagcccgtgccgacttgcagaagcacctgcaggatccatcgcagccgatcgacggctcgcaatggccttgggcgacccattatctggagaatatgcagtgggatccgatcgtgcgggcgatcgacggcagtccgctggccgatcctgcatccaaagtgcatgtgattttcgtgccttcgtatttggatgaccgggacggtattttcgacaagagctattacgagttgctcgtgggcatggatctgaccctgtttccgtcgtattatgaaccctggggctatacaccgctcgagtcgatcgccttttccgtgccgaccgtcaccacgaccctcgccggattcggtctttggatcgaccggcgggaggagcatcccggcgtagcggtactttgccgcgaggatggcaacgacgacgaagtggcctctgcgctggccgatgccgtgctgcggttttcgcagttggatgccgctcgtgtggaggagatgcgtcgtgctgcgggcgtgctgtcgaaagaggcgctctggagccggcttttcgaggcgtacgaagaggcttacgcgctggcgctcgataatgccgacgtgcggatgaaccatgtggcttcgaatgcgacgccgctgcccgagcagcaggtcaagctcgtgcatcaggcgcttcgtccggagcgtccggagtggaaccggatgatggtggagaagaaccttcccgaacggctccgtccgctcgaggagctggcccacaacctttggtggtgctggaatcccggcgcccgggatctgttcgaggagatcgatcccgacctttggaaccgaagcgaacgtaatccgatcgcttttctcgatctgctgaccataaaccggctgaaagagttggagcgggacgagtcgttcctggcttcgcttgatgcggtatatgcgcagttcaagagctacatgtccgaaaaacccgatccggcgacaccgaagatcgcctatttctcgatggaatacggcttgcatgcttcgctgaagatctattcgggcggtttgggcatcctggccggcgactatctgaaggaggcgtccgacaagaacgtgccgatggtcgcggtcggactgctttaccggtacggttattttacccagaagctttccgctcaaggagcgcaggaggcgacttacgaggcccagaatttttcgaagctgccgatccagcccgtgcgcgatgcggtgggcaactgggcgaccgtgtcgattcccctgccgggacgtacgctgacggcccgcatctggctctgccgggtgggacgtaccgacttgtacctgctcgacgccgattacgaggccaatctcgaggaggatcgccgggtgacgcattacctgtacggcggcgattgggagaaccggctcaaacaggagattctgctgggtatcggcggtgtgcgggcgctccagtcgctgcatatcgcgcaagacgtttcccattgcaacgagggtcatgcggcatttctcgggctggagcgcatccgcaacctggtgatgcgccgccgactgactttcgccgaagcgctggaagtggttcgctcctcctcgctgtttacgacccatacgcccgtgccggcgggacacgatgcgttccctgaggcgatgatccggcagtatttgtcgcactatcccgaggagttgggcatcgactgggcgcagtttgtcggcttgggtcgcgtgaatccggaggatccgaacgaaaaattctcgatgtcggtgcttgcctgcaacctctcgcaggaggtcaacggcgtgtcgtggctgcacggcgaggtctccaaagagattttgggagatctgtggccggggtatttcaagaacgaactgcatatcggttacgtgaccaacggcgtgcatttcccgacctggacggctacgcgcctgcgccgtctgtatgcccgctattttcccgaagggttcgaggggcacgaatatcgtatttcggagtggaagaaggtgtacgacatcccggacgaagacctttggcaggagcgcatggtgctcaaagagaagctcgttcgcctgatccgccgccgctactgcgatcccgggcaggtgcgcatggattcgccccatcaggtcatgcaggtgctcgagagcatcaagcccgatgtgctgaagatcggttttgcgcgccgtttcgccacttacaaacgggcgttgctgctcttcaccgatctggatcgcctggcggccatcgtcaacaacaaggagcgtcccgtgcagtttatctttgcgggcaaggcgcatcccaacgatcagccgggacaggatctcatcaagcggatcatcgaagtcgcagccatgccgcagttctccggcaagatcatcttcctgcagaattacgacatggagctggcgcgtcgcctggtgcagggcgtggacgtgtggctcaatacccctactcgtccgctcgaggcgtcgggtacgtcgggtgaaaagtgcgtgatgaacggcgtgctgcagttttcggtgctcgacggctggtgggtcgaggggtataaggagggtgccggttgggcactgccgatggagacggtcttttccgatccgcagtatcagaacgaactcgacgccgagatgatttacaatacgatcgaagaggagatcgtgccgaaatactacgaccgggatgccgacggtattccccgtgcgtggatggcttcggtgaaaaaatgtattgccgaaatcgcttcgaacttcacgaccaaccggatgctgcgcgactacgaggtgcgtttctacaaccggctggcagcccgcaagcgggaactgtcggagaacgacttcgccgttgcgcgcgagatcgtcgcctggaagcacaaggtgctggctgcgtggcctgccgtgaagatcgtggacgtgcagcgtgcccgggtcggcgacaagccgatcttcataggacgcagttaccatttcgagcttacgctcgacctggccggactcgctccggaggacgtgggggccgaactggtcgtggcccgtcccgtggagccggaccgagtcgtggaggtcatccgtaccgtgccgctcagccaggtgcaggtttcgggcagccaggtgactttcaccttggactatgttcccgaacaggccgggatgttcgatatggcgctgcgcattttcccgcagaatccgatgttgccgcatcgtatggatttcgcactggtcaagtgggcgtgaaatagttgttgcaaaaaggttattttttgataaattccggattttcgccgagcttggacttgacggtctgcgaaaaaaacggtatctttcagaaaagatagcggcaggcggaaacaatcgtgcgggcttacggagaggcattgccgagccttccgctctcttacgccaagatcgttcgaaagaccgggctttttacgatccggccgaccggaaaaagaaacaggcgattcgacgggtccggcaggagtacgggctgatttagccgttccgctctgtcggaaatgaacataaagaacaaacagttatgtcggtacttacatttgataagaaggaactgggaaatctggagtattcgttgcagcgcgaaatgctggctacggatcgcagaggcggctatatgagcacgaccatcgtttgctgcaacacgcgcaagtaccatggtctgatggtggcacctatcgacgacagcgaccgcgcttacgtgctgctctcgtcggtggatgaaaccgtcgtgcacgacgggcaatccttcaatctggcgctgcaccgttttccgggaacctacgaacctcgggggcataagtacatcaccgatttcgaatatacgccgacaccgacgatcacctaccgcgtgggaagcatcgtgttgcggaaagagctgctctggatacacaaccgcacgcagttgatgatccgctatacgctgctggaggcgccgtccgacgtccggcttaggctccggcctttcttcgccttccgggacaaacatgcgctcacgcatgccaatatggaggccgacggacgttcccggccgattccgggcggggtgaagtgtcggttgtattccgattttccctggctgtacctgcaaaccgattgccgggatgcggagttcgtgccggctcccgactggtactataatttcgaatacgccagagagatcgagcgaggatacgagggagatgaggatctgcttacgacgggttatttcgaactcagtctcggtcggcggcaaagcgtgattttctctgcgtccgtcgaagccattcccgatcctgcggccatcggcggaatgtttgcggaggctctgagcgcccgcagccgcaaggtcgattttctgagttgcctgcgccactctgcccggcagttcgtcgttcgccgccaggacgggcgggccgaggtgctggccgggtatccctggtatgggcagatcggacgtcagacgcttgtggcgctgcccggcatcgcgctggagcagggacgcacggaggattgcctggatgtgctcgatacggtcgtgcgcggacgccgggacggtatgtttacgggttctttctcggctgccgaggctgcggatgctccgctttggtttttctgggtgcttcagcagttgcagcggacgctgggtgaggaggagatatggaagcgctacggtatcgtgatgaaagagctgctggcggcttatcgccggggcgtcggcggcgtggccgtgcacgataacggtttggtgtgggcctcggcgcccggtaaggcccttacctggatgaatgcgctggcaggcggtgtccccgtcgtgtcgcgggacgggtatccggtcgaaatcaacgcactttggtacaacgccgtgtgttatgcccttgagttggcttcccgtttcggcgaggaggagttcgtcggcgagtggaaagcgtggcccgagcggattcggaacgctttccgggagatgttctggagcgacgacgacgggtatctggccgatttcgtaggtcctgaagggccgaatcggtggattcgtccgaatatggtggtggcgtgcggtttggattacaagatgctcgatgaggagcagcaggcttcggtgcttcggatcgtggggcagcatttgctgacacccaaagggctgcgttcgctttcgccccgcaatcctcgctataagaaccgctgcgagggcgatgaagccgttcgtgcggaggcttcgatgaacggctccgtatgggtttggccgctttggttttatgtcaaggcttcgttcgacctcggtggccgtgagtttctgcctcgggcggaggagctgctcgcccgtttcggcgaggagattcagagttacggtatcggatcgatcaacgagctattcgacggcgatcctccgcatgcgccttggggcgccgtgtcgcaggcgtggagcgtcggggcggtgttgatgatccgtgaaacgaccgaacgctggcgtcgtcgccggggacacgggttgttgccgggtcttcggaaaaagcgctaaaggatgcgaaggaaaagaacttgccgccgcgtaaggtgtccgaaattttttctgtcggcccgggcaggccgggatggaggttgccgggaggggcgaccggtgtttcgcgaagtcgaataagttacgaaatgaaacgtgattatatactttgagtgtaccttttcgggggcgcagtgtcccaaattccctccgagaagcggatttaggggaagggtgcatggcggacacggtttcgggccgcgaataagcactccttggattcgatgctgcgaccgtcggataagggtacatggaaagatataattgttagaataaaaaaatagaatacaaatgagagtgttgatgttcggctgggagtttcctccccatatcgccggcgggctgggtacggcctgctacggtatgacgcgcggtcttgcacgcaacggcgtggaggtcgttttcgtcatgccgcgtgcctatggcgacgaggaccagcgcttcgtccgcgtggtgaatgcgagcgacgtggaaacgatcggtacgcgcgatcatgagttttccgaagagctgctcgagaaggtttcgttcatccacattgattcgaacatgttgccctacatctctccggaggagtatgccgcctaccacgatgagttcgttcgcagcggccggacacacgagtggaccgatgtatggaaacagcgctacaccttctccggaaaatacggcgccaacctgatggaggaggtcgcccggtatgcgatggtggcggcgcaggtggccaaagacctcgaagggcagttcgacgtgatccatgcccacgactggctgacttatttcgccggaatcgcggccaagcgggtttcgggcaagccgctggtggtgcacatgcacgccacggagttcgaccgcagcggcgagaatatcaaccgtcgggtctatgccatcgaaaaggcgggtatgcaggctgccgatcgggtgatcgcggtgtcggagctgacgcgccgcatcgtcatcggcaagtacggcattccggccgagaaggtcgtgacagtgcataacgccgtgcgtttcggcgagtcggaggatgctgtgccggagcgggccgtcaaggataaggtcgtcacctttctgggacgcatcacctaccagaaaggtcccgattatttcgtcgaggctgcggccaaggtgctgcagcgggttccggacgtgcgtttcgtcatggccggctcgggcgatctgatgaaccatgtggtgcggcgcgtggcccagttggggatcgccgaccgcttccatttcacggggttcctcaagggcggggaggtgcagcggatgttccgtctgtcggatgtctatgtcatgccttcggtgtcggagccgttcggtatttcgccgctcgaggccatgcgttcgggcgttcccgtgattatctcgcggcaaagcggtgtggcggaggtgctggattacgccattaaagtgaattactgggacgtggatgctctggccgatgccatttacgggcttcttacttatccggctctgggcaggatgttcgcttcgaaagggctggaagaggtgaccggactcaaatggaccaatgccgcagcgaagatcaagacggtttacgaaactgtcgtcgcggaggcgaacaattaaaatatttgcggagtatgaaaacgatttgtttctattttcaggtacaccagccctggcggctgaagcgttaccgtttcttcgatatgggccgtgaccacaactacctggacgacctgaccaatcgctcgatcatgcagaaggtcgcgcgtgagtgctatctgccgatgaatgccttgctgttcaatctgatccggcagagcgaggggcgtttccgctgtaccttttcgctgacggggctggccgtcgaacagatgcgggcgtatgcgcccgaggtgctcgattcgttccgccgcctggcccggacgggctgcgtggagttcctggccgaaacttactcccattcgctggcttcgctttcgtcgaaggaggatttcatgcagcaggttgcgctccataccgaactgatgaaaaaggagttcggcgttgcgccgaccgcctttcgcaataccgaactgatctattccgaccggatcggctccgatgtggccgagatgggtttcaagaccatgttggccgagggagcccgacacgtactgggatggaagtcgcccggctatgtttatgccaatgcgctcgaccagcgcttgaggctgttgctgcgcaattacaagctctcggacgacatcgcgttccgtttctccaaccgagggtgggaccaatggcctctcacggcggaaaaatacacggggtggctcgcttcggacgagctggagggggatgtggtcaatctcttcatggattacgaaaccttcggcgagcaccagcgtgccgatacgggtattttcgactttatgaaggcgctcgttccggctgttctgaagcgggaggggttggagttcgctacggtgagcgaagccgctgcgaaataccagcccgtcgccgtactccattgtccgcacgtgatgtcttgggcggacgaggaacgtgacatcacggcgtggctgggcaacgaattgcagaacgaagctttcggaaaactgtatgccctgcgggataagatcgcccggctgaaggatcccgatttcgaccacgtgtggaacttcatgcaggcttcggatcatttctattatatggcgaccaagtggttgtcggacggggacgtacatgcctatttcaatccttacgaatcgtcctacgatgcctttatcaactatatgaacgtgctttcggatttcgagatcgaagtggagaaggcgttcgaccggaagccgccggtccgcaagaccaaaccgtcgccgaggaaaaagggttccgatcgggagaaagccggggtgcgataatctttcggtcgaaaaaggcggtgcgtcataacaggcaaactgcttcgttattatcggtgtcacggctcgatcatgtgcgtcggtacacactcttcgccgtgaacctcgatgccttgtattttacctgtttttacatacctgaaaagggatgcgccgaatttctcgatttgacacgtcccttttttattccgggatgcctcggtccgtcagctgcccttgcgcttgaaccgcgacgggctgtagcccgtgtgttgtttgaaatatttgccgaagaacgactgggtcgagaagttgaggtgataggcgatctcctggatgctcatgcccgaatagcgcagcaggctttttgcctcgaggatcaccgcttcgtcgatccaccgggcggcggttttgccgctcacgtccttggaaacggtcgaaaggtatttgggggtgatgttgaggcggcgggcatagaaccggacgttcctctcctgtttgctgtattgccggactaattccatgaactcttcgaagatcacctcgccgcgccccaacttgaccgtgtttttctgctcgcgcatgttcagctcggtgatgatgtagaagactgcggtgaacaggcagcggatgatctcctgtctgtaatgttccttgtcgctggcaagaatcgtcttgatgagttggaacacctgtcggatctcgtgcgtgtcctggggtgtcacccgcaggcagggctgtttgccgaaacgcatatagacgggcagcgaggccgaaaggtctatctggatctcgttgatgaacgatttggaacaggcgacgaaataggccgccgcatcgctggtgctggccaccgtgcggatcacgcggtcggggctgaagaagacgatcgtgtcgggcacgacttcgtactcttccgtatcgatcgctacgacggccgaaccgctggccatgatgatcgccgagaagccgtcgatcagggcggggtagttgcccagcgtatcgcggtggatgtcgaacgaagcgatcaccaggtcgtccgacaggtaataaacgtcccgcatctcctgcttgatgcgggagatcgaaactttttgcagggttatctcgtccgccaccatgccagtttgctgatcagattcttgaaataggcgaaccggccccggcggggtgcctccgacagcgggcagacgacgcggagctcgttgtgcagacattcgatgtgcagcgggaaatcggcccccttctgtccgtccacgtcggtaggttcgttgatcggcgaggtgatgtcgagcgtgcgggctcggaaatgttttacctgcgagggccgaccgcccagcaggtgacggagcatcgatacgaccgagaagagcatgttgcgcctttgcagcaacagacagtcgaacataccgtccttaatgctcgagcggggggcaaggtggaatcctccggccgtttctccgttgaatatcaaggccatgagcgattcgaggtcgaaggctttgccgtcggcgagaatttgcagcggaatgccgtgtaccgagcggaactccttcacgccctcgatcaggtaggccagcttgccgatctggtgcttgcgtttgtccggcgtgcgctgggacgtggtggtgaagatgccgaaactgaagatattaacgaaatagtggtcgttcacgcgtccgcaatcgacccgctcttccgtgccgccgaggagttgcgccgccgccttgaccgggtttttctccatgccgagcgctccggcgaagtcgttggccgtacctgccgggatgatgcccagcagcaggtcgaggtgcttctccttcatccgattgaccacgtaattgaccgtgccgtcgccgcccgccacgaccaccagatcgaccgtttcgtgtccattgaaagggttgcggctgaaatcgatcgggccgtctacgatcgagtagccggcctgccggaacatttcgccgatggcttgggaatctttttcgatttttccttttcccgactgggggttatagagaaatagaacttgtttcattcgtacgcaatgggattattctggaatcatcatttcttgcatcgccggcgagcagtaaatttcgtagccgtctttcccgtcgtcgaggataaaatagaccttcgcgtcgggaattttccgggagagggcgatggccttgttcgcgcccaggctcaaatacatggtcgccatggcgtcggcttcggcgcagttgtccgcgaccacggtggcggaaagcaatcgtgacgtgacgctgcggcccgttgtcgggtcgatcgtgtgggatatcttattgcctgcggcgtcgcggtagaagcggcggtagttgcccgaagtggccaggcctccttcgctcatgcggatacgtccggtgagataggcgccgtcggacatattgccgtcgaagggagtttctatgccgatccgccagggaatgcctttgctgctgacaccctggcagcggcattcgccgccgatctccaccagatagttcttcgcgccgcagcgctccatgagggccgcgaccagatcgaccgtatagcccttggcgatcgagttgaaatcgagctgtacgcggggatcgtccttcacgagcctgccgtcccggatatggacgcgccggtaacctacgaattgcaggagcgaatcgaggttcggggtgcgttccgcctcgtgcccggcgaatccccaggcatcgaccagcggcttgaccgtcacgtcgtagtgaccttcgctcaagcggctgaaccgttcggccagacggaggttgtagatgatatgttcgtcgagcgagtcggtctctccccggttgatgcggctcagcagggaggtggagtcgaaaatcgacatcgaagccttggcttcggcgtcgatttgcataatggcccggtagagttcctgtgcggtgcagtccgtgatgtcgcccgttgcctggaaagtcgtacccagcatcgcgccgcttgccgtaaggtactctgcgcggcggtcgcagctcgctgcaaggaccagaacgataacggtgtagagcagcagggcgatctttttcatgttctatgtgtcttcttttttggcaaaaatagtgtttttcgctccggtttgcaaaaaaagagggctcttcagctaaaaaattgtattcgtttaagttggttattgtgaattaagttcgtacctttgcgccacgctctggcgttattcacggtaaggggaatgcgtcgtagagtggaactaaataaacttttgaaaatgggttatttatcagctgaaaaaaagcaggagcttttcggtaagtacggaaagtccaacaccgacacgggttctcccgagagccagatcgcgctgttctcgttccgtatcaaccaccttacggaacaccttcgtagcaacaaacacgacttcggtacacagcgtgcgttgctgcgtctggtcggcaagcgccgccagttgctggagtatttgaaagaggtcgatatcgagcgctaccgagcaatcatcaagacgctcaatctccgtaaatagtcccggaggcagaaaaatggggttggccaaagtttcttttggcagccccatttgtaatttggaacatacattttgacgtaaaaatatctatggaagaaaagaagttgtacaatgcagtccggaagacgatcacgctggcagacggccgcgaaatcatgatcgaaacgggcaaactggccaagcaggccgacggctccgtcgtggtgaagatgggagatacgatgctcctgggaacggtggtagccgccaaggacgcgaaacccgacactgattttatgccgctccaggtggagtataaggagaaatatgccgcttgcggtcgctatcccggcggtttcatgaagcgtgagggcaaggctaacgacagcgagatcctcgtagcccgtctgatcgaccgtgcgctgcgtcccctgtttccgtcggactatcacgccgaggtatatgtgaccgtaaacctgatttcggcggacaaagatattcagcccgatgctctggccggactggccgcatcggctgcactggctgtttcggacatcccgttcggcggtccgatttcggaggtgcgtgtggcccgtatcggcggtcagtacgtcatcaacccggccttctcgcagatgcaggacgccgatctggacatcatggtcggcggtaccatcgacaatattctgatggtcgagggcgagatgaaggaggtgtccgaggaggtgatgctcggagctatcaagttcgctcacgaagagattaagaaacactgtgccgtacagatcgaactttcgaaggagctgggcaaggacgtgaaacggacctattgccacgaggtgaatgatgaagagctgcgtcagaccatcattcgggagctttacgacaaggcttacgccatcgccaccagcggtacgatgaagcatgagcgcgaagatgccttcaatgcgctggaggccgagttcgccacccgtttttcggaagaggagctggtcgagaaggcaccgctgattcacaaatatttccacgacgacgtacagaagaaggccatgcgcaacatgatcctcgacgagggcaagcgcttggacggccgccgcacggacgaaatccgccccatctggtgcgaggtgggctacctgcccgccgctcacggttcggcgatcttcacgcgcggtgaaacgcagtcgctgactacggtgaccctcggtacgaagatggatgagaaggtcaaggacgaagtgctggtacagggtaccgagcaattcgtgctgcactataatttcccgcctttctcgacgggcgaggccaaagccgcccgcggcctgagccgccgcgagatcggtcatggccatctggcatggcgcgcactgaagccgatggttcccgtcggagaggaaaatccttatgccgtgcgtgtggtgtcggatattctcgagtcgaacggctcgtcgtcgatggcgacggtttgtgccggtacgctggcgctgatggatgccggcgtgaaactcaagaaacccgtttcgggtatcgccatgggtctgatttcggattccgctaccggtcgttgggcggtgctttccgacatcctgggcgatgaggaccacctgggcgacatggacttcaaggtgacgggtaccaaggacggtatcacggctacccagatggatatcaaggtcgatggcctttcgtacgaggtgctggccaaggcgctggaacaggctcgcgtgggccgtatgcacattctgggtaagctgacggagtgtatcgccgagccgcgtgcggattaccgtccgttcgtgccgcgtatcgtacagatcaccatcccgcaggatatgatcggtgccgtgatcggtcccggcggcaaggtgatccaggatattcagaagacgacgggtacgaccattaccatcaccgaaaccgacaacaagggcgtcgtggatatcttcggtctggacaaggaggcgatggatgcagccctgtcccgcatcaagagcatcgtggcgcagcccgaggtcggcgatgtatataacggcaaggttcgttcgatcatgccgttcggtgcgttcgtcgagatcatgccgggcaaggacgccctgctgcacatctcggagatcgactacaagcgtttcgaaacgatggaggagaccggcctgaaagagggggatatgatcgaggtgaaagtcatcggcatcgatcccaagaccaacaagctcaagctgtcgcaccgcgtgctgattccgcagcccgaaggctggacggagccggagcgccgtccccgcgagcgcggcgatcgcccgcgccgccgtcctgagcacaaggagtagaactctgcgggtccggatcgctgctacggagataatttcggttttgttcggaaattttggccggaatattgtacaatgtttgtagataatttttatatttgcattactccgtagcttttgtggggcagataaaacaggcataaatagaaaaagaaaggatttaacatttaatttttaaaagattagtttatgaaaaagctgatgaaattgagcttgctgctcgtggtcgttgctttgacgttttcgagctgtaattgcttcaagaagatggcaaagaacagcgatgatgtatcgctgacgtgtgcacctgaagtgctggtactgaataacggtgtggttgccgccgacattacggcacagttccccgtgaagtacttcaaccccaaagctatcgtgaaggttactccggtgatggtattcgagggcggagaagttgccggtactccgaaattcttccagggttcgaaagtgaaagagaactatacggtcgttgataagaagacgggcggtgtgttcaccatgcatgtcgagttcccttacgatgagcgtatgcagatttccgaactccagttgcgtgtcgaggctaaatgtccgggtagcgacgagtttacgctggttaatgccaatacgggcaaggtcgtgaaggccaaggagctcgaggctaaccccgcaatcgtacgcgagtgcggtctggtcgttgccgagggtgtgaataccctgcagcaggatctggcttacgccgatgcgatggcagctctgccgagcgactacaaacgcgtgactaccagcgtggacaagaccgagatcctctatgcgatcaacaaggctaacgtaaccaagaaagcgctgaaagacgccgatctggaggcattccaggcgaatgtggatgagaacctgaaaaacgaccgtgctacccagcatgttgccgtgaagggttatgcttctcccgacggtcccgtgaagttcaacgacacgctgtcgaaggagcgtagcgaatcgggcgacaaagttcttgcgaaactgctgaaaaattcgggtctggatatcgacgttgccgcttacggtgaggactgggaaggtttcaaggagctggtttcgaagtcgaacatcaaagacaaggatctgattctccaagttttgagcatgtactcctcttcgacgcagcgcgaggatgagatcaagaacatgtcttccgtattcaacgagctgaagaaagacattctgccgcagctccgtcgttcggtgatcgtgaacaccatcgatctggagggcaagaccgacgccgagatgatggcgcttgtcgaggctggcaagctggatcagctcaacctgaacgagctgctcttcgttgcggagtcgatcgcacaggacaacgctaccaagaacatcgtattggcttatgctgccgagaagtataacgacgcccgcgcttacaacaacctgggtatcgttcttacggaggaaggccgcacggctgatgctttgaaatgcttccagaaggccgctcagttgggcgaggcttccgaggcgctgaacaccaacctggctcttgccaacctggcgaacggcaatatggcagaggctcagaagtatgccaagggcgctgatgcaaaggcgaagagcctggtcaatgcagcacagggtaactacaacgacgctgccaagcagctcgacggtatgaatgccgctatcgctaacacgatgaacaaggactatgcggctgcaaagcgtgctatcgctaaggatatgagcgcagaggccgattacctgcgtgccgtgatcgcttcggaagagggcgatatgagaacggcagaggcacagttgaagagcgccgtgaagaaggatgagaagatggcgaagaaagccatgaaggatatccacttcaagaaactcttcgaagagggtctgaagttctaatccgttcggattcgatgaaaaatatccgcaccggaaacggtgcggatattttttgtctcgatttattgagcttgttcgattattggtcgtattttcgtccgcctttcttcaagacaggcatttttaggcccatgtcggttcataaatacggttggcgaccgggaggatcagttccgaatttggatcccaacaaggattccgagacatcactttttatttttatggacgtcggctggacaggatctgcacgatatttgcaatatcatacaggatatcgaaagaaatacggaaaagatctaaaattttattatttttgtcgaaagagcgttgagttcggccgtatttacttgtttttgccaggttttgatcggtttcggtgcaagccgatttgttgaagggctatcccgaacgagggatttgctttcggcggaatgaattttttgcacgcggtctgtgtaatcttgtaaagggaattgcggaacgggaacttcgatatttatttttattgcgctttgaaggcgaaccgcttgtgtaaataatagaaaattatggaatacgcgaatcatttgaaagaatatgcgtcggctatgagcgaggcgcaggtggccgaggaagtggatcgtatccgcaaagctgcggtacgaaaccatactccggaagtttacaaactctgttattcggcggtggatttaactacgctgtcgtgtacggactccgtggagtcggttacggaatttgccggcaaagccgtcaagttttaccaacagttccctcatcttcccaatgtggcgtcgatttgcatctatccgccgttcgtcgaaacggtcggtgtggtggtcgatggtacggatatgcgtatcacgagcgttgcgggcggatttccttcttcgcagacgtttctcgaggtgaaggttctcgaagtggctatggccgtcgagaacggagccgacgagatcgatatcgtcttgaacgtgggtaagatgttggaggggcattacgacgaggtcgctaacgaggtcgaggtgattcgtaccgagatgagtcccgaggtcgtgttaaaggtcattatcgagtccggagctttgaaaactcccgatctgatccgcaaggcatcgttgctttcgatgttcgccggggccgatttcgtcaagacttcgaccggcaagatcgatgtgtccgccacgcccgaagcggcggtggtgatgtgccaggcgatccgggattactatcggaaaacgggacgtaaggtgggcttcaagccggccggcggtgtccggagtgccgaagatgccgctttgtattatacgatcgtcgaggagattttgggcaaggagtggcttacgcccgaattgttccgtatcggagcttcgtcggcggccaataatctgcttacggctatcgaaggccgggaagtcaagtttttctgatccgaatgggcggatgaattaaaaaatagcggcaccaagaagtgccgctatttttcttgggaaaggttggggtaattaccgcatcggtacctcgatcagaagcaggctggctttcccgtccgtatggagggtgatgtcgttctgctcccaaatgcccatgccgtcccgggaggccagcttttcgttctcgaccgttacgtcgccttcgaggacgaagacgtaaagaccgtttccttcccggcgcatggcgtattcataggtatctttctccaggttcagggtgtggaaccaggccgactgatgaatccaagccgtatgctcggaaccattgccttcgggagccacgatcgtgcgcagctcattggtgcgtgccggagcgagcgtgatctcctcgtaacgggtcggaagtccgcgtcgatccgggaatacccatatctggaggaatttgacgggacggtcggggctgttgttgaattcgctgtggatgattcccgttccggccgtcattacctggatttccccggtgcgcagcaccgaagtatgtcccatgctgtcctgatgtcgtagttcgccctcgagcgggatggaaacgatctccatgttgtcgtggggatgtgcgccgaaaccctctcctccggctacggtatcgtcgttgagtacgcgcaatgcgccgaaatggatgcgctcgggatcgtggtagtctgcaaaactgaacgtatggtagctgtcgagccaaccgtggtcggaatgacctcgtgtgccggctctgtggattacttttttcataatataatggattgattataagaaggtgttgcaaatagtgttccacgataccgcttgtagggcagggctgtccgaatataggttgccgaaggggagtgatcgtgcggtcgagcgacaaagagaacggtccgggcgttagccccggaccgttctctttgtgaaaatagcttgctgctcgtcgtcttatttgagatgcggacctgcagctacgagtttcttgccttcggcgttgccggtgaacttctcgaagttcttgacgaaacgaccggccagatctgccgccttctcgtcccattccttggcgttcttgtacgtgtcgcgcggatcgagaatcttgggatccacgcccggaagtgcggtcgggatcttgaaatcgaataccggcagcgtcttggtcggagccttgtcgatcgaaccgtccaggatggcgtcgatgatgccgcgcgtatccttgatcgagatacgtttgcccgtaccgttccagcccgtattgacgaggtaggccgtagcgcccgattgcttcatgcgttttaccagctcctcaccgtatttggtcggatgcagcgagaggaacgctgcaccgaagcaggccgagaaggtcggcgtcggctcggtgataccgcgttcggtaccggccaacttggcggtgaagcccgagaggaagtagtatttggtctgttccggagtcaggatcgaaaccgggggcagtacgccgaaggcgtcggccgaaaggaagatcaccttcttggctgccggagctttcgatacgggcttcacgatgttatcgatgtggaagatcgggtacgatacgcgagtgttctccgtcacggacttgtccgcgaagtcgatcttacctttcttgtccaccgtaacgttctccagcagggcgttggggcggatcgcgttccagatatcgggctcgttctctttcgagaggttgatgactttggcatagcatccgccctcgaagttgaagacaccgtcgtcgtcccaaccgtgctcgtcgtcgccgatcagctcgcgcttcgggtcggtcgaaagggtggttttgcccgttcccgacagaccgaagaagatggcggtgttcttgccctccttgtcggtgttggccgagcagtgcatcgacgcgatgcccttcagcggcagcaggtagttcatgtaggagaacatacccttcttcatttcgccgccgtaccaggtgttgatgattacctgcattttttcggtgaggttgaacacgaccgccgtttccgagttgagtccgagttccttgtagttcttgactttggctttcgaggcgttcagcaccacgaaatcgggttcgccgtatttctccagctcctcgtccgtcgggcggatgaacatgtttttcacgaaatgcgcctgccaagcgacctccatgatgaagcggatcttcagacgggtgttctcgttggctccgcagaacgtgtccacgacgaagagcttcttgttcgacaactcttcgacagcgatctttttcagctccttccaggtcttcttcgtcaccggtttgttgtcgttcttgtattcgggcgaggtccaccaaatagtatctttggtggtttcgtccatgacgaagaacttgtctttcggggaacgacccgtgtaaacgccggtcatcacgttcacggcacccatttcggttacctgacccttttcataaccgcgcaggcccttgcgggtctcctcgcggtagagttcgtcgtacgacgggttgtagattacttccgtagtacccgtgatgccgtactgtttcaaattgattttagccataattattgatttaaattaatcctcttatttcacttgacagcggttgttcgtttatgaacgatgctcgcaaagttaaagatttttttcgaatgtgaaaatattaacagtaggtttatcgtttttcccggcgaatcattcggctgtcgatggcgtttacgatcaccgcgatcgcaccgtcgcccgttacgttggtcgccgtaccgaaactgtccatggcaatgtaggtggcgatcatcagtccgatcatattttcgtcgaacccgagcattgactccagcaatccgatcgcagccatgatggctccgcccggtacgcccggtgcggcgatcatcgtaatgcccagcagcaggatgaaacccgagtaggtgcccatcgaaacgtccagtccggagagcatcatcaccgcgagcgagcaggcgacgatcttcatcatcgaacccgagaggtggatcgtggcgcagagcgggacgacgaatcccgccacttcggggcggacgccgattttgaccgtctgtgccagcgtcacggggatcgtggctgccgacgattgcgtaccgagggccgtcatgtaggcggtcatcatcgtgcggagcatcttcaacggattctgccttgccacgaggcccgcgatcgagaactggatcagcagcaggacgaccgtcatcacgaagataatcacgatcaacttgaggaaaatgcccagaatacccgatacctgccccgactgagtcatcgagaggaagatgccgaagatgtagaagggcagcagcgggatgatgaccttcgagatgacgcgctcgatgatgagtttgaaatcatccatcatgcccttgagcttgtcgctgtggatgtaagccatgcccagtcccagcacgaaggcgagaatgagggcggtcatcacgcccatcaacgggggcatttcgaccgtgaagaacggttgcaggggtgttgcggcggtttctcccggggcgctcatctccgtaccgcccaatagccggggtaatatcccgaaacttgtgaagaaagttccgaatcccgaaaacagggtaaaggcataggccagggctgcggtgattaccagcagccgtcctgccttgctacccaggtcggcgatgcccggagccacgaggcccaggatcagcagcgggatgacgaagttcagaaaattgccgaaaatgttgttgaaggtcaatgcgattcgggtgaaccactcgggaacgaagaggccgaatacgatgcccagcgcgatagccaggagcactttgggaagtaagccgaatttatgcttcataaggtgtcgtttcattggttttcggttggacgattcatgcgtcggggccttgggccgatcgtgttcccgattcggaccgaattcgtttttcggaggtcccgttgcatgccgtttttctattaacgtataaaaagggagcaatatttgtgcaaagaagagaatattttctaattttgtcaatatgactgcactgtatagcgatattattttcggcccgatccattcccgcagattgggtctgtctttgggtgtcaatctgttacccactcaatcgaagttgtgtagcttcgattgcatttattgtgaatgcggctggaatgccgaacatccgggcgcccgccggttcaattcgcgcgaggacgtgcgtaccatgctcggagcgaccctgcgtcagatggtttccgaaggtacgccgcccgacgtgattactttcgccggtaacggcgagccgacgatgcaccccgatttcgaggcgatcatcgacgatacgatcgtcttgcgggacgaaatttgcccttcggcgcggatttcggtgttgagcaatgcgacgcagatcggccgcgagagcgtgcgccgggccttgcgtcgggtcgataacaacatcctgaaactcgattccgctttcgacgatacggttcggctcatcaataacccgtgcgggacctattcggtggctgaggtggtgaagaacatgaaactgttcgacgggcagatgatcctgcagacgatgttcctgcggggcgagtgcgagggccgcacggtggataacacgaccgagcgggaggtcgcggcctggttgaagctggtcgaagagatccggccccgtcaggtgatggtctattcgctcgaccgcgacactccgtgcaaaaccttgcagaaagtcccccgcgaagatttgcaggcgatcgctgcccgggtcgaggcgctgggaatcccctgctcggtggcgtaacgcaaagaagaacgacgggggaatttcagaccccttcgaagaatttgtcgatcggacgttatttattgtctgtattatagagggggcgaagattttatctgtgtcttgttacattgtttgctttgctctcgttggcacttttcgcatgtgacaagggcatccgggaggaagcgatcgatgccgaaaatatcttgggtaggtggcgtgcggtcgaggagccggattacgattgggatgattcggacgacgatggagcctgtgatgtgcccatgctttggggattatgactttcgaacacgatggacggggtgtggccgataacggggagcattttgcctggagtctgacaggaagacggataactgtggattacggatttattccggcacggcttacggtgtcggaaatttgcgagcggcgaatggtgtggaaggttctcgcaacagaagcaggctcggtaaagtattacggacggatcgttttcgagcggttgtgattattccgtcgggaagaaaaataaagcgagaggaatcgattcctctcgctttattcgttgtcgcagtgtggtttatttctccagcacgacgctcactttttcgagcttcccgcccagcgggggcgccagcttcgaaaccgtacagcggatatggcggatttgcggaaaccgggcatagagggcatccatgatgttcatcgacacgcgttcgatcgtgcgctgggtgacgcgcatctgttcgcgtacggtttcgtaaaccaacaggtaattgaccgctttttccacgcagtcctcgctcgccacttcccccagctcggccgtgatctccagatcgaccgtgaagcggttgcccacttgctgttccaggtcgtaacagccgtggaaagcccggaactccatccggttcaaaacgatacggtattccatcttattcggcgattaccaggtagtagtttttcttgcctttctgtacgagcaggtatttcccgtcgatcaggtcgctttcggcgattgcacgcatggggtcggccaccttctccttgttgaggctcacgccgccggcctgtaccatcttgcggcattcgcccttcgaggggaagatatcgctccgctcggcgcacagctcgatgaagggcagcccgatcagttccgcacgggcgattttgtattgcgggactccttcgaaaacctgcagcagggtctgttcgtcgagtttgcgaagcgcttcggaggtagccccgccgaagagaatgttcgatgcctcgaccgctttttcgtactcctcctgagagtggatcatcacggtaacctcctgcgccagccgtttttgcaggattcgcaggtgaggggctgcgtcgtgttcggcgatcaggtcgtcgatggtctgtttatcgagcagcgtgaagatcttgatgtagcgcttggcgtcctcgtcgctggtgttgagccagaactggtagaacttgtaaggcgacgtataacgcgggtcgagccatacgttgccgctctcggtcttgccgaacttggtgccgtcggctttggtaatcagcgggcaggtgagggcgaaagcctcgccgccggccttgcggcggatcagctctgtgccggtggtgatgttgccccactggtcggctccgcccaactggagtttgcagcctgccgtttcgtacagatgcaggaagtcgtaagcctgtacgagctggtaggtgaactcggtgaacgacatcccttcgccttcgccgttgaagcgtttctttaccgaatctttggccatcatgtagttcacggtaatcagcttgccgatgtcgcggatgaaatccaggaaggtgattcccttcatccagtcgtagttgttcaccagcatcgccgcgttgggagcgtccgattcgaaatcgagcagcttggcgagctgtttcttgatcgcctcctggttgtggcggagggtcttttcgtcgagcaggttgcgctcctgcgatttgccgctggggtcgccgatcatgcccgtcgcgccgcccaccagagcgatcggacggtgtccgcacatctggaagtgcttgaggatcattacactcaccaggtgtccgatgtgcagcgaatccgccgtcgggtcgatgcccacgtaagctgtggacatctctttctgaagttgttcctgtgtgcccggcatgatcgagtgaatcataccgcgccattccaattcttcgacaaagttcttaattgccatttgtgtatttggttttactttattttatgctttattctacctccaggtcgagcgcccggcgcaactcggccagcagaggatttttttcggtcatatacttgacccggtcttcgagtttgatcgggcgggcggcccggatctcttcattgaccgtaacgtcgagctccaacataccctgcacgccggacgtttcggcgatacggagcagcagttcggttttgttgcgcaggatctcttcgcgcagggcttccgacggaactgcgatacggatcacgtgtccctgaaattgcatccgttcgaacgccgcgacgaagcgcggacgcatctcgcggacgagcgtgaggattttttcacgggtcgtttcgagtttttcggcactgagcgggtcgatgaccggctggggtgctgcggcatgcacggcggtttccgtatccggttccggggctgcgtcgtttatcagcgccgaaatggagattcccgatgcgagtctggactgtatgggacggggacgcgccgtttgcggttgtgtcgaaaccggcgttgctgcggcctgcgttcgttccgggggcggctgaatggacggcgtcggcattgcggatgtacgggcagcggccgatgtcgccggaggcgcgggatcggctgcggcttttgccgcaggcgttgcagccggagcggatgccgcgattccgggcgaagattctgccgccgcagccgtcggccgttggaccgtagccggttgcggagcgggcgcgggagccgtctgttgtgtcgattgcggacgggccggtgcggattgcgcgggggcggtccgaaccagttccggcaacggaagatttacgggatcgacggggctattttttttttgaccgagaccggcgatcttcatcagtcccagttcgacgagcagccgttggttggacgattgcctgattttgccgtcgaggtccgtgagcagcgatatggcgccgaaaagaaattcgggagggcaggcggccgcctgcgtccggtatcgttccatcagcgtaccggtaaattccagcagccggagcgaaggctcgttgcgggccaccagcaggtcgcgcaggtggcggttgagtcccgccatgaaagtctggccggagaatccccgtgcgagcacgttgtcgaaagagagcagcgcctcgacatagttgcccgacaggagcgtctcggtcatgctgaagtaggtgtcgtagtccaatacgttgagcgtctgggccacctcctgatagcggagttcctgcccgcagaacgaaacggccttgtcgaacatcgacagggcgtcgcgcatgccgccgtcggctttctgtgcgatcaggttgagcgactcgtcgtcggcggtgattccctcctgcgaggcgatgtatttgaggtattccacggagtcctcgacgcggatgcggttgaagtcgtagatctggcagcgggagaggatcgtagggatgatcttgtgtttttcggtggtcgccaggatgaagatggcgtgtgcgggcggctcctcgagcgtcttgaggaaggcgttgaaggcggccgccgagagcatgtggacctcgtcgatgatgaagaccgagtagcgtcccacctgcgggatgatgcgcacctgttcgatgagcgagcggatgtcctcgaccgagttgttcgacgcggcgtctagctcgtggatgttgagcgagcgcccgtcgttgaagctgcggcacgattcgcacgtgttgcaggcttcggccccttcgggatgcagacagttgatcgccttggcgaagatgcgggcgcaggtcgtcttgcccacgccgcgcggcccgcagaagaggtaggcgtgggccagttggccgcgttcgatcgcgttcttcagggtcgaggtaatgtgcttctgccccacgaccgaagagaaagtggcggggcggtatttgcgtgcgctgacgataaaatcactcatggcggaacaaagatagtgaaagccgggcgaaatcgggaaaatttattttcgaagatttccgaggcgcttcctatcttctgcaaagatagtgaaagccgggtgctgcgccaaatttatttgcactttgtcgggtggaatatgcggaatgaagcgcggtgtatcgttttcgaaaatccgtttcccgcaccggcgatctgttcggtaattttcgcaggtgactcgcttcggtgcgagtatgcctcaagaataaagaaagacggaagccgaaactcccgtctttcgcagtgtgtcgccgcaggtcgccttactcttccatctgaaccgatccgtcgggcagcacattgaaggtgacttcgtaatactggaccgatttcttgccggcgctttcgacgatctccttgccgttttcggttatgttcatactgaactctgctttcacttcgccgaacgttttatttcggtcgaggaattcgttgcccgaaggaaccgtttcctgaatcaggtagtcgccgatgctcttgaacgtatagttttcggggatcatggctttggcctcttcgtactgtttgcggatggcttcgacgttgatcgaggccggagtcaggcctttgactttttcgaaatcgagtttcccgctcagcccgcctgcttcgttcaggtcggagatgttgcctttgccgggaccggagagcgtgaaggtctgcgagaaacagtcgccggccttgtttaccatttcgacgaataaaactgtcaggttattctccagctcgtccgcctccatccagcggatttcatatattttccactcgtcgaagttgatattcttttcgagagtttcgacgatgagttgcgtcgcttcgtcggaatccattttcggagcgctgatgcccaggttgttgcatgaagagatcagagtcgcgatgcagagcgatgccgtaatggcgaggataagttttttcattctgtctgattagataatttggttttgtcctgcaaaggtagccattttgtcattacgatatcgtccgggatatgacaaaatcggacaggatggcagaagttgcagacttggcagatattttgcgataggtaaggcaaagaaatgaattgaaaataatataatgcactatgaacattaattctttaactattaaggcgcaagaggcgctgcaggctgcggtgtctcttgccagggagcagggcaatcaggctgtcgaaccgctgcacctgctcaatgtgctcgtgcgcgaggacgattcgctgtcggtatttctgctggggcgtgtcggcgtaaacgtgcggggactgcgcggcgaagtggagcgggccgtgcgggggctgccccatgtttcgggaggcggcgaacagttcttttcgcaggatacgaccaaagtaatccagcgtgccgtcgattttaccaagaatttcggggacaagtacgcttcggtagagcatctgctgctgggactgatcgccgagcggggtactgccgccgatctgctgaaaggcgccggggcgactgaaaaggagttgctcgaggcgattcgggtgttccgcaagggggcgaccgtcgattcgcagacggcgtcgcaggagttcgatgccctgggcaagtatgcgatcaatctgaacgagatggcccgcagcggcaagctcgacccggtcatcggccgcgatgaggagattcgccgtgtattgcagattctttcgcgccgtaccaaaaacaatccgatgctggtcggagaacccggcgtgggtaagacggccattgcggagggtatcgcccaccggatcgtgaacggggacgtgccggagaacctgcgctcgaaggtgatctattcgctcgacatgggcgccctgatcgccggggccaagtaccagggtgagttcgaggagcgtctgaaggccgtcgtgcaggaggtgaccgccagcgagggcgagatattgctcttcatcgacgaaattcatacgctggtcggagccggcaagtcgtcgggtgcgatggatgccgccaatattctcaaaccggccctggcgcgcggtgagctgcgtacgatcggtgctacgacgctcgacgagttccagaaatatttcgagcaggacaaggcgctcgagcgtcgttttcagaaagtcatggtcgatgaaccgacggccgaggatgcgatttcgatcctgcgcggactgaaggatcgttacgagaaccaccatcaggtgcggatcaaggacgaggcgatcgttgcggccgtcgaactttcgcagcgctacatcacctcccgtttcctgcccgataaggcgatcgacctgatcgacgaggcggcttcgaaactccgcctggagatgaactccgtgccggaggagatcgatgtgctggatcgtcgggtacgtcagctcgagatcgagcgcgaggcgatccgccgcgagaacgacaaggagcgtgtcgagcaactgacccatgagatcgaggagctgggggccaaacgcgccgagcttcgtgccaagtgggaaggcgaacgggacgtgctgaagaagatccaggagaacaaggaccggatcgaacacctgaagatcgaggctcagcaggccgaacggcagggcgattacggccgtgtggccgagattcgttacggcaagattcaggaggccgagaagcagatcgcggctcttcaggacgaattccgtgcggcttcggccagcggggcgatgatcaaggaggaggtcgatgccgaggatgtggccgaggtggtatcccgctggacggggattcccgtttcgcgtatgctggcttccgagcgtgagaagctgctccacatggaggaggagttgcatcgccgcgtagtcggtcaggatttggccattgccgctgtgtcggatgccgtgcgccgttcgcgggccggactgaacgatccccgcaagccgatcggctcgttcatcttcctgggtacgacgggtgtaggtaagaccgagctggcgaaggcgctggccgagttcctcttcaacgacgacaacatgctgacccgtatcgacatgagcgagtaccaggagcgtcacagcgtatcgcgtctggtcggtgcgcctccgggatatgtcggttacgacgagggcggacaactgaccgaggctgtgcggcgcaagccttattcggtcgtgctgctcgatgagatcgagaaggcgcatcccgacgtgttcaacatcttgctgcaggtgctcgacgacggacggctgaccgataacaaggggcgtacggtcgatttccgcaatacgattatcatcatgacctccaacatgggggcacaggtcattcaggagaatttcgctccggctttcgacggcaataaaatttcgccggaagtggtcgaaaagacgcgtctggaggtgatcgagcagttgaagatgcagctcaagcccgagttcctgaaccgtatcgacgagatcgtgatgttcgagccgctgacgcacgaagatatcgggcggatcgtcgatattcagatgaatatagtccgcaaactgttgaaggaaaacaacatcgagctcgactatacgaagaaggcgaaagagtggatcgcccgcataggttacgatccgttgtatggcgcacgtcccgtcaagcgtacgattcagcgttatgtggtgaacgatctgtcgaagcggattttggcgggcgatgtcaatcgcgagcatccgatcgtcatcaatgctgacgccgatggcctgaccttcaagaactaaaggcgaagcgcttttgtcaggtagatattcgtattcgtgaaaaatccccgctgtttttacagcggggattttttatgggacaggtcggtttagcgcaccgaaaatccttcatcggctttcatcggcaccggtttgtcgcggtagaagccgctttcgagcttgtcgcggatggctttgaacgcctcgatcgtgaacttcacgtcgtcgagcgtgtgggctgccgtcgggatcaggcgcaggatgatttcgcctttcgggatcaccggatagaccactaccgagcagaagaggttgtgcttctcgcgcagatcgacgatcaggttggtcgcttcggggatgccgcctttcatatagacgggagttacgggcgactgggttacaccgatttcgaatccgttctccttcagtccgccttgcagggcacgggtgatttcccagagcttctcctggtattcggggtgcttgcggatcagatccagacgcttcagcgcgccgatgaccatcggcatcgggagcgacttggcgtagagctgcgaacgcatgttgtagcgcagcaggttgataagccagcggggaccgcagacgaaggctccgatgccggccatcgacttggcgaaggtgttgaacagcacatccacaccgtccacgacgccgaagtgagcggccgtgccccgtccgtggggacccatcgtgccgaagccgtgggcgtcatcgaccagcaggcggaagttgaaatctttcttcatcgccacgatctcgtccagtttgcccaggtcgcccttcatgccgaatacgccttcggtgatgacgagtacgccgccgttctgctgctccgccagttccgtagcgtgcttgagttgcaggcgcagcgacgccatgtcgttatggccatatacgaaacgcttgcccttgtgcatgcgcaggccgtcgatgatgcaggcgtgtgcctcggcgtcatagaccaccacatcacgcggggtgagcaggcagtcgatgatcgagatcatgccctgatagccgaagttcagcaggaaggcgtcgggtttgccgacgaactctgccagttcgcgctccaactgttcatggtatttggtctgaccgctcatcatgcgggcgcccatcggggctgccatgccgaattcggcggcacctttggcgtcggcttcgcgcacttcggggtgattggccaggcccaggtagttgttcaggctccagttcagcatcttctgtccccgaaaggtcatgtggggaccgatttctccttcgagtttggggaatgcgaaatacccgtgggcataacccatgtacataccgatagggcctccggcattcttttcgaggcgttcaaaaatatctaccatacgagtttgttatttgattttaagattatgcgtttcagtactccacaaaagtaaaaataattgtcgggatgttcaaacctcccggattcttttcgtgaaaagtagtataaatacttactgtttgtcaccggataagcggcattggatttccccccccctgcatcccgtttttccggtcgttgttttcgtggttccctgtatttctttagtatagatttcctacgctgttcttcggtcgtctttttgagttcttctttacgggcatcgtcccgtgtttttttatcgcttctcccgtttctgaattcaggtgtatatgttcccaaataacgataaacttttcgtcgggtcaatcttgattttccggaactttcgtgcgaaatttgtccgtacaataccccgcgtggtgttcgtatttgaaaaacattttctaactttgccctgcctgcccgtatgggcggcgacatattagtttagtgaaagtgtttcgctaatccttggcaggaaatctggtaaatttcaaagtacaaggataggcaatacgacactcatcaccgtgcgtagttatatatcattatccagatatagactattcggtgtggggtattgtttatttgtacttgggcttaccagagcctcctgccagataaacgaacgactccacactttcttttttgtatagagttttcttataggagtcggtgagacgtattgctaaattatgaataatagtgatttatcttttctgacagactgcagtaatgaacaattgagattgttagcggatgttttagtctttgatcctaaggatcataagaagcgttatacggagaggttgtctgcaagagcatcgtatgccgtgtattatccgcacgacatgaagaaactgttgcctgaaatcgtggacgaataccaacgtttcggaggaaatacgattgccaatataatacgggggcatggagtcccgtaccgagagatactgaaagatgtgtgcaaaacagtcggtattgctaaaagtgatactgatacagtcgaaataatggaagccgcgcttcttaagactgtcgcagataaaatgttggagcagattgcaaaacaaaatgcttccggagaacagtcggtagaagagatgaaaaaatatgtggaagaatttactcattacccggatcaaatgacggagctcattttgatgtctttcagtagttggcttagtcatatgggagtaaggttggtgatacgatatgcgagtgggcgagttgttatggtcccgttaggtcctattgcatgggcgattactgctgcttggatggctttggattttgcttcgccggcctatcgggttactattccttcgacgattttaatagcttgtttaaggcatattcacaataaatctgagagggattccaatatttcattcagcatagaataggtggtaatcgcggtcttcgcttattcaaacgtccgatttcataaaaaattcagccggacttctttacaagtccggctgaatcggaaaaatacttttatacaagaaaaattcgcttaattgatgtttttacggtcgggaaccgtattgggcgatgcagcttccatgtcggtttgcagcttgaccatctgaatggccgccgctgccgcttcattgcccttgtttccgtattttccgcccgcccggtcgaatgcctgttgctggtcgttcaccgtcaggataccgaatgctacaggcatattccactgtatctgcaactgggtgataccctgtgtcacgccctggcagatgaaatcgaaatggcgggtttcaccctgaacgacgcagcccagagcgatcaccgcatccacgtccgtatattcggcgaaaaactgggtaccgagagtcagctcgaaagtgccggggacatatttgatctgaatattcaggtcgctgcatccggcgctgcggagggtttggaccgctccctcgagcagggcttccgtgatttcccggttccactccgctacgacgatgccgaacttcatatcggctgccgacggcagcggggcgtccaactgcgaaaggttgtgatgcttggttgacatgcttggattcgggtgtttcgcgttattgctggatcgtgcccatcagtttttctgcattctgtgcttcggccgatgcagggaattcgttttgaatccgctgggcgaatccgagcgcctgctctttgttgcccatggcattggctgccagagccgctttacgcaggtacatcggggccgtcaggttgttgtccgaaaccttggctgccttctcgaacagtttgatcgctgcggcataatcgcccttctcgacggcgatatcgccctgcagacctatgttctgggcattgacgatctctgcgggaatgcctttggccggtttgtattttgccaggtaggtggccgcgttgtccaagtcgcctaaacgcaggtagcagatgccggcatagtgcttggccaggttgcccgcacgcgtggaaccgtactggtcgatgacatcgaggaagccggggccgttggcatcgccttcgagagccagctggtattcgggcgtggtcgattcgaaccggtactgggcctgagcgatcatctcggccgccttacgctcgcggggctgtgagatcaactgtcgatagccgaagatggctgcggcgagtacgaagagggccagcagcgcgatgatcatcgatttgctgtttttctcgaaaaacatctcggttttattcatcgctgtgccgagtgcttcctgctcgttttgctttgtcatagaaatatgcagttttagtttgaattttcgcttctaacgtgcaaaaatacattttttctttgaataatgccaatatctgccgagaattgtagagccgccacgaagaaaaaagatgaatttcaccggatgatgaccgcattgaccagtcggattttcgagcggcggttgatttcggcgcccaaggcttcgcgctggtagaaaagttcgttgcgcagaatgctcgagcggatgcggacgtgcagaatgtgattttcgagccgcagctcggtggtttcggcgtcggctgccggaccgacgatctcgcgccaggtgtcgcgcagccgtccttcggcgactttggcggcgacgtaaggacgctggaaaaattcgtcgagcagttcgccgacggtgaccgtcttgcttcgtttcatcgcacgattcctccgttttcgaccgtgaagagcgagtagtcgtcacctgttttgtccagaatggtgcgcagacgcgtcgggttgcagtcggtgatgaagatctgtccgaaaccgtcgtccccgaccagccggatgagctgttcgacccgcccggcgtcgagtttgtcgaagaggtcgtccagcagcaggatcggtttttcccctttggcttgggcgaccagggcatattgggcgagtttgagagcgatcagaaacgatttttgctgtccctgcgaaccgtatttgcgcaggggatagccgccgatgtggagtaccaggtcgtcgcggtggatgcccgcagtggtgaatccgttgacgaaatccttttcccgggacttgagcagcaactcttcgaagggggtgtcgttcagctccgagcggtattcgagcgtcacctgttcgcggtcgctggagaggtggcggtagtatcgggcgacttcgggttcgagcagagctgcgatttcgctgcgtttgcggtggatgatgcctccctgttcgaccagctgacggtcgtatatgcagagcatctgttcgtcccgcgagattttgagcaggcggttgcgttcgcccaatacggcgttgtagcgtaccagagcctgcagataagcacggtccaactgggagataaaaccgttcaggtagcggcggcgttcgtcggcggcatcgctgatgagcatcgtgtcggccggggagacgatcaccaccgggatcaatcccacgtggtccgagagtcgttcgtactccttgccgttgcgcttgagggttttgcctcctttgcgggcgaaggcgcacacgacgctctcgctgcggccttcgtcggtgaggtactggccgtcgagcaggaagaagtcgctgccgtggcgcatgttctgcccgtcggtcatcgccagcgacgacttgcacatcgaaaggaaatagaccgcgtcgatcacgttggttttgcccgctccgttgtcgcccacgaagcagttgatgccgggccggaattcgagattctcttcccggatgttcttgaaattgatgagcgacagttttttcaggtacatgagtgcgttttttcgtcgatgccggtatgagcggggacgatttcgtgtttatgcgtgcggtgttcgtacatttgggtttcggtccggacaatacctcatatgcgaggcgagtcgtgcagggtctttctgcggagttggtacgctatgttcccgaccgtgcattgctccgaagcgtgaatttctccgtgatcggattctccttgcgtcagtttgacgcggccaccttcgtcgtccggggccgcagccatttgcaaaggtagcgatttttttgtttttgccgatcgatatttccggattccgcgaaggaggggggcatgcgggggcggtctttctttcgggcgatccgacgaaaaaggccgatctgtacgatcggccttttcgattgaaacggaggctggggattactcctctgcggttaccgtaaatttgatcgtcgctttgacatcgcggtggatcttggcgacggcctcgtattcgccgagggtcttgatgttctccacggcgatggtcttacggtcgatttcgattcctttggcagccaaagcctcggcgaggtcggcagcggtgatcgcaccgaagatgcgtccctcctctgccttggcagcgattaccagcggcaggttggcgatcttctcggccagagcctgtgcgtcggccaggatcttggcatccttgtgggcacgctgcttgaggttctccgcgaggatcttcttcgcggctgcggtagctgccttcgcgtaaccctgggggatcaggtagttatttgcgtaaccgggttttacgttcacgatgtcgttggcgtaacccagattctcgatatccttgataagaattacttccatgttctctcctcctctttattatttcatacaatcggttacgaagggcaggatcgcgaggtggcgggcacgtttcacggcctgcgctaccttcttctggaacttctgcgaagtacccgtcaggcggcggggcagaatcttgccctgctcgttgaggaacttcttgaggaactcgccgtccttgtaatccacgtacttgatgccgagtttcttgaaacggcagtacttctttttcttgacgtcaaccgaaacggggttgaggtatctgatttcagactggttgttgttttcctgtgccatggtttactcctcctgcttgttagaaagtttcgcacgacgtttctccgagtactctacggcgaatttgtcctgcttgaaagttaagaaacggatgatccgctcgtcgcggcggtactgcgtttcgagggtgttgacgatcgagccttcaccggtgaactcaatcaggaagtagaatccggtggtcttcttctgaatcgggtaggcgagcttcttcaagccccaagcctcgctgttcacaatctgaccgccgttttcggtaattacaccctggaatttgtcagcgacctccttgacctgtgcatcggaaaggaccggcgtgacaatgaaaacggtttcgtaattgttcataatcgtttgttaattagattaatatgcatttagcggatgcaaaggtacaaaaaataatgtaaaaatcgtcttgcgaggcctcttttttatttatcgccggcaggatttatttatatatattggtatattttcggtgccgctgccgcctggctgtttgccgactggggctgtcggggccggggcgttcggtcggaaggagggcggagcgtgccgtttgtctggtgtgtccggtgcgagccgagttttgcgcggactccgggaaaaatttttcttccggaaggggacaaaacaacgggattccttcgacaggaatcccgtgaaataggtgtgtatgcggtcggagttacttccgaatggaatcgatgacctgacagatgcggtcgaagacttcatccatggtgcccagaccgttgatgtcggcgaattttccctgtttggcgtaaaagtccgcgacgatggccgtctgttcgtgatatactttgatacggtcgcggatcacctcctccgaagcgtcgtccgctcgcccggactctttgccccggagcaggatgcgttttaccagctcctcttcgggaacgtccatgtagatcatgacatcgaccttcaacccctgttcggacagcatccggtcgaactcctcggcctggtgcgtcgtacggggaaagccgtcgaaaatgttgcctttcgcgtgtttgtgcgccgcgatatagtcggcgatcatgtcgatcaccacctggtcgggagcgagtctgcccgtggtgatataggactccatctctttgccgagtttcgtcccccgggcgatttcttcccgaattacgttaccggtcgatacgtgatcgattccgtatttctctttgagccgcgccgcctgcgttcccttgccgcatcccggggccccgaataaaacaatgttcagcatcggttaagaattttttaacgctaacaaatataatctttttttgtcaaaacgacaaagtttcggtatctttgtaagatatagcgcagatttttcgaatttcgctgcgacgataacccgcacgggaagagaatccgtatgcgggaggtacatacgactgtaaacaatattcctatggctgataaaaaacctaccgagatcgcctcgctcggcgaattcgggctgatcgaccacctgacggattctttttccgtgcgcaatgcctcgacgcttcggggggtgggcgacgatgccgccgtgattgcggcgggggccgacgaagtgacactctgtaccaccgatctgctgctcgaaggggtcgatttcgatctgacctatttccctcttaagcacttggggtacaaggctgttgttgtggctgtcagtgacttgctggcgatgaacgggcgtcccgagcagttgcttgtgtcgctcggggtatcgtccaagatttcggtggaggcgttggacgacctgtatgcggggattcgattcgcttgcgaggagatggaggtcgatctggtcggcggcgatacgaaggcttcggtgaccgggctggctattcacgtgacggcgctcggacgggcccgcaaggaggaggtggtttatcgcggcggcgccaagcttcacgacctgatctgtattacgggcaacctgggggcagcctacatgggactgcaactgctcgaacgcgagaagcgggtgttgcggggggtgaaagatcccgaacccgagttcaaaggaaacgaatatctgttgcaacgctacctcaagcctgccgcccgcaaggatatcgtcgagctgttggccgaggagaagatcgtccctacgtcgatgatcgacctttcggacggtttggcgagcgacctgcttcagatttgtaaagcctcgaaatgcggagcccgcatttacctcgaccggatccctatcgcccgtcagacgacggctttcgctgaggagattcataccgatcccgtcgtggcggcgctcaacggcggcgaagattacgagttgctgttcaccgtgccgctggccctgcaagagcgggtgatgcgcatgggcggggtcgatgtgatcggacatattacggcggaaaatacgggagcctatctcgtaacgcccgacggcggcgagatccggctcaaagcccagggatttcgggataaggagtagggctatttccgcaggcccagatgcgacaacagggaccggaagcccgttttgatgcggcgaggcagattgacgccctgccgcagcatgacggctccgcacagaatttggggattccattggcgcagttcggcatagcggaccagtacgaccgagagggccggaggcggaaggttgtccagatgtttgaaaacctctacacagtcgttgcgtgtcaggtggcggcaaaaccggatgcggttgatgtcgatcagtgcgaatcggtatttttcgccggatttgtaaaagaatacgttgcctgggttcatgtcgaggttgaacactcccttttcgtgcatttcgacgatgaaagccgcgaaatcctccagaattttgcgggattcttcatctccttcctgcagggtattcagcaacgggtgggcgatgaattccgaaagaaaataccccgtgtggaacagaccgtgacgtgagatttccaggtaagcgaccggggcggcggtttcgaatcccaactgttgtaaccgcaaggcgtattcgtaggcccgacaggctttgcttttgcggaaaagagtgtaggcgaattggttgaggcgggtcgggcgtttatactgtttcaggacgaaaatccgacctcctgccagctcgattttgcggaccatattacgccggtcgcagtaagtttccaggatgcgatagtcgcccgcagggatttttcggatctcttgctgcaagtatgcgtatgtcggcgacaggacgattttcggattttgaaacatacgtcaaagttcggggtaaagcatcgccggagcaaggcccaaaatgcagtaaagctattcaaaaagtaggatttccgtaaagcgatacaaataacgaagagccgtcaaattttgacggctcttaaatttaagcattggataacagtcccttacaaggcgtttacatgcatctgcaacgaacttttcaggttgccggctttgttcttgtgcacgatattgtgcttggccagcttgtccagcatcgaagtaaccttcgggagaagtgcctcggccgcactcttgtccgtcgtgttgcggagtgctttcacggcgtttcgtgccgtcttgtggaaaagacggttgtgtgcgcgcttggctacagtctgacgaattctcttctcggatgacttatggtttgccataatcgttaatttttatttttaatttttttcgttctttagttttacggcgacatatgttgaaatgacgccttgttcgtgacggccttggccgcctgcggaataggccgaaacccgcttccttcgttgtagtttccccgtcagcgccctgaaaacacaacatacggccttaccggccgtcgttatgcgcttaaaacgctgtcgtgtagcccatagcagagtcgaactgctctttcaagaatgaaaatcttgcgtcctaaccgatagacgaatgggcctcctgtgctatccgttttccctcgatcgggaaacctttagcggtgcaaaggtaaacaaaaaagttttctatgcaaaaaaaatgtgggaatatctgttttttttcgatatgcgatatgaaaaaaacaggaatatgccggccgtctatgaattattatataataaggtaagataatatacgactatatgacaccattatccgacgatcgcgggatctaatccgaaggtgtttacttgcgacctgtttccacgtttataatccctttccctcggaaggttgggggcctgcgcttccaaagagggataatcacgcaaggtaagattgatgttgagaacttttttaggccgaaaggagcgtactttgacattgtaagaatggaataacgggagattttaagccggttttttgccgaagagtgaaaaaatatttgcttttcatttttttgtaaggcaaaagttcgtatatttgcactccgaaagagttcggggtgtagctcagcccggtttagagtacgcgtctggggggcgtgtggtcgcaagttcgaatcttgtcaccccgactgatgaaaaggcttggtaatctgatgattgccgagcctttttcgtttatgtgctccgagcggaagtagggggcgctggggacgcgaaaagccaatcgagaagtctgccaaaattcaataaaatgacgattccggctttttatcggggccagttttcaaagcgggcgatatttgtcgtattctttattttcaaagacggttatcgcgaaggtatggggtttattcggggattgtagatccctgtttcggggcttgatgtcttggcagaactccggtatatttcccttttcgggatgtactctgaatgataagtgcgtggtaatttgtgtattataaaaaaagccttccgaagaaggccttttcgggtggaagatggggctcgaacccacgactttcggaaccacaatccgacgctctaaccgactgagctacatccaccatatcggtcgataccgaagatcaaccggagtgcaaagataataggtttttttcgtccgtgcaaaaaaacggcgaaattcttttcggattctgtgcgtacggccctctctggcggtatcgacgaggcggaaacgtacggtgtcaggatgatgtatctgccgttttgtcaaaatgacagtcttgttgcccgatttgtcagacttttctgtcaaaaatcgtttggcatatctcttgttggagttatcgtcgcaaatgcgaagttgaaaaactgttaaatataacttataacaattaaaatcataccactatgaacgtaaaaccattatcagaccgcgtgttgatcctgcccaacccggcggaagagaaaacggccggaggtttgatcattcccgatacggcgaaggagaaaccgctggcaggcaaagtaatcgccgttggtcccggtacttcggaaatcaagatggaagtcaaagtcggcgatcaggtgctttacggcaagtatgccggtcaggagatcaacgtcgatggcgcggattacctgattatgaagcagcaggatattctggctatcatttaattagttcggttggattaaaaaaattacgattatggcaaaagagataaaatacaacgtggaagcccgtgagcttctcaaggagggcgtggacgctttgtcgaacgctgtgaaggtaacgctcggtcccaaaggacgcaacgtaatcatcgacaagaagttcggtgctccccaggtgaccaaggacggtgtgaccgtcgccaaggaggtggagctggaggacgcgattcccaacatgggcgcccagatggtcaaggaggtcgcttcgaagaccaacgacgatgccggcgacggcacgacgaccgcaaccgtgctggcgcaggcgatgatcggcgtgggactgaagaacgtgaccgccggagccaatccgatggacctcaaacgcggtatcgacaaggctgtcggtgtggtcgtggattcactcaagaagcagagccagaccgtaggcaccgatttcgcgaagatcgagcaggtcgctacgatttccgccaataacgacggtaccatcggcaagctgatcgccgaggcgatgggcaaggtcaataaggagggtgtcatcaccgtcgaggaggccaagggtaccgaaacccatgtggatgtggtcgagggtatgcagttcgaccgtggctatatctcggcctacttcatcaccgataccgagaagatggaggcgcagttggacaaaccctatatcctgattaccgataagaagatctcgacgatgaaggagctgatgggtgtgctcgagccggtggctcagagcggacgctcgctgctgattatcgccgaagatgtggatggcgaggcactttccgcactggttgtcaataagctgcgcggtacgttgaagatcgccgcttgcaaggctccgggcttcggcgaccgccgcaaggagatgctcgaagatatcgccgtgctgacgggtgccacggtcatttcgaccgacaagggtatgaagatcgaggacgcgaacctctcggtgctgggtacggcggagaaggttacgctcaacaaggagaatacgacgattgtcgatggcgccggttcgaaggacgctatcgctgcccgtgtggcgcagatccgcgccggtatcgaagccgctacgtcggattacgacaaggagaaacttcaggaacgtttggctaaactggccggcggtgtggctgtgctgtacgtcggcgctgcgaccgaggtcgagatgaaagagaagaaagaccgtgtggacgatgcgttggctgcgacccgtgctgccgtcgaggaaggtatcgtgccgggcggcggtgtcgcttacatccgtgcggtggaggctttggagacgctcaagggcgacaacgaagaccagacgaccggtatccagatcgtaaaacgcgctatcgaagagccgctgcgtcagatcgtgacgaatgccggcggcgagggttcggtggttgtcaataaggtgaaggagggcaaaggcgccttcggttacaacgcccgcgacgaccgttatgaggacctgctcaaagcgggtatcatcgacccgaccaaggtttcgcgtgtggcgttggagaatgcggcttcgatcgcttcgatgttccttaccacggagtgtgtattggccgagaagaagtcggacgctcccgcaatgcctgcgatgccgggcggcggcatgggcggtatgatgtagtccatcgcttctcttatgaaaagttcccggaatcgcatttgcgattccgggaacttttttattccgggctgtcgtgtatgaagtccggagagccgttttcagggcggcgggcgttctgcggttcatacgaatacgacgctgcctgctgttggaaagacatacggaaagggctcggggaaattccgatggcttttcatacacgactgatgcggtcgtgatccgtagcttgtctgccggaaaacggagggaatgtggaactttttatttccgggagcgtcagaggccgccgtcggccacccacgaaccggtggggttgtcattgcgcagagcgagcactattttttcgatgcggccgtcggacattttcactcggcagggaacgaatactcccgcgtactgtcccgaacggaaggccggctgggtttcgaggaggcggcagcctgcatatcgttccttcataaggtcgagcggatagaaaacgagtccttcggcgagtatttccgtatcccacgtctgcatggcggcgaagagtgtgcgggccgcctcttccggtgcgatggctgcgaagtgtacgccgccgaccggtttggtgaggtcgatccattcgatgccgtcgtaagcccgaaagagggtatcggacaacggtatgtcgtaaacgatgcgttgcaattcggcgatggttacgggcgttttcccgtcggtctgctcgattttcagcccgataagccgtccggtcgtccgatcgaagcggtattcgcgccgggtgtcggattcgtcgatcgaggtccccgacaggtagtcgttgctgaaatccccttcggccggtgcttcgacggtcagcgtgatcgtttccggtccgacttgcttgctgtaacttgcgttccggcgctcggcgaagttgagctcttcccgcagcagcagggtgtaggggtcgagcagggtggcgaaatcttcgattgcgccgctaccgggacgcatgatgaagcccgagtttatctcaggactccacatcaggatccgttccccgtcgctcagggcgatccgtcctgctttttccagccgccagcggcctgaacccggttccacccacatacggtggggaacaaaggggacttcggcatcgatgtagctgaaattttcctggggaagagtgcggacattcatttcgaggcggaacgaacggcttttgtcgagttgagcggcagcatcgcggaagatacgtcctgcggcgtgggcccggtagcggccgacgggatcgaagacgagcagtacgagggcgatgagggctgcggcgctcaacgtcgcggacagcggccggagccacaattgccgaggccgtgccggagcggtcgttcgtgcggttgccggcgtattttcggcttgtgcggcggttttcagaatgcgggctttcagaccggccggagcctgcacttcgacgcggggagcgacggtgttgaaggctgctttcgtttggcggtagaattcggcgcaggcgggacatgtttcgagatgttccaacatttcgcggcgaacctctgcgggggtattgtcatcgaacagcagttcgattcggttttcaaaatcggtgcatttcatggcggatgatttttagtggtttatgagtttgcggagcttgccgatcccgtaacggaaacgggatttgacggtcgcctcggtgctgccggtgagctcggcgatccgggcgaaagtcagggagtcggaggttttcaggcggatcacttcggcctgttcttccgggagggttgcgagcagcccggcgattcgttcgtattcttcgcggagttcctgatcgccggagtcgtccgcaagtgcggcggcccgttcggtcggcagcgtcgcattgcgccggtggcggtggtagtcgcagcagcggttggcgatcgcccgccagaggtagcgctccacgtcgtcgatgcggtcgaggttgcaatccgagtggaagagccgcagcaggacgtcctgcacgatgtcttccgcatcggcctgcgatcccgtgcggaaataggcgaagcggtaaagggaatcctgtcgccgatcgacgatccgctcgaggagtttcagtttcgtttcttgcatattctgtctgttttaacgacgcgtctattcataagacgtacccgctgcgaaaaagatttaaccgaagcgtaaaaaaacggcgtatgccgatatatttttgtttgccggcgtcggatggaagggtttgctgcggattttgcggaacgggaatttccataaaggatatggcaacccgttacggaaggatttccgatggcgaaatgcctgcactgtaggtttcgacgggaaatccattgcccggctctgcaggtcggtaaagttcgtactctcttgcgtgagagaaaatcagccttgtaaaggtattgacagaccgggaatagcggcggtcggatcgttcgattcgtgaaaatgatcgtgtgccgacgtatctgttatttgtccagcaggatacgagcctgtgcgagtgcggcttccgtgatttggctgcccgatagcattttggcgatttcggtaatccgctcctccgggtcgaggcggcggatatgggatccttcggcgtctttgtaaaccacgaagtgagtgtcgcccttcgaagcgacctgcggcagatgggtgatgtccacgacctgcatggtctgcgagaggtcggcgatgatttcgcccatggtgtcggcgatgcggcctgaatgcaacgtcgaagcaacattcggcttcgcagcgtgttcgggggtgttgtacttataaccctttgatatatatcggctatttatctcgctactctccttccatacatttcgttttatcccccgcaaaagggggcaggccgttttttcgcaagtaagtttttgcccctttgtggttcgcacagggcgggtaagcctatttgcggccggcgacggctgccaccgagagcaggatgccgagcatcaccccgagcaacgccgcgaacagcacctggtattggggggcgagcaggaaggtgatcgtgtgggcgggaatccagaagaacgggattgtcttcttgaatacgaatccccactgcacctcccagttgagcgacgagatgatccgccgcatgggaatcgggcggacgagagcccgcagcgaaccgccgttgttcaggatgtgcgtgtcggtgatcttgtgcagggtcatgaatacgggggcgaaggtggtgttcatggtgaggctgatgagcagtgcgccgatgaatttcagcggggtcagctctcccttcatggctgcggctaccccctcgatgccgaaactctccgccacggccggcacgccgatcgatagcgtcttcatcatagcggcgatccagacgcccaggaagccccacaccacggcgcggggcaggataccgaatcccggctcgttgtagcgaccggtcttgatgcgcaacccgatcacctcgccggcagtcgataggatgccgaatttgagcagggccatcaggtaggggtgagatgcattgcaggccaggtaggctgcgtagagatcgttcgaaaggaagaagggagcgagcagcagtacgacggctccgatgaatgcgaggtctttaagtttcatggattcttttgtgtgacgggtgcttatggtttgagcaggatacgagcctgtgcgagtgcggcttccgtgatttggctgcccgatagcattttggcgatttcggtaatccgctcctccgggtcgaggcggcggatatgggatccttcggcgtctttgtaaaccacgaagtgagtgtcgcctttcgaagcgacctgcggcaggtgggtgatgtccacgacctgcatggtctgcgagaggtcggcgatgatctcgcccatggcgtcggcgatgcggcctgaaacgcccgtgtctatctcgtcgaagatgatcgtcggcagctccatgcggtgagcgagcaacgctttgagagccagcattacgcgtgaaatttcaccgcctgaggcgatgcgttccactttttgaggagcgaaatttccgttggctgtgaacagaaaatctatttcgtcgtcacccgtgggggtcaaggccggtgcgggggtgagctgtacgacgaaacgggcttcgggcatgccgagccgtgcgagggtcgtctgaatcgcatcgttgaacgtcggtgcggccttttcgcgggtggcgtggatgttccgggccagctcttcggccttctcttcggtggcggtcagttcggtcgcaacggcggcgatggcttcgtcgccgtgcgtgatcgcttgcaggcgtgcttcgtaatcggtctgtttggcgaggagttcgccgagatccgcagcacggtgtttctggcagagcgagtagatggtgttgagtcggtcgccgattttttgcagccgttcgggatcggcgtcgagccgttcgctctgtgcggcggccgaggcgccgagatccttcagctcttcgagcacggagcggagccgtccggcggcttccgctgcgaaaggatagccggcttcgaggtggcggcaggccgtttcgctggccttgagttgtaccaacaccccgatttgttcgtcgtccagggcattgcgcagcgccgtgagggtttcgctgatgcggtcggcgttcgaaagaacctccagctcctgttccagttcggtttgttctccttccttcaggtgggccgctgcgagttcttcgacctggtagcggagccactcttcgtccttgcgtccggcttcggcctcttcgcgcagccgtgcgagttcacggcgcaggtggcagagccgttcgtagagggtcgtatattgcatccgcaggtcgtggttttcggcgaccgtatcgacggcctgcgtgcggaaagcctctgatcccaggatcagattctggtgttgggagtggatgtcgatcagttgcgatcccagttcgcgcagcaacgcaaggggaacgggagtgtcgttgatgaacgagcggctcttgccggccggggtgatctggcgcgtgagtgtcgtttcgcggctgtaatccaggtcgtttcggtcgaagaatgcctgcaggtcccttgttccgagatcgaaaacgccttcgatcaggcaattacgtttgtcgtctttcagggtggcgttgtcgttcttgttccccagcaggaggcccagcgcgccgagcaggatcgactttccggcgccggtttcgcccgtgatgatgttcagccggtcgtccagctccagttcgagccggtcgatcagggcgtagttttcgactttcagacgacgtagcatggctatttcagaatggattcgattttgtcggcgatcttctcggccgtttcggctttcgagagcagaggaagctcctcgcgtcctgcgcggtcgatgagcgtcaccttgttggtatcgacgccgaatccggccccggcgtcgcgcagtgagttcagaacgatgaaatcgaagtttttgcgttggagtttcccttcggcattggcctcttcgtgatcggtttcgagggcgaagccgaccaggatccgacccgctttgtgcgctcccagctcggctgcgatgtcgtgcgtgcgtttgaggcggatcgtcagctcgccgtcccctttcttgagtttggtcggggcgacctcttcgggagtatagtccgcgacggcggcgcacatgacggctccgtcggctgtggcgaactccctcaccgaagcctcgtacatctcctgtgccgagaggacatcgatacgtcgaactccggtcggggtgggcagcgacgtgcggccgctgatgagtacgacttcggcgccccgccgggcgagcgcttcggcgatggcataccccatcttgcccgtcgagtggttcgagatgaaccgcaccggatcgatggcttcgatggttgcgcctgcggtaacgatcagccgtttacctcgcaggctcttttttttttcggaaagaagggcttcgacgaatgcgacgatgtcggtcggttcggccatgcgtcccttgcccgaaagtccgctcgccagctccccttcggccggttcgacgatccgtacgcctcggctgcgcagaatccgcagattctcctgtgtggccgaatgcgcgaacatgtccaggtccatcgccggggcgaccgctaccgggcagcgggccgaaaggtaggtcgtcagcagcaggttgtcggcgatgccgtgtgccatcttgcccagcgtattggccgtcgcgggggcgatgagcaggcagtccgcccactcgccgagcgagacgtgggagttccactccccgttttccggattgaagaattcgaccaggatgggatgcttcgagagcgtcgccatggtcagcggagtgatgaactgcttggccagcggagtcattacgactttcacctcggcgcctgcgcctttgagcaggcggcagagtatggccgctttgtaggcggcgatgctgcctgtgatgccgagcaggatatgtcgtccttcgaggctcataccgcgatgtttaggcttgcggtttgttctccttgtagaagagttcgccgtcgaggaactcctcggtggcgatcagcaccggtttgggcagacgttcgtagtaacgcgagatctcgatctgctcgcggttttcgaaagtttcctccatcgtgtccgtcggcgacgaaaaatccgccagcttgcgcgtgagttcggctttcagttcggtcgaaatctggttggcgcggcgtgcgatgatattgaccgtttcgtaaatattgccggtttccttatccagatcgaccagtttacgggttacggtgttggtgggagtgcttttcttgatctccatggaattattgtttttctttgttgtttcggtctaaaaagtctttggcgttctgggccagccggtcgagctccttgaggtagtgcgattcgggaaattcggccacgaacgagtaataggagtcgagcgtcgagaggtagcggtctgcctgcttgtcctgcacggagttgtcggccagcttgctgccggatttgacgatcaggtacatgatctcttcgcggtgggagctggtgggatagagcttcagcgcgttcttgagagctacgatcgccgatttgtaacgtccgattttatagtatgtgtaagcgttcaggtaagttttgtcgtgcagccgctgggtcaggatcttgtccatctcgcggaattcgtcgctgcgggagctgttggggtagtgggccaggtattcattgaccgccacgatagcctgtgtggtcatcgtttggtcgcgggtggggcccggtgccaggtagaagtaactcaaggcgagaattccttcggcatcttcgaggaaaacgctgcgtccgaatttgcggcggaaatcgtcgagcatcgacgtggctacctcgtagtcgcgggtcttgaacttgcagaaagcggtcatgaaggcgatactgtcctcctgcatcgttccggagtagtacggtgcggccgcttcgaacagcatcgcggctttcgaccacttctggttctggtaatgtttcagagcggtttggtacatgtggtcgggccgaccgcttttcagaacctgctgtacgctattgcagcccgcagcgaggatcgcaaagcacactgtgcacaagacatatagcctttcttttctcatcgggatcaggtttttccgtaattatccggcgataatcgcacaaagttactctttatttaacgaaatcccaaattttttagtgtgggcgctgcggaatcgatgctatgccgacggttttttgcggaaaaacaacggcgggacgaatcggggtcccgccgtgattttccggttgttccgtcaggcgcggtgtgcgatgagccattcggcgatctgcaccgcgttcagtgcggcacccttgcggatctgatcgccgacgcaccagaacgtgaggccgttgggcgaggtgaggtcgcgtcggatgcgacccacgtacaccgggttccgaccggcagcgaacagcggcatcggatagaccttgtcgcccggagcgtcctgcagcacgacacccggggccgacgcgaaggcgtcgcgtgcctcttcgggcgaaatcgggcgctccgtttccacccagatgctttccgagtgggcccgcatcacgggtacgcgcacgcaggtcgcggaaaccgcgatgtccgagtgcatgatcttgcgggtttcgtggtacattttcatctcctccttggtgtagtcgttgtcggtgaagacgtcgatatgaggtatcaggttgtaagccagttgatacgcaaatttttccacacggggttcgccgccttttgccagagccgcgtgctgctcttccagttcggccatcccctgtgcgccggcgccgctggccgactggtaggtggctacgtgcacgcggcggatgtgcgagagtttttcgagcgcgttgagtgccacgaccatttgaatcgtcgtgcagttggggttggcgataatacgccggggggcgttcagggcgtcttcggggtttacttcgggaaccaccaggggaacgtcttcgtccatgcggaaagcgctcgaattgtcgatcatcagcgtgccgtgcttggtgatcgtttcggcgaactccttcgaggtggagccgcccgccgataccagcgcgatgtccacgccgcagaagtcgtcgttgtgggcgagcagccgtacggtgagttccttgccccggaaggggtatttgcgtccggcgctccgctccgaaccgaaaagcagcaattcgtcgatgggcagacggctctcttccagaatgttcataaattcctggccaacggctccgctggccccgacaatggctaatttcatggctttctcaaaggtgttataggttgtattactcaaaaaattcgtcttcttcgtaccgggttgcactgtcgtccgttttctcggtttcgtcgcaatcgtaaaccggcatgacggccggacgcgtgaagagatcctgcttgctgatacccgtcgaagggtcggcgtaaatccggttgaggaattcgcccacgatcggtagggcgattacgctgccttcgccgcgcgataccaggcgcactgcctgatcctcgccgccgacccagcagccggctaccagtttgggaaggacgcacatgaaccatgcgtcgcggttcttctgcgaggtccccgtcttgccgccgacttcgacattctgcatgttgtaggcccatcccaggcgtccgcccgtacccgaacggatcactccttcgagcatcgtgagcatcgtgtaggccgtgtgttcgctgatcgcatcctgcgtccggggggcgaagctggcgatcaggttgccctgacggtcttcgatgcgggtgacgaagatcggagtggtatagacgccttcgttggcgaaggtcgagaaggcgctcaccatttcatagacgttggattccgaggttcccaggcagagcgcaggcacaggatcgatgtagctgtggatgcccatgttgtgaatgaagttggccacggcctgcggctgcttggcctgtttcatgatccacgccgaatagttgttgcggctgcgggccaggccccagctcagggggtgcagctcgccgttctgttcgaccttgccggcctccttgggcgaccagggtaccccgttggcggtttcgatcgtcaccggcaggttcggtacgggcgtgcagggactcagtcccaggtggtcgatggcgaaggtatagacgaagggtttgatcgtcgatccgatctgccgcttgccctgcttggccatgtcgtatttgaagtagcggaagttgggaccgcccacgtaggccttcacgtatcctgagcggggatccatcgccacgaacgaggcgcgcatgatccgcttgtggtggaggatcgagtcccggggcgtgagtaccgtgtcgcgttctcccttgtaggtgaagatcttcatcggacagggcttgtcgaagctcgccaggatggtcttttcgtccacgcctgccttttgcatctggtagtagcggtccgagtaacggatcgcgttgcgcatgatgcgctcacgctcctgtctgtctgcgtcgatgaagagcgttttggtgcgtttgaactgtgcgtccatctggggctggatcaccgactccatctgcttttgaatggcctgctcggcgtattcctgcatccgggagtcgatcgtggtgtagatcttcagaccgtcgcggtagatgtcgtagggcgtgccgtcggctttggtattcttcaggcaccagccgtagatcggattttcgtcgtactccttgaccgcctgttcgtagtcccagtcgttctggaactggcggcgcttgggccgttcggcgttcatcgtcaggcggagcatctcccggaaataggtcgccgggccttcgttgtgcgagaccggcttgtagttgagcaggatcggcagggccgcgatcgaatcccgctggtggcgtgtgatggcgcctgccgatgccatgcggtcgagcaccaggttacggcgtgcgagggcattttccgggttacggcggggggaatacatcgtgggacccttgaccagtcccgccagcagggcggcttcctggatgttgagttcgtggggttccttgttgaagaaggtgtgggccgccgatttgatgccgtaggcgttcgagccgaactccacggtattcaggtacatggcggcgatctcctccttggtgtagttgtattcgagtttcagggccgtgatccactccttgagtttggatacgaccagcttggtcgtgcgggcgatcttgccccggttctcgttgatgtcgcggggaaagaggtttttggctaattgctgggtgatcgtactgccgccgccctgcgaggtgttctgcatcaggacggtcttgacgcctacgcgtaccagcgacatcaggtcgatgcccgagtgtccccggtaacgaacgtcctcggtcgagaccagggccgcgatgatcggcggcacgtcgtatccgtcgagccggagcagctgggcggagtcgagcgggaagagttcgtcgtactgtacgtaggagcggttctgcacgaagaacgtgcccagtaccttgccgtccgaagagagaatctcggtggccaggttgctcttggggttctccagctcctcgaacgacggcagccgcccgaacaggccggcggccgtgagcaacagcaggagcagcaagagtgcgaaaggggcgaatacgatgccccagagccatttgacggatttgggcagcggtttatgcggggtctgttttttcatcggttcaattcaatatgccgcaaagatagtgaaaggtgagggcaattgtgagaacttgttctcgaaaattgccgaaccgcctcctatcttctgcaaagatagtgaaagccgagagaaaacgggagcttgttcccagttttccgaggcgcttcccatcttctggaaagatggcgcaagccgagggcaaggacaaatttattcggttatgcctcggcgaagcctgtctaaatgaaagcattcgctttcgcaaaggtatgaaaaatctcggattatacgttccggttttctgcgggtcgcttgctgattttatcggttctgccgcccggacggatcagaacggcagctccaggccgaagccgaaccagcagctcccctcgctgggcttgtagagcgagagctttacggtcgctgtggcggctgccgacatacgcaggatgttgaggtccagaagcaggtcgccgccgtacgagtaaatgtcgcgccatgttttgccccggctgccgaactcctggaaccgagcgtagtcggccccgacgttcagccggatgcgtttgaagtagatcacgcccgaaattccaccttcgggataacagagcgggaactgataatcaacggagccggccaggtaattattgctcgaaatgtcggacgaggagaagccccggggcagcagccgggtcgatttgtagccgaggaatcgcagacccgacgggaagcggtagccgccgacggaggtttggtaggccgccgctacggagagggagttgtggcggaagaacccgggggtgtagatccgggcgtaggccgatacgaggtcgctgaagttgcggttttcggggttgaggtcgtacccggcccagagcgtataaccccaaggggtcccgacgtcgcggtaggcggcgcgcaccacgtccgagaagccgatgcccagcgagagtttgtggagtccttcgcggtagccgagcgtttgcaggttggcgatgcgtccctctgcgtcgtaacggatcgcatccacgtcggccaccattccgttcgaatactcccagcccgccgagagcgagagctgtcggatatgacgcccccggtcgaaatagaggggcagtgtggcgccggccgccgccgaccaatatttggcatgagccggggccggttggcgctcggccttgccgtcggcaccccgctgggcgatgccgtaggtcatgcggtcgccgccgtaggtggcccgggcttccagtcgtacgccgaggccgctataccggatcgtacctttcagcacatggccgtcggaccggctccagccccacgatgcgaaggcttcggtgctcgacagcagattttgggagagaacggtggcgccccacatgagccgggggttgaactcttcgatggtcttgaacgggtcgaacgatacgggggcccagctgtgcgcccggagcaggtgcaatcccttgcggtagcggcgtgccggatatttgcggtgcagggaggccgagtcggcgggggtatagcgtaccgtgtcgagattgaccacgttccagcggcggcggggcggattgaccagatcgacgggcagttgcgacggggcgaccggaatcggttcgatgttttcctgacgggtgatgcggtagccctttcggtcgtaggtggtcgtccagacggctccgctgtcggcgggagccggggcgaagctgccgtaggtcgaagtcgaaagacggtattcgcgcccttcgccgaggtcgaagcagtgggcttcatcgcggcccgaggcgatcgagccgtagtagagcttgccgtcggcggcccgcaggtcgctcagcgtgatgtaggcgcctcgggtgacagcctgcaagccctcgccgggttcgatccggccgatccacatgcccgaattgtcggtgacgagcgtgtagagccgttcggtcgcattgtcccaggccagtccgtgcacttcggagaagcccggcatgggccaggcggtgcgctgccgcagtgaatcttcggcgacgatcgtgtagtgtccgtcgggcgtatattccacccaggccagggcgccgcttcgcccgatcggggtcgggtagaggacattgcgcagtttcggtgcgttgcgggggcgtttttttccgggggcgaggacgacgagccgggaattgacccgctcggggaagagcagcgaacgccggtattcggtccaccagacccgttgtccgtcggttgtggggcggctcgagacgagtcctgtccaggtgcgccgcctctcgcgtcccgttcgggaatcgaccgcaacgagccgcgaagggcggtcgaagtccgttttcagcgctacgagcgtcgtgtcgttcagggacacgggatgagtataggtggtgtagtttttctccggcagcggcgtgagggtacggcccgaatccgtgaccttcggcagcgaatcccagaaacggttcaggtcggcgaaggcgtcccggaagaggatgccctcgcccgtgccgtagaatttgcgcaaggcgacgctggtgctgaaggtcagcatgtaggcgttgcggacgccgtagcgcagggtcttgtcccagattccgtccccatagcggtcgtagccgtaggcgaccatctgatagcccatttggtagtggtcgggaacgaaatcgcggaaggagccgcagaaccacttgtcgcagttgcgcctgcggagcacctcgtaacccagggcacgatattcgatggtgaagcgcggctggcggccccggccgtaggaggacatctcggtttcgttcatcaccgcatcgccttcgagcgcccagaggggcatgaaaagcagtccgacggtcgatccttgctgcccgatcaggtaactcaggatgcggatcaacccccggttgaggttgttgtactgaacggcgtggcggtattcgtgggctacgagctgcttgacccagggcatcgagtagctatcgacggagggcgtggtgagaaattcgatgcgtttgggcatccacatcaccagaccgttggactggaaattttcggtatgcagcacgaaagggattttcagcggcgggtggctgaaaccgtgtgtaatcgtggggcgtaccgcctggatataatacagggttcggtgcgccagcgccgatgccgtgtcgggaaagacgacccgtacgtcctcggtgcgcaggtgtttccagcgcagcgcagccgcatccgcaccccacgaatagtattgggcgcgaacggattttcctccgatgaagaggaatcccagcaggaacagaatcgctgcgaaacggcgcatgggagcaggccgggtcatccgccggcctttttgcatttgtaacccgctttggcgaggatttcgaccacccggtcgcggtggtcgccctggatgatgatttcgccgtccttggctgccccgcccacgccgcagcgggttttgagcaggcgggccagttcccccaggtcggcatccgagccgacgaaacctttgacgagcgtgacggtcttgccgccccgctgcttgcggtcgagccagacgcgcaggtcctgtcgttcgggggcgagggtttcgatctgcggagcctcctcggtgtcgtatttgaaattcgggttggtcgaatagaccattcccaatctcgctttccagtcgttcgtcatgtgtgaaatatgcggtcgttgttctttttgccggaaaagctggcacttttgcaacgaaatatttttgcaaatatagtgtaagccgggggctgcgccaaatttatttgagtcaggacgggcgccgtttgttttaggtgtcgccgtatcgatcgtccggaatgtcggggagattgggtgggcgcagaaaaaactctttcaatcatatttcggcgactgttaaggagtttgcgcttattgccgccggtgcacggataaaatgaaaaaaccgtctatcttgttgatacacggttttcaatttttcaggtagctccgtttgcagaacttggtgggagctgagggattcgaacccccgaccctctgcttgtaaggcagacgctctgaaccagctgagctaagctcccgaaaggcaagaagccttcttaagcgcctgaacaaggacttgaacctaggaccccatgattaacagtcatgtgctctaaccaactgagctattcaggctttttcgaaaacccgggtttacccctgttttcggagtgcaaatatatagcatttttttattcctgcaaaatttgtcccgttttttttgcaaaaacctcgtatctttacgaagaattaatcgtattacgagatgtttcgaaaaacctaccaactgacttttgtgctgattttgaacgctttgtcgtgcctggcccaatccgggctggtattcgaccggcccgcgtgggatttcggcaccatccgcgaaaccgacggcccggttacgcatcgtttcgtctgccgcaacgaaggggaacaccccgaagtgatcctccaggtcactacgacctgcggttgcaccacaccccgatatacgcgtaaaccgattctcccgggcgaggaggctgaaatcacggtaacttacgatcctgccaaccgccccggcaacttttcgcggaaattggccgtctttacggccgaccgccgcatcgccgccaaactgcgcattacgggttccgtcatcggtcgtccgaagacccccgaagagctctatcccatcgactgcggcgacggactgcgactcgaagacaattttcacgctttcacctatatttataacggccgaacttcggtcgctaccatcggatatgccaatctttcggacaaacccctgactttggagctgcgtcccgaagaggcgagcggacttcttcaggcggactatccccgccggatcgctccgaacgaacgaggagtccttaccttcagctacgacctgccggcggacaatccccgttacggcacgttgaaagagttgctcacggtttgtatcgacggtcgtcctacacggaccgacatctttctgcacggctttgccgtggacgatccccgccgggtggaacaagaaaacgccccaaagtggcaagtgaacaaaaatattattaattttggccccgtgaaacggacaggagctccggcagagcgatctctgacacttggtaattacggcaaatcgaccctgataatccgggccgtagaaactccgaaaggtgtcggatgttcgcttcgcggcggagagcggatcgaacccggccaggcgtgcgaaatcgtggtgacattcgatgcgtcgcggcgggattacggtctttggtcggagcgattgatacttatcgccaacgaccccgcgcgtccgatgcagagcatccgcctgatggccgctgtcgaagagtaaggtacgaagagacccggccgaaacaggaggccggacggaaaaagacgggaactccgacattttccggcagacaggcgcggtaccgacctgtacggacggagccgagcggagagaacggaaacaaatagaaccttttataaaaaagtaatgtacacaatccttgaaaaaagagtgctcgcggagaacatttatttgatgcgcattcatgcgccccgcgtagcacgagcggcaaaacccggacagttcatcatcgttcgcatcgacgaattcggcgaacgagtacccctgaccatctccgattacgacgccgagcaaggctcggtaacgatcgtcacgcaggctatcggagcctcgacccgcaagctctgcgccctggagcagggcgatgcgctggccgatttcgtcggtccgctggggcacccctcggagttcattcacgaagatctcgacaccctgcgcaagaaacgcttcctgtttgtagcgggcggcgtgggtacggctccggtctatccgcaggtaaaatggcttcacgaacacggggtgaaagcggatgtcatcatcggtgccaagaccaagtcgatgctgatctataccgaggagatggcccgtgtagcggacaatctctacatcgctaccgacgacggcagcgaaggcttcaaaggtatggtaacggccctgatcaaagacctgatcgacaaccggggcaagcagtacgacgtctgcgtggccatcggtccgatgattatgatgaagttcgtgacgctcacgaccaaggagtactccctgccgacggtcgtatcgctcaatacgctgatggtcgatggtacgggcatgtgcggcgcctgccgcgtcacggtgggcggcaagaccgtcttcacctgtgtcgatggccccgaattcgacgggttccaggtcgatttcgacgaagcgatgcgccgtcagggtatgtaccgcacgcaggaagagcgtgcccgcgccatcgagcaggagcgcgagaacggtcacaaatgccgtgtcgggctcgacaaataactaccgatccacacacaaccggacgtttccggcagacgagtatggagcgatgctctgcgtccgaatgccgaaggcgtccacagaacaatgaaagcaaacaactatggcaaataaaattccgcgcgttcccgtgcgcgaacaagatccgaaagtccgggccaccaacttcgaggaggtgtgctacggttataatgtcgaggaagccacgctcgaagcgtcccgctgcctgaattgcaagaatccccgctgcgtggcggcgtgtccggtgaatatccgtattccggatttcattcatcaggtcgtggagggtaatttcgctgcggctgccgccgttatctccgaggacagctcgctgccgagcgtttgcggccgcgtctgcccgcaggagagccagtgcgaaggctcctgcgttttgggagtcaagggcgagccggtggctatcggcaagctggagcgcttcgtcggcgactggaaaatcgagaatgccgacaagatgcccgctcccgacatcaagcgcaacggacacaaggtagcggtcatcggcagcggtccttcgggactggcctgcgcgagcgacctggcccgcatggggtatgaagtgaagattttcgaagcgctgcacaaggtcggcggcgtattggtgtacggtattcccgaattccgtcttcccaaggagaagatcgtagccagggaggtcgaggccgtgaagaagctgggtgtagagatcgaaaccgacgtgatcgtcggccgcaccgtgaccatcgacgaactgatgaacgaagagggttacgaggccgtcttcatcggttcgggtgccggcctgccccgtttcatgggcatcccgggcgaaaacctgaacggcgtggtttcggccaacgagttcctcacgcgtaccaacctgatgaaggcttacgatacgcattacgatacaccgatctatgtcggtcagcgcgtagtggtggtcggcggcggtaacgtggcgatggatgccgtacgtacggctaagcgcctgggggccgaagcgaccatcgtatatcgccgcagcgagaaggagctgcccgcccgcgtggaggaggtccaccacgccaaggaggaggggatcgaattccgcatgctgaccaatccgacttcgatcatcggcgacgagaagggctgggtcgtaggtatcagttgcgtcgagatggagttgggcgagcccgacgaaagcggacgccgctctccgatcgaaaaggccggttcggatttcgaaattccgtgcgacgtggtgattatggcgctcggcacttcgccgaacccgctgctcaagatgaccaccgaagggttggaaaccaaccgcaaggggtgtctggtggccgatgaaaagggtgcgactacccgtgaagggatcttcgccggcggcgatgccgtaaccggagccgcgacggtcatcctggccatgggcgccggccgtaaagccgccaagtccatcgacgaatacatccgtcaaaaaaagcattaaacgcttgcaagatatgaggaaattttgtttcgccgcattcgctgctgtgctcatcgggacgacggcttgtacacccaaagctccggagcaattcacgggtaagatcgtcgatggaacgatgaataccgtcacggtagagtccccggccgacggaagaagggtgactttcaccacggaggatgccgatatgcaggaggcttacggcctgctgctgggcaatacggcgaccgttacctaccgggggaagctcggcgagacgactccggctttgaaggtggtgaccgatcccgcctatgttacggccatcggccgctgggtggagcccaatccgatcgaccccgagcaggaacaaggcattgaaattcgagtaaacggcgtcgccgcttcgatcaatatgctgactctgcgctacgaagcttgggaattggcgcccgaaggagatcgaattatcttgagcggcgtatcggaaggaagcggcgggccgtatcctttcgagcaaacggctgaaattatcgagatggacggcaagccggccctcaagatcgatgcggtcgttctgaccaaaaaagatctgatctaaattggatgccgtttcatatacggcttggttcgataaaaaaactcacgcttgaaaagcgtgagtttttttatcgggtgccggaaatcgggattcggaaccaaacaacggaacttcgtcgggaaggagtgcggaaacaggtaaaaaatgggagcaaagggaatcgacgaaacgataagccgaaattactccgttttaccgaccaaccgctcgacccggtcgaggatcatctgcggttctatgctccagatacagcggtaatcgccatatttacagggtttctttccatatacggagcaaggtcggcaagcgaaatcggtctgcaagacaccttcctgtccgaacccgtaacccagaaagccgagcccgggatgggtcgctccccacaccgacacggtgggcgtagccatgagcgaagccagatgcatcaccagcgaatccatcgacaccacgcaatccaggttggaaatgaggttcatctcatcccccagctttatcttgccatacaatgccgtgacgttcggatagagcgcctccatgcggcgggcgaattcggcttcctctccgccgccgctgtggacgaaaacccggtcgaaacgcccgctcaacagacggacggcttcggcgctcaacttttcgggataagtcttgcccggctgggcggagaacggcgcgaaaccgatccatataccctgtttttctcccatgggattgggtcgggggcgtttctcggccggccggggatcgggaaagtcgaatcccaagcgacggaagacgtcgcaataacggatgacggtgtgtttcaaaggtttcacaccttccgaaccgcgtcccagccgcatgtatttttcgatccgccccttgtgaattaccgaaacgggaatcccccgcaggtggagtgccgcacgcaccatcttcgaacgcagtacattgtgcatgtcggccaccgcgtcgatcttcaactcggccgcttcgcgggcgaaccgaatggcgccccggataccccggtgcgtgcggcgggtttcgatatccaaaaaatcgacatccaccccttcgaaaaagggatggaacagcgatttggtcgcaacggtcaccttcacctcgggatacgcctccttcagggcgcggagcgcatggggcaacatcgccacatcgcccatcgccgaagtacggatcacgagcaggtgccggggcagctttttattttttcgcggcataaagcacgggattgagcgccggatcgttatacatcttcatctgtttgtaggtcttcatgtatttacgtccggcttcaatatcctcgatcaactcctcgatcgcagtcgaaagatcgacctgctgcgacagcagcacatcgagtttttgctggcaggcagcgcgatgcgcctcgtccacatccttgcggagcacctcctgacgcatgtggtaaatcttcagggccaggatcgagaggcggtcgatggcccaggccggggtttcggtattgatacgcgcccccggctgcacgtctatattcttatacttatcgagcaggtaggagtcgatgtactccaccatgtcggtgcgaacctggttcgacttgtcgatgcggcgtttgatcttcagcgcctcgaccggatcgatccggggatcacggataatgtcttccaggtgccactgcaccgtatccacccagttcttcatatagagcaggtggtcgatcgttccctccgcatagggattcgaaagctgatgatccacgtcgtcgtaacgatggtaatcgtcgatcgcctgggcgaatattttattcgcattttgagtaaacatagtctatcctttttattttgtaattatccgaggaaacgattatctttgcagaagataggatatatccaaagccggttcgaacaagttcggcttgccgatcggctttcactgtctttgcatacaaagatcaaacaaaggtaatgaatttttatcacaaagcaatatccctggcgggttttgtattactgaccgtcctccctgcgcaggctcaagtgcggcaaacgcgggaagaatacataaacaagtacaaaaaaatagccgtcgcccacatggaacgctacgggattcccgccagcattaccatggcccagggcatcctggaatccgattgcggcaacagttggctgtcacaggcttcgaacaaccatttcggaatcaagtgcaagcgtaactggacgggcgacgtggtctattacgacgacgatgaaaagggcgaatgtttccgcagctatccttcggtcgaggcgtcctatcaggatcatgccgaatttctcgacagccagccgcgctacgactcgctcttttcctatgctcccaacgattataaaagctgggcccgggggctgaaggccgccggttacgctacggctccggactatgcgcagcgactcatccgcatcatcgaagagagtaaactctacctgctcgaccgcgaggacggacttaccatttacggagcgcaaaccggacacctcaccgacgactggttctcgggccaaagcaacgtcgatcaagccgcagcgatcgcttcgggggcagtcgatcccgacgactaccgcgtgacggtcaatgcccataagggttacaacgtctatcgtaccaacggcgtgaactacatcctggctcacgacggagataccttcgagaaaatttcccgcgacttccgcatttcggcccgcaacctgcgtaaattcaacgatgtaagcaaaaatgcccagcccgttgccaacgaagtgatctacatcggccgcaagaagaagcgctgggacggcaacgttctgctgcacaccgtgcgcgagggcgaaaccctctggtcgctcggacagtcctacggcatccgcaccaaatcgctggcacgtctgaacaaactcaaggaaggcgatgcgctgactcccggtacaacgatcaagatacgataatcaatccttcgatatagcatggaaagcatacccctgcgaaagaaaatcctcgaaaccatcgtaagcaaatcgacgctcaaacagaaggttttcgacaacacgttcgccacattcaacgacctgaaagaaaccctgctggagatggcttccgaaatggacgaccagttggacggactcctcgaccggcgcgtgcggctcgaataccgtgaccggggcaagttcgaagcccagatacaggtggccaacgacctgctgatcttccagatgcacaccgacgtcttcgagttcgagccgaaccacgtcatctggcagaatccctacgtgcagacggaccgggacaactcctactgcggcgtgatcaacatctacaacttcctttcggactcgttcaagttcaaccgcaatgccgacgaaggctatctcatcggccgcattttcatcaaccgtgaaaagtgctacttcgtcgaagggaaacagcagacctcgatgcgccccatgcagtttggcaaagcggagatcgattccgaggcgctggtccgcattctcgaatcggcgatctattatgccctcaatttcgacctgctgctgccctcctacgacgacaacaagcgcgtgacggtcgatcagttcaataccaaactcgataattcgaaattcgtaaccggcaaacgcctgggatacgatttcgatgtggacgacatttagaatcagaaacagatatagagaaccatgctgaaaaaattactcctgctgacccttctcggcactgctttcgccgcacaagcggaagccgccgctccctccacttaccgcgacatcgcccggcttcgtgcgatgaaccagcgggcgcagggcatccgtcccgcagccgacggaaaatcctatacgactcttcgcggcaacgccatcgagcgtcacagctacacgaaggacgctcccggcgagctgctgttcgaatggaagaacgacaaagaaaaccgcgatatcgccgactatcagttttcacccgacggaaaactgctgctgctctcgatcggctccgaaccgatctaccggcactcctataccaccgattactacctgaaagacgccgacggcctgcgccccattctgaccgatctgtccgacacgcgcgacgcttcgttctcgcccgacggacggacgatcgccttctcgagcggcaacaacctctacctctacgacatcgtcggggattccgtgcgtccgatcacgacagacggtgcatggaaccggattatcaacggtacgaccgactgggtatatgaagaggagtgcgccttcacgaaggcttacgctttttcgcccgacggacagaagatcgcctacctgcgtttcgacgaatccctcgtacccgttttcgagatgatgcgttacgacggcaagctctataacgaagcctattcgttcaaataccccaaggcgggcgatgccaattcggtggtcgatctctacgtttacgatcttaaaacgggcgaaacggagcgtgtcgatgtcggtcccgaccggggacagtacatccttcaaccggaatggacgcccgacggacggctctgtttccagcggatgaaccgtcgtcagaaccatttcgaagcggtactgtgcaatccggatggcacgcagcaggtgatctatgacgaacgctcgcccaaatacgtcgatcacctcaacaagactttttatttcctggaggacggacgccgtttcatcgttcgggaggagacctcgacgggttatatgcacctctacctgtacggtatcggacaaggtgtgcttcaccccattacgcagggtgagtgggaagttaccgatttcgtcggattgcgcggcgataaggtttattacatctcgaccgaaagttcgcccctgaaacgcgacctctaccgagttggactcgacggcaagcacaaggagcgcctcactcccggcgacggttactattcgatctatcccagcgccgacctgtcctactacatctgcgaaggcggcgacagctccgcccccggccgtaccgacgttttcaacgccgccggcaaacgggtgcgcacgctctatgacaacgcaccgttgaaggaagcgctcgcggaggcggggcttcccgtccgggagttcttcaccttcaccaccgagcggggcgacgagctgaacggttacatgctcaagccgctcgacttcgacccggcaaaacgctaccccgtgctgctgacccagtattccggtccgggatcgcagcaggttgccgaagggtgggggcccgactgggaggacgcgctcgtcacgcatggttatatcgtcgtgtgcgtcgatccccggggcaccggatatcggggcgaagagttcaagaagctcacttacggcaacctcggccgactggaggtcgaagaccagatttcgactgcccgctacatggcccgtcagagctacgtcgatcccgcgcgaatcggcatttacggctggtcgtacggaggtttcatggccttgggatgcgctttcaggggcgaaggtcttttcaaaatggcgatcgccgtagctcccgtcacttcgtggcgctactacgattcgatctatacggaaaatttcaatggtcttcccgacgactatccgaagggatacgacgacaattcgcccgtcaatctcgcgcacctgttccgcgacgacagcacgcgtctgctgatcgttcacggtacggcggacgataacgtccatttccagaacacgatggagatggcccgtgcattgaacaagctcgggaagcagtacgacatgatggtctatcccgaccagaaccattcgatgatgcccgacgatatgatacacgtccgcgagaagatgctccgctatacgttggaaaatttgtaaccggcaaaaaaccgtgaaaaatctgctgctgcatcccacgccgatcggaacggtcggaatcgtcgagaacggtcgggccatcaccgacattctcttcgaagaacaactccccgggcatgccgtccggcatacgaccctcttgctcgagcgggcggcgaaacagttggatgaatatttcgccggaaaacgcacctctttcgatctgccgcttgaaccggagggaaccccttatcggaagaaagtttggcaggtcctcacggaaattccttatggacaaaccatgacttacggcgaaatcgcccgtcggacaggtaatccgcaggcttcgcgggccgtaggcggtgccaaccatcacaatccgattccgatcgtcattccctgccatcgggtcatcggtgcgggcggcaagctgaccggttacgccggcggtctgccgcgcaaagagttcctgctcgccctcgaaaggaacaggctgccgaaataaaaaacgaaggccggagtgaaaactccggcctttttcgcaggctctgctccgcatcacgcaggctcgaacatatctttgcctacgccgcaaagcgggcagctccaatcgtcgggcagatcttcgaaagcggtgccgggagcgatgccgctgtccggatcaccgaccgcagggtcatagatgtagtcacaaactgtgcaacgatactttttcatagtccgaaaatatttagattaagtgaaactgtatttttacaaatataatacctcttccgggattcctcgtgtttttccccgaaaatttacgataattctgtatataccggataaaatcgctccgtaggcatcgaagccgggtactacgccgcagctgtcgggccgaacaatcctccgcaggaggcaagacagctccgaaaggaagacgacaaaaaacgccgccgcaatctatgtgcgacggcgtaatattcgttctttccacccgggcagaagaagcccggttcgaacggaagtctttatttgatgcgctcgtaatattcgcgggtacgcgtatcgacgcggatcttgtcgccggtattgatgaacaggggaaccttgatcgtcgcacccgtattcaccgttgcgggtttgagcgagttggtcgaggcggtatcgcctttgatgcccggttcggtataggtcacttccatatcgacgatcgggggcagctcggcggaaagaacgctctccttctcggtgtggaacatcacctcgacgatctgaccgtcggccatcaggtcgtaattgtcgatcaggttcttgtcgatgttgatctcctcgaaagtttccgtatgcatgaagtgcgcacccagatcgtcttcgtaggtgaactgatagggacggcgctccacacgcaccggctcgatcttcgcaccggcggagaaggtattctccagcacgcggccgttttccaggtttttgagtttggtacgcacgaaagcggggcccttgcccggtttcacgtgctgaaaatctacgatctggaaggtcttgccgtccaattcgatgcacatgccgatcttgatgtctgctgtagttgccataggaatatttttatttacgatttttcgcggaggcaaagttacgaaaaatctgcgtaaatcgggcaacgtcggcttatttttccgaatccgaatcgtttcgtcccgccgatcgtccctcgccggtccatcggtagcgcggtccggaaatacctaaaagagccgtgacccgctcggccaccgaccggcacaactcctctacggacgaggggcgggcgtaaaatccgggggaagcgggcaacacgacggcgccggcttcggtaagagcggtcatgttgcgcaggtgaatcagcgagaggggcgtttctcgcacgaccagcaccaggcggcggcgctccttgagcatcacgtccgcagcccgttcgatcaagctttgcgaaacgccgcaggcgatgcgtcccagggttccgaccgaacagggaacgaccgccatcgcgtcgtaatcggccgaaccgctggccggaggagcgaacaaatcgtcgttgtcgaaaatgcggatgcgaggatcttctggcatagtaactccttcgaaatcagccacttcactggcatgagtgctgtaaacgagcgcgatttcggaaacctcttcggcccggagcagttgctcgaggcaaaggcgggcatacagagcgccgctggcggctgtgacggcgacgacgattttcatagagttacaattcgatggttttgcatttgagccccaacttccggatcttgtccaacgtgcggggcaaggcataacgcatgttccggaacgatttttcgctgtcgtggaaaaccacgatagctcccggttcgaggtgtttggttacgttcttcaggcatttgcggggcgagagcgaccggctgtaatcgcgcgaaagcacgtcccacatcaccagcttgtagcgctgcgacaacgcccgggcctgcgccggcgtgatccgggcgtagggtggtcggaacagttcgctgtgaatcaaatcgttggcgaaatcgacatcctcgatgtagcgttccaggctcatcccccagcctttctggtgggagtaggtatggttaccgaccttgtggcccgcgtccacgatgcggcggaaaagatcgggataagcctccacgtttttgcccagaacgaaaaacgtcgccttggcgtcgtacttctccagcatcgccagaatccactccgtgatgcccggtgtggggccgtcgtcgaaggtcaggaaaaccccctccgggtcgtcgatctcccagatcagcgacgggaacaggtgacggattattttgggcggcttgagtttcatgacgagaaaaaatactccggcggagtacggcatcgacaaagatagtacaaaatcgccgattttcaacagacgatcttccggtgcgttcgctttataggcaaaatgaaaaatatgaattcctcctttgcggaatatgccgctgattctcgaaacccccgacgaattgcgttgggcggaggagatcgcggaattaaaacggttttgggaagaatagtcgaacggttgcgattcgcttcccgtcgaaacggctgtttcggcgggaactttcgtgcgaaaatatttgcaggatttgatcgagttatctatctttgagaaaaatacgctactgtagtttgtctgcaaaaacgttatgcctatgaagaaatcgtactttttgttgcttgcagtcctgttgtggggttgctcgacgttcgaagaggaggttcttccggccccgggggattctccgcgtcagttgtcggtttcggcggtggaagagcctggtcccgatccgggttcgttggagatcatgcagcgtgcggtggacagcgttgctgcccatagcgggcagcgcagccgttctgcctcggtatcgggtgctcagatcgaacctacccaccgttacgtacgtttctctccggccacgaaagcgcagttcgacgctttgttcgatcaggatgaatttacctgttataactttccgttggatgaggtttctccggtaagtgcggatgagggcttccggatgtccggaccttcggatactccggaacagctctacgcggtacttcgtacgacggtcgtcttgcccgatacgattgcgagcgaggttttgaaagagttgtacgacccgtcggttacggagcggggcgttgcggatccagtgtgggcggatcgggtctgggccgaggctcgtgctttgatcgacgacgggcgccatccggggaaaataattccttacattccttccggagagattaaggtttgggacaatattgccggagattacattccgatcgagggtgttatggttactatcatgcctcctgataacttgttgagggtcttgacaacgaggacagataaggatggtaaattcagaatgtcggggtcggttcaggagccagttaattatgcgctttcgtggaatacggtgtattggacgatcaagagcagcgccgtgagttcggcgaacttgcggggtcccagcgtgcagggcgcctggaatgtgaagatttccggagatgatgttattagtggtcctgcgacggtttttcgggccgcttaccgatactggcacaagatgccggcattgggattgaccgcacccaatttgggtaggaaagtgagaattacatgccataattcggtaggtttcacatattattggaatggaaaagagttaagtgcttccggcctatttcatcctgtcgtaaatagtgatgctgatcctgatatagaagtggcctgtaagagaaatgccagctatgttttcggaactgtagctcatgagattgggcatgcggcccattatgctttcaatccgaaatttaatggaaagacgaatgccttgattaaggagagttgggcacaatttacccgctacattttaacggaaacggaatacaaggatttgggcctatatggtaaattgcataaaagtcgattatttaatccgaatcagcatttggtggcatttcaggttccggattattataatcagcaaatgtggtacttgggattaggggctgaaagagatgagactgtgcgattgtacactcccatgtttgtagatttatacgatacattcaatcaaaataaatggtatggatattggtctcccggcagaacaaaagatgatttggacaggaccccggatgatgatatttgcatgctgactattcgggaaatccaagagattgcttttggatcgaaaaacaaatcggaggctatcggatggattcggcagtacgccgcccgatacggttttacttcggaggaaatcgatcggtactgggcggtttactctttaatcgaggatgaagattatgatcggtataaatagtatgaataattattgaaaaaacattggattatgaaaaatttgatatggatattggcggcgattatgcttgcaggctgtggtgacaacgaagagggtcaggatatggggctgcatggcgatcctcccggatatagcctttttatttggtcgaatgagagtgatcaccggataacgatgacggtaaccgatcgattcgagaagaaagagatccttcccggagaaagcctgttgcaggaggaggtcggtttcgttacccctccgagccttgaaggatatatgatagacggtgtttcgattgtgttcgacgatggcccgtacgggggtgtatttttcaggacagataaggttacggcgtttaatccctgtcttgaatgtaattatacggtggaacggtcgaatatcgatggttatattggattttgcaggtggacctataccttcaccaacgccgactacgatgcggccgtggctcgcgggccgatgaaggagcagtaaccatacgggagcgacttgtttgcaggcacgaaacccggccggggaatatttcccggccgggtttttgcaggaaactctgccgaagccgtttgcattctcgaaaaatatccctacatttgtagtaaacagattaaccggaccggactatgaaaaaattatcgtatctgctgacattgctgctactcgttaccctcatgacgggctgcaaagcgttccatactctgatggattcgaaactcaaagccgctcagggggcaccgtacgaattgattgtcgtgtgcaaccaacagttgtgggagagcgagttgggtgatacgctgcgttcggtgctgttggctccgattccctatctgaacgaacgggaacctctgttcaacgtgatgcagtttccggaatcgggattcaaaggtacggtcgtcgattaccgcaatatcctcaaagtgctcgtcgatccctcccttgcggcggcttcggccggtgtgcaatacgatgttacggcttctccgcaggtcgtggtgacgcttcagggaccgacccgggaggcacttacgcaatatgtcgcggagcatcgtgcggagttggtgcaaaccttcgaaggggccgagcgcgaccgctcgatcgctttcgccaacaagttcaatcagacggaatccggcaagctcgttcgagaaaagttcggcgtggagatgaagattcccaaaggctacatcctggcccaacaaagcgatgatttcctctggttccggtacgaattcccggctgcgagccagggcttcatgctctattcctatccttacgaagggaagcagtccctttcggaggaggcgttgctggctgcccgcaaccgtttcgccgctcgcattccggggccgagcgacggctcctatatgaccacatcgaaagtctttacgccccggtatcggtttttccggctcgaaggcagagcctgggtcgaaatgcgcggattctgggatgtcgaaggggatttcatgggaggtccgttcgtaagctatacgaccgtcgatacggcgaccgaccgggttttcacgctggattgttatgtttattctccgaaacttcccaaacgcaattatatgcgcgaagtggaacacttgcttcatctggtgaaattccccgcagcgaccggttccgcatctgcgactgtcaccgctggcaggcgggaggcggcaaaatcagatgctccggcatcccgggacgcaaatccgaaacccgaagcaatctcgtcggaatcctgataatccgccgccccggtgttgcaattcctgacatatctgttcatcgccatctatacggcgacggttatcggcatcatcctggttgtcattttgggcaaccgcaacccgctcaagacgatcccgtgggtcgtcgtgctgattttcgctccggtcgtgggattggttttctatttcttcttcgggcaggatctgcggcgcaagcggattatttcgcgccgtacctacaagcggctcatggtctatgctcttccggcccatgtgcgtcgaagcgatgcccccgttccggccgcatgtcaatccctgtccactctgcttaccaatacttcgcaggcggtttccttttacggcagccgcctgacccattacggcgacggggcttccaagatgaccgccctgctcgaagagatcgaaaaggcccgcgaccatattcacattctctattatattttttgtgacgatgaaacgggtgcccgtcttcagcaggcgctgatccgcaaggcaaaggagggtgtcaaagtccgcgtactctatgacgacgtaggctgcaacggggtcaagaaagaatttttccagcagatgcgcgatgcgggtgcggaggttcatgccctgctgcatgtacgctttccgatgctgaccgaccgggtcaattaccgcaaccaccgcaagatcgtggtcatcgacggccgggtaggttttttcggcggtatgaatatcgccgaccgctatgtgaaaggaccgggttggggggtatggcgggacagccacttcaaggtagaaggaaagggggtgtatggcctgcaatccgcatttctggtggattggtcgaccgtcgaacgcgtacacctggatacctcgaagttttttcccgaagccgacaactatacctcatcgaccatgcaattcgctaccagcggtccgttggggccctggcgaacgttgttgcagggtattatgacggctatcgccggtgcgcgacggagtatctgcatccagacgccctatttcctgccgaccgagggcctgaactccctgttgcaaacggcggcattgggcggtattgacgtacaattgatgctgcccgagcgttccgattcccggattatcgataaagccgtgcattcgttcatcgacgatatgctccgagccggggtgaaggtttacttttataccaaaggcttcctgcatgccaaaatgcttatcgtcgatgatctgctgacggttgtgggttctgcgaacatggatttccgcagtttcgagcacaacttcgaaatcaacgcgttcgtttacggacaggatttcaatacggcaatgcgtcgtgttttcgacgaagacctgcgctcgtgccggcggcttattccttcggaatggttgcggcgacctcttccgcagcgattgagcgagtcgttcatgcggctcttttccccgctgttgtaaggccggaggaggcgatgacggcgatcggggtttccgttgttgtccgattcgcaaaaaacatagccacaccacggaaagcccggagcctgtaaaaaatatttggagaatccgatttaactttctatctttgtaaaacaaacgtatcagggttctgaccttcacgggtcgggattcttatttttttgataaaaccatggcaaaagagattatttatctgacggcagagggttacaagaagctcaaggacgaactcgaccatatgcgctcggtggagcgtccggctatatcggcggccattgccgaagcacgcgacaagggagacctgtcggaaaacgccgaatacgacgcggcccgggaagcacagggactgctcgaaatgcgtatcgccaaaatggaagataccattgccaatgcgcgtatcatcgacgaatcgaaagtcgataagagcaaggtgcagatcttgagtcgggtaactcttctgaaccacaataccggcaaggaggtgatctatactatcgtcgccgagcacgaagccaacctgcgcgaaggcaagctggccatcggcactcccattgccaaagccctgctgggacataagaaaggggaccgggtggacgtgaccgtgcctgccgggacgatccatttcgaaattctggatatcaacatctgaaatagggagatcggggtgaggcaatctttttaggatgtagaaactgttgttgattattttttggtaaggaatgctttcgggcgttccttttttgttcgtatttgtatgattccggtgctttgtcagtcgataccggcgattgctgctatgtacggcggattgcatgcaaggggagttcggtgccatgatcgcgcaataaacggaacgtccgaccttaaggtcggacgttctctgttttctcgttttggaggagctattttaacgatgtgcgaattttgcctgtcgcatatccataagattgatatttgacaggccaccaccgatgagttctccggcggggcttgcaccctctttggtcagatttaccatttggcggataacgggtccatagttgccttctgcatccgctgctacgccacagatggtgttttcatcccaatagactgccagcaactgatctaccgcatccttaaattcaggtattccgtaagtaaccagattgttgattatgctgcggtccgaatattcgtccggattactcaaatcgcccatgaaacatcctgtccaccaatgagctgccttgtcgttgtgggatactttcaacaacagaacggcatattcttcgaagcctgcgaagttgatgggatccaattgggcgagttctgcgccatcgtaccatgcgtagctgtcgatgcttacttcggcaagcgcagcggtattctcttctaccgtatatgtttcactgatgatgaagggagcgacagggactcctttttgatcgatggcaacggcccacattcgcaattgatcgcctgtctgaagattccgttcaaattctacaggacctgtggccgcgagcatggaaaccgcctcggcatgcaggccggtggtgcccatatagtctttgattttggattcaagcacttttttcataccctcctcgatattttcgccgaaggcctgataatcctcttccgagataagatcgaatatgtaaacgacatcgtctgctgacggaacggtggagaacttggaggcgacaaccgaacttaaagtgcattcgaattgaacgtcgaacgtttggggatcccctccttcaagagtcttgaatgtttcggttttgatcggtgtggtcgggaatccctgttcgcatccgaaaaccgcaatttgatattcccagcccgggttgagttcttttgcttcatacgtgaaaggtccctcgtggagatacatgtcgagcataccccagccgaaataacgatcgatcagatatttttgataatccgtacccgtcggcacctgggactggatgtcagccgacagaacatccaggaagtaaacatcgctgttcgacggtgtaacggtaatcgatgctcctgtctgtgtgattgctgtcgttgcgatttcgaatgtattggtggattcgggtgcagtctgcgctgtaaaagcttctgcggtaggcttcgtcgtcgtgtgtccgtcggcatcgatacctactgcgacggcccaatacttggctcccggttcgagtcctctggccgtatatgcatcgttgccgtaagaagtaatggctttgaccgcctcctcgcgggtcatctcctgctgctccatcatcactacctcgatgaaatattgtaggtaatcgtcaaaaccgtgtttttgggattccagccaatcggcgtcggtgacgatatcactgaaataactttttgtttcgttgctcggagaaaccgtgatttcagctgtcgtcggagtaatgttacttactgataccttgaatgtcagttgattaggatcagtttgggggggg

SEQ ID NO: 10407 - DNA, 42560 bp, Unknown
  gut microbiota DNA sequence
cgttacgtatgcctctcggtcggatatgcgctgatagtgcttgatgatttgcgccttgatgttgtccaatgccagattgacgttccgtgcttcggcactcttgcctttggctcggttgcctttcgcatcccaaagggttttcgggatggtctgcttgcaactgaactgcgccacagtaccgttgattgtcactcgtcccatgatggggacaataccgtctttctccttgctgccgttcacgtagaacagcactttgaatgtacttcttgccatactcgttttttttgtttgcaaagttaaatatcaacgagttagaccttgatacgcaaatcggtgacaaacggtgcaatagcatctctcatatatgttaaatattactctttcacgggtaatgatttagtaacgaaacaacgtccattatccgcattttttgtgctgaaactaactgattatagattttgacaaacaaacaaaatactgataatcacgtaaattcaacactctttttccctccttaaaaatggatgcaaccaatgacatcaccgtctttttttacgacaatataacctccattggcattgaaacaaccatcccacggagaagacactgtcatgccgagagcgaaagctaaaaggaactgcttgattttgtacgcatacattggctgtccttccggactattgatgtgtaagggatcatcttgcgcaactttctgggttgcgactgaaacttcacttccttgacctgaataatatttatccatacattcagcgatgatacgagccatgcccaaatcaagcatagtaagattatttctgagagtttcgcccgaaatttttgaaacaattttatttttcgataatcaggcgtccctgatagcttacatcgaaagcgccggcgcaggtgaaggtaaccgtcagctcggtccttgcggcctcgcccgtgaggttggtgattacgtatttggcgaagggcgtgcccttgatttccggtgtgaccgaggcggcgctcaagtcaatggttttttcctcgcctgtgtaggaaatacccggtacttccatttcgagggcgggcatttcggcggcgaagcgggtttcgtgcatcaggattcgcaccttgccttcgccgtcggcaaccagttcgaagagagctttcccgtcggtgaacgtggcgcccgaggcgaccgtcgtgacggtcgaggtgccgaagaaaagcatgttggccgtgacggttccgtcgttgatcgaggtgttttccgtggcatacgtatacccgtcggggagttccggggtaggatcgggatcgccggtgcagccatccgagcaactgctcaaagcagccgaggcgagcagggagaaggggaggagaaacgtgaagaattttttcatagtatggaattttatagggtgatgctcaatgaaacgccgaaagtgcgtggccggccccgctgcaggaacgagttgccgatcgacatgaaatagaatgtatcgtagcgggtgtcggtcaggttgcgtccccagacatcgacggcccagtggcggtgttcgaagcgaatcgaggcttccagcagggcgtagaagggttgcgagaaggtgttcgcttcgttccagtagattcggcccgcaccgttggcagccactcggaagatgacgtattcgagccagttccagcccgtgcggagcgtataggacgctccggcgtagagcgtgtgctgcggggcgtaggggatgaagttgccagcgtagtcggctttgcccgtatcgaatttgacgaacgtggcgcgggtgtagccgtaggcgacttgcaggtcgaggtttcgccagagggtagccagcagcgacgcttcgccgccgaagctgcgcgtgcggccggcgttagtcatcagacggcccgtgacctgtccttcggggaagaccgtgagctgctggtcgcggcagtcgatgtagaagagcgccagatcggcctgcaccttgtgcgaaggggtcgagaggtgggcacccacctcgtagttccagcttttctcgggtttgtaggtcaccacgtcggccacgtcgtagagcgagccgaatcccatctgtttcatcacttgctgctgcaggacatccgagaacatctgggtattgaatccgccggccttgtagcctttgctgacggtggcgtagagcgtgttacgccgtgagctgcccatccggtagagcaccgatattttgggaagtatctccgtgaaggattgtttgagcgtacccggctgatcgaccagaatagcatggggatagctcgtgccgtcgggtgtttgggtcgtgtaggtggcttcggcatagcttcggtagtggagcttcgaagcctcgaaatcaacgcgcaggcctgccgtgaagcgccatcggccggcgtcgtaggtggattcgtggtagagggccgctccgtagtcgggcgtgcggaagcggctgtcgagcaggaacgtatcttcgccccattcggcgtgaatcccctgcggctcgaaacgatcgaggatcaggttgcggatgccgtcctccttgaagagcaccggtgcgtgcatgctggtatggcggtagaagccgaaagcaccgaggagccagcggtaggctttgtcgtcgggggagcggaacacgaggtcttcggtcacggcgtgctcccggcgggcctgtgtcagtgtaaaataggagagcggcaggaaatcctggtcgaggttcatccggtcgtcgaggtactgatagctggtgatgctcgctacggagaatttctctccttcgtagcggatcgtcagtccgtcgttgaagttcgtgcggcggtaatcgctcgggtcgttgtaagcgatctggccggtttcgacataggcgtaagggtagccgccctgttccagcttgacgaacgagaaggtgttgtcgatacgaagtccgtgcaggttgcggtactgtaccttgaaccggccgccgccgcttctctcccagtcgcatttttcaccggtatagaggttcttgaagaagccgtcggtcttggaatagtaggctccgaccgagaagccgacccgttcgcttgttttgtagtaggtcgaaatccggtatttctgcgtgttgccgctgccgtattccatgcccagccgcactccttcgaaggtgaagggcgacagggtatagacgtttattacgccgcccatcgtgttgcgtccgaacagcgtgctctgggggccgcgcagcacttcgatccgctcgatgtccgtcaaatcgaagtcgtaggcgtccttgttcaggtaggggatgttgtcgatgttgagccccatcaccggttggtcgatgcgggcgcccagtccccggatgtagatcgaggaggtcatgcgcgagccgtagtccgggatgtggaagttgggaaccgcctgcgaaacctctttcagggctgcgacgtgccgccgttccagatccgtgcgtccgattacggaagccgttacgggttggttgcgcaggtcgaggccctgtttgatggccgtgacctggatgtcctccacctggataacggagtccgccagtgccggagtggagtcttccggcagtgcgggggcggcacatacgctcatggcgtgcaggagtatgcacgccgacagaaagatgatatggatcgcctggcggatcatcggatcgtttcgaacggcaaaaacggcgcagaccgtagagtccgtcgggtttctccgatttcgccggagcgccgcgtttgcttttaccgcgattgttcggggacaaaggaacgatattccgatcgtttttgcaaccctcatttatgaggagtgcggatgtcgctttcgtccacgtagcccatgctgacggcgcagatgacgagtgcggcgacggactgtacgccgagcttctgcatgatgttgcggcggtgggagatgacggtcgtgagcccgatttgcagccggtcggcgatctgtttgttcagcaaaccctgagcgatgagcgtcagcacttccgtttcgcgtacggagagcaggttggcggccggagtgccgtgctgccggggaagggcatggtcgggtcgaggcgcttcgctgcgcaggcacagcagatcgtgtaccagccgttcttcgccgccgaagatatcgatctggcgcattcgggcgaactgggccgaataccctttgcccagcaggatcgtcttgtgactgttttccaggaagaaggtgcggtggcgcatgaaaacctgcatggcggcgaaatagtggaaatagcgttccggtccggaagcgatgaattcggtgaagctgtcgaacacggcgatctctcccggaggacctaccttttcgagaatcgtccgcaggcccaacccgatcaggatgttgggcgtaatgacggcgatggccggttttgtcgggggacagctcattcgtggtggtagggttcgttgttcaggatggtgaaagcccgatatatctgttcggcgaagatggctcgcacgatctggtgcgagaaggtcatcttcgagagcgacagtttggtatcggcccgtgcatatacctcgtcggagaatccgtaggggccgccgatgaccatgaccagccgccggatgccgctcgccatgcgtttttgcagccagtaggcgaagtcgatcgaacggtattcgtcgccccgttcgtcgagcagcaccacgtaatccccgtcgccgaactgacgcaggaggctggcgccctcggtcgtgcgctgctgtttggccgagaggttcttggtgttttttacgtcgggcaggactgtgacggcgaaacggcaatagaaattgattcgccgggcatacatggccagcagcgattcgatctccttggagtccgtttttccgattacgatcagttcgatgttcacgttggttggtttatggtcgtcctgccggcggcttttggcggcggaacggcgagaggttgtttctgcgtccggcgattcgccaacaggcatgacggtttccggccgaatgtgcggccggggtacgttacggttttcaggggactatttccaggtccgtattccactctccgtcggcatcgatgcagattacgggacgcgaaggttccacggacttgagccactgataggctttgtacatattatatccgttgcccgactctccgcccagagcgaatccgatgatgcaggtgtggttgcgggagcggtagtacatgttccgcacgcgttcgaggtattcgtccgcaagacgcggatcgttgctcggtgtgccgcctgtggtgcggtcgtcgcgcttttccggagcgttgatattggcctgatcgatcacgaagaggcccagttcgtcgcacagattgtagaaccagtagggttgaggcgcattgggccagatggtattgatcccttttttcttgagcgccagcagttctttgcgcgtggcagcggcgtccgctgccgcgttgtatctttcggaaacgatagtgacaggtttgtcgaaacgggtaatcttcccgtctttcatctccgtctttccgaatcctactttgagggggatgtactccttgaagactcccttgcgtttggtgtagagcatgacccggtatagcggggcggcgcctttggctccccagctattttcgtaggtgtgataaatgtagggcgagaagcgtaccgtgtcgagcgagcgtccgggaacggttatgtcgtttacgctgaaatcgagcagcttgccgttgggggcgtaaatgtcgaacccgacggtgatcggttcctcgtagttgtagccgttctgcacgatcacctccaggtcgagcacgccgaatttgcgggtcgaatcggggatcagcgctacgttgaaatcgcgtatgctgcgtttctcctgggcgaaaagataactgttggtaaacggttttaccggggtcggagtgaaacctttttgcaattcgggcgtattactttcgtgcagttccagtaaaatgaggttatcgccctgtttgacgtagggggtaaggtcgaagtcggccggagcgaaagggtcttcgaccacggctacggtgcggtcattgacgcggagcgtgtaggccgtgcccgtgttttcgagatggaggtagatgaacgagtcgaaccaaccgttcggaagattgaccacattcccgattccgagcacctcttccccgtcgttcagaagtccgggggcgaaaaccaggtatttgtcggtgtttttccggttgagcgcatcggcgtcttcgcgggtgtcgaacgggacgaattcggaacggtggatgcgtcccccgtcttgtccgtaaacggccccggtgtaacacaggacggcgattgcgaggaaaattcgtttcatggcggaattgtactataatgcgattgacaaaggtactttttttttgacaaatcacaaatatatcctatctttgtctatctttaagaatgagtaaaaacaagaagaaattaccgaacgtatgaaaagcttgagaatcgcagaattgctgcagtcgccggcgacggacgccgaggtcgttgtgaaaggttgggtcagaaccaaacgtggaaataagaacgtggctttcatcgccctgaacgacggatcgtgtgtggcgaatatgcaggttgtggtcgatctggcgaaattcgacgaggagctgctccgtaaggtgactaccggagcctgtctgcgtgtggacggacgcctggtcgcttcgtgcggtgcgggacagggcgtcgaggtgcaggccgagaagatcgagatatacggtacggcggatcccgaaacctatcctttgcagaagaagggacattcgctcgaattcctgcgcgacatcgcttatctgcgtccccgtaccaacacgttcggtgcgatttttcgcatccgtcacgcgatggcctatgcgatacataaatattttaacgacaaaggtttctattacctgcatacgccgctgatcaccgcttcggactgcgaaggcgccggggcgatgttccaggtgacgacgctcgatctgaacaacctgcccaaaaccgaagagggggccgtggactattcgcaggactttttcggccgtccgtgcagcctgaccgtgtccggccagctcgaaggcgagttgggagctttgtcgctggggcagatctatactttcggcccgacgttccgtgccgaaaactccaatacgccgcgccacctctccgagttctggatgatcgagccggaaatggccttttacgagctggaggacaacatggagctggccgaggatttcctgaaatacctgatccgctacgcgttggagaactgccgcgaggatctggagttcatgaacaagatgtgggacaacggtttgatcgagcggctcaacttcgtgttgaaccacgaattcaagcggctggattataccgagggcgtggagattctcaaggcttcgggccgcaagttcgaattcccctgcgactgggggtgcgacttgcagtcggaacacgaacgctatctggtcgaggagcacttcaagcgtccggtgatccttatcaactatccgaagcagatcaaggctttctacatgaagcagaacgaggatggaaagaccgtccgtgcgatggacgtgctgttcccgaagatcggcgagattatcggcggttcggagcgcgaggccgactacgaaaaactttcggcccgtgtacacgaactgggtatgaacgagaaagaactctggtggtatctcgacacccgtcgttggggatcggctcctcattccggtttcggactcgggttcgagcgcctgctgctcttcgtgacgggtatgggtaacatccgcgatgtgattcccttcccccgtacgcccaagaatgcggaattttaattaaatccggaccatttatctattaacccgttttcagccgttcctgataatacttttatcacgaactgcaatattttattttgccaaaagaagaagccgattactaatttcgaagttaataattgggaggagacaagtatgagcatgatcaatcaaaagcaggtattgtccctgcaacagaaattatcaccccagcagattcagatgatcaaattgttggagttgccgaccatgcagctcgagcagcggatcaagcaggagatcgaggagaacatcgtgttggaggaagacgatcatactccggaggacgagcagccgcagcagatttcggtggaggaatacctccgggaagacgaaactccttcctataagagccgtatcaacaactattcgaaagacgataaaccgcgccaggccccccttgcgggcggacgttcgttgcaggagtacctggtcgaacagttgggataccgcaatctctcggagcaggatatgcgtctggccgtttatctggtcggcagtatcgaggaggacggctatctgcgccggagtttggaggctatcgccgacgacatcgccttcacgcagggcgtagatgtttcggtcgagcacttggaacgattgctgtcgattatccacgaactcgaaccgaccggtgtaggtgcccgtaacctgcaggagtgtttgttgttgcaattggatcaggagaatcttaatacccgctcccgccggctggcccgcaagatcgtggagtgctatttcgacgagtttgtcaaaaagcattacgaaaaactgatggcccggcttcaggtttccgaggacgaattccgcgaggcgatcgaagagattacccgcctttcgcccaaaccgggcaacctttactccgaaggcggggccgatacgacgccttacgtgacgccggatttcatcctcgattaccacgaagggcatttcgacctgacgctcaattcgggtaatcttcccgaagcgagaatcaatcatcgttatatcgaaatgatgcggggcatggtggattccgacggtcgggtcaaggagaaggaccgcgaggcgattcagttcgtcaagagcaagatcgattcggccaagtggttcatttcggcgatcaagcagcggcacgatacgctgatgcggacgatgcaggagattctcgattaccagcaggaatatttcaaggacggtaacaaaagtaagttgcggccgatgatcctcaaggatatcgccgatcgcacggggttggacgtatcgaccatttcgcgcgtggtgaacagcaaatatgtacagacccagttcggcatcattttgctcaagtcgctcttctcggaggcgatgcagaccgacagcggcgaggaagtgtcgagctatgaaatcaagaatatcctccagcagtgcatcgacgaggaggataaacgcaagcctctgaccgatgaaacattgatggatatcctcaattcgaaggggtaccgcatcgcacgtcgtacggtggccaagtatcgggagatgttgagtattccggtggcacggctccgtaaacagatttaatcgcgtagaagatgtatttgcgtttgtcgaaggctgtttccgttgtgctgcatccgttcctggtgccgctctatatggtgtcgctgctattgctggccggtacggtctattcgctttatccgctcaaggtcaagatataccttatttgggtgacgctgctttttacgacgatcattccggttttggtgatcgcactgctcaagtcgtatcgtaagatcggcgatgcggatttgagcgaccgcaaggaacgcttcatcccgctgctcgctatgatcgcctgctatacgttgtgcgccgtcgccattgcgaggattccttcggcgcagatgttgagccgttttatgtttgcgggagcctgttgtgtcgccgtgtgtctttttgtcagcttttattggaagatcagcctgcatatgacggcgttgggtgctgccgtggcttttatcgttctgatcaatatcgccagcggcgggggactcttcgctgcgtttatcgcagccctgctcgctgccggtgcgctcggctccgcccggctgaaactggggtatcatacgctgtcgcaagtggcggtgggattcgcaactggttttatcgtcgccgcaggcgtcggtttgttcaactggtaatatctatgaaaaataaggcagtgtgtctttatgacacactgctgttttattatcgggatgcggcaaagtcatttacgatagtaaattcctgtcgctcttacccgcaaatgccttgtcttgcatccattctgacattccttattcaggggttgtgcctgaaattttcatttcgacacagccccgttttaatattacgggttgctattttttcaactgtccgcccagcatgatgccgggataattttgcatgacggaggcgatttgctgcattttctcgttcgcagcgtattccggagaggagtgccgcacggcttcgagcgcatcgcctgcatcgaactggagcgtcagcacctcgccgcgcagggagagatagccttgaaaggtggcttgtttcccgtcttggatcagcgtgatggcggctgttccggtggcgggatcgtagctatacgtcccgtcgatctcatgtccgcccatagaggcgtggagccggttgcgttttttgaaggaaacggtcccctgtcccggcacgaggcctgccttgacgtaatgggtcgccaactggtcttgcaatccggctacggcgatcgaggcgaacatatcgtcgcccttgtattcgatgctgggagcctggtaggtccagactccgaggagcgcttcttccgacggataggtcggcggtgtggcctcttcctgtttcgcggagtgactacctcctaaaagttgctggagtttttcattcatcgattgtcccgaaacagcgattgtcgcgcatacgacgaacagggcggacagacataatgtacgtttcatatccgaatggtttttatttttcctgaatcagaagatcgatttcccgcaaccacagggttgccgtagcgtccgaaggcatgcgccagtcgccgcgcggcgagagggagatgatgccaactttcggaccgtcgggcatggccgagcgtttgaactgctgcgagaagaatcgctggaagaatacccgcatccagcgcaggatcgtcgcccggtcgtagcgtccgtcgaacgctgtttccgcagcgaagaggatttttgccggggagtaaccgttctggatgaagtggtagaggaaaaagtcgtgcaactcgtaaggccctaccaacttctcggtgtgctgggcgattcctccctcttcgccggacggcagcagctcggggctgatcggcgtggcgaccacgtcgagcaggatctcgcggatcgcatcgtcctgacatacctgggccatccatcgtagaagcacctggatcagggttttgggcagcgaggcgttcagaccgtacatcgacatctggtcaccattgtaggtcgcccagcccagtgccagttcgctcaggtcgcccgtgccgaggaccatgccgtgctccatgttggcgatgtccatcaggatttgtgtccgctcccgggcctgggcgttttcgtaggcggaagattgttcttcggggttgagtccgatatcggcgaagtgttgttcgcaggctttgcggatggaaatttcgcgggaagtgatgcccaggcagcgcatcagggcgatcgagttgcggtaggtgcggttgctggtgccgaatccgggcattgtgacgccgatgatgcctttgcggtcgagcccgaggcgatcgaaagtccgcacggcgatcagtagggccagtgtggagtccaagccgccggaaaccccgatgacgacctttttgcaatcggtatgctgcaggcgctgggccagccccatcgtctgaatgttgatgatttcacgacccgattcgtccatctcttcgggcgtttgcggcacgaaaggatgggaattgaactcccggtcgagggtgacgttcgcggggttttccggcaggggaatttcgacgatgatgcgctcggcgggacggtgcggcgcgaaagtcgtggtacggcggcgcgagttgaggagcttttcggtgtctatgtccgcgacgatcaactgttcctcggtcgaaaaccgttcggtgcgccgcagcatccggccgctctcgacgatcaggccgttgccgccgaataccaggtcggtcgaagattctccgtagccggctgaacagtagatgtaggccgactgggtccgggccgattgcgatttgaccagcgtgagcaggtagttgtgcttgcccagcacttcgggcgatgccgagaggttgaaaagtatctgggcgccgtccactgcctgatgcagcgacggggcggccggaacccacatatcctcgcagatttccacgccgaacttcacgcctccgatgttgaaaagcatgttgcggccgaagtcggtatcctggccgcacatccggatcgtggccaggccgatctcttcgcccgacatgaagcagcgggcctcgtaaaattccgagtaattgggaatatatgtcttggggaccacgccgtgaatacgtccctgagcgaaaactaccgcgcagttgtagagggcattgccgtaagtgacgggcataccgacgatggcgacgatgggcagttcgcgggtctgggcgaggatatagcccaaggcctgttccgccgcatggagcaaggcgggttgctggatcagatcgccgcaggtataggaggtgatgcatagttctgggaagaggatgatgcttgctccccggtcggcgcccttgcggatcaattcggtgatatgttgggcgttatagtcgcaatcggcgatccgtacatggggaactgccgccgctactttcagaaaaccaaatctgttcatacgatttttgccggtttatttttttcgttttctgtcccgaagcgtatcgaacatcttcgtacggtccgggtatcggaaaaactctcggtttgtttttttgcgttttttcgctcggcatgatccgaacggattcggcttcgtgtccgcctgtcgaaaacgcttgttgtacaatatttttattttgtccagagctgggccaggttcaggatcacctgcatggctttgtgcatggtcgtcagcgagcagtactcgtaacggccgtggaaattcatgccgccggtgaagatgttggggcaggggagtcccatgaaggagagccgtgcaccgtccgtgccgcctcggatgggcttcacgagcggttcgacccccgccattttcattgcctcgatcgccttgtcgatcacctgcggatgcggttcgaccatcttgcgcatgttgtagtacgaatccttgagcgtgagggtcagtaccccttcgccgtatttgcgggcgagcagatcgacgcactcctgcatgtagttcttgcgggcttcgaaacgggcgctgtcgtggtcgcggacgatgtagctgatctgcgcctgatcgaccgtaccgttgagggcgatacagtggtagaagccgtcgtagccttcggtgtgttcgggtcgctcccaggccggcagcagggcgttcagctcgcatgctacctggatggcgttgatcatcttgtctttggcgtagcccgggtggacgttgcggccctgaatctcgatcttggcgctcgcggcgttgaagttctcgtattcgagttccccctcgaagccgccgtccatcgtgtaggcgaagtcggcgccgaaggccttgacgtcgaagaagtccacgccccggccgatctcttcgtcgggggtgaagccgatgcggatcttgccgtgccggagctccggatgtgcgagcagatattccgcagcggtcatgatctccgccacgcccgccttgtcgtcggcgcccagcagcgtcgtgccgtccgtgtggatcagcgtatgtcccttgaagaagctcagctccggaaagtccgcgactttcatcgtcacgccggcgttcagccggatgtccttgccgtcgtaattctctatgacgtgcggtttcacgtcggcgccgctcatatcgggtgcggtgtccacgtgggcgatgaatccgatgacgggggctttttcgcagccgggcgtcgcggggatcgtacccatggcgtagccgtacttgtccaccgtgacctcggtgaggcccagggccttcatctcttcggccagataatcgagcagcacccgctgtttcgcggtcgaggggaaagtttcgctcgactcgtcgctctgggtgtcgaacgaaacgtatttcagaaatctgtctttgagttccatagtatatatcgttgattttttattcttcctttttagcgcggagcgaatgtacggcgaaatagatgataagcgccagatacatgcctagacctacccacgaggctgcgttcgaactgttccactgcgtgagtttccagtccacgtcggcgaatttcaggatcgctcccactacgcccatcagggcgccgcctgcgatgaagcccgacgcgatgagcgtaccctggctcatacgtgccttgttgagcgcctgatctttcgatcgggtcgatacgaaccaggcgatcagaccgccgatcagcagcggaagattgagctgcaggggcaggaacatgcccagtgcgaatggaagggccggaataccgatgccggtgagtaccagcgcgaggactgcgccgcagaaatagagtacccagggagccgttccgccctgcatcaggggttggatcacggcggccatggcattggcctgcggagcttccagcgggctgccggggccgaagccgtaggttttgttcagaataatcatcacgcctgcgacggtagcggccgaaacgaagacgccgaggaatttccagctctcctgttttttcggcgtggtgccgatccagtagccgatcttcaggtcggtgatgaagccgccggcggtcgagagggccgtgcagaccacgccgccgatgatcagtgcggcggtcatgccggccgtaccgttcaggccgatgcttacgagtaccagcgacgcgaggatcagcgtcatgagggtcatacccgaaacggggttgctgccgacgatggcgatggcgttggctgcgaccgtcgtgaaaaggaacgagatgacgaagacgattagcagcgccacggccgtctgcccccagttgcccagaatgccgaactggaaaaagaagaaggtggtggcgagcgccgcgatcaacgtagtgagaatcgtgcgcatggtcaggtcgcgctgggtgcgcggtacgttcgtttcggcttttttcttgcccgaaaactcgctgacggcgagccccatcgcctgtttgatgatgccgctctgacggatgatgccgataagcccggccatggcgattccgccgatacccagcggacgaccgaaggtctggtacagctcttcgggggacatgcctgcgcccgtggcggtcgaaccgaccaccggaacgacgagcagccagatcaggaacgaaccggcggcgatgatggccgaatatttcagtccgatgatgtagcccaggccgagcaccgcagcgctcgtattgactttgagcagggttttgaacttatcggcgcagagggtgccccaagccgtcatgcgggtcgagatctcttccgtccagaggccgaaggtgctcgctgcgaagtcgtacagaccgcccaccagtccggctacggccagcagcttggcctgattgccgcctttttcgcccgatacgagcacttcggtcgtggccgtcgcctccgggaaagggtacttgccgtgcatctccttgacgaaatatttccggaaggggatgagcagcacgatgcccaggataccgcccagtaccgacgagaggaatactttgtagaatgcggtttccaaaccgaggatgtagagcgccggcagggtgaagatcgctccggcgacgatgatgcccgacgaggcgccgatcgactgtatgatgacgttctgtcccagcatgttttttttgcccagcatgttgccgacgcctacggcgataatggcgatcggtatggctgcttcgaacacctggccgatgcgcaggcccagataggctgcggcggcggagaagagaacggccatcagcaggcccatcgtaaccgaatagggagtgacctccttcggcttggcgtcggccggcatcatcgggacgtactcttcgcccggtttgagttcacggtacgcgttgtcgggcagagattgagagggtttggtttgttccattgcgtatgtaggttttcgttaaaattccgaggcaacttacaaaagtaggtttttctttcagaaaatcaaacgcaatggctcctaaaaatgcggcaattcgtattgccggggcatttttcggtcccggtcgtcgaaaagatgattatcccccgggcggcatgcgatgtcgcggaatccccgggtcggggccgacgtttcgccgcgccgacagaaggtcatatccggcggatgaaatccgccatgaccgtcactaacttttcggaaacaggcgcggcagcatccatataaatagtcgttttttgccgttgaggatcggtcacttcgctctgtttcagcaggtgggtcatcccttcgatgatgactttgtcggcgtcgggccgggcttgggccagagcttcggcattgtcggcggatatttggatgtcgttgtcgccattgactatcaggaccggctgttttacctgccggatcacttcgcgcggatcgtattgcatccacgagatcaggtaaggctgtacggaaggtcggaagataccttgtaaaatcgcgggaatatcttcggtcgttttcccttgtttgagccgggagaggatggattgtacgttgaggatgagtccgggattgtaggagatcagttcgcgggtgagctggaattgcaggatttcgtcgatcgggtagccggctcccgccagcgagatgacggccgcgacgtcgggcgattcggtcgctgcgaccaatgcgacgagcgaaccttcgctgtgcccggcaaggatgatttttcggaagccgcgctccttgaggtaatccgtcagggcttcggcgtcggcgatgtagtcggccaggcgcagccggtcttcctgtttgtaaagttccggatcccggtaacggctgcctccgatgccctgtttgtcgtagcggagcgaggcgattccctctttttcgagcgcacgggcgagcatgtagtaggtattggtcatcaggcccgaaccgctgttgccgttgcggtcggtcgatcccgaaccggcgatgatcagcaccgctgcgtcgcttccttcgtcgggtacggtcagcgttccggagagtttgccccaggaacgggaaaccgagatttcctcctctttggactgggagggaagcgccgcaagcaacagcagtccggcgatgaggtatctgaatgttttcatggtcgctgtgtttgtcaatcgaatcgttataggagatcggcgagcctctccagtccgatgctgtgcgatcctttgaccaggatcagggcctgcgatacgggatgtttccggagctctgcggccagtacttcctgcgacgggtagagagtcgtgtcggcgggtcgggattccagactgcggtaagccttcgcgaaatgcggtccgaccagcaagatacgggcatcgggaatttcggcggcgagggagatgatatggcggtgttccgcatccgaccagtcgcccagttccagcatatcgccgaggatcagtatcttccgggtgcagccttcgagcggttcctgccggaagttgacgagcgatgcctgcatgctcgaggggttggcgttgtaacagtcgagaatcagggtattctgcccggtgcgtattttttgcgagcggtggttgtcgggccgataggagcctacggcatagcggatgcgttcgtcgtccacgccgaaataacgtccgacggcgaccgctgcggcgacgttgaagcggttgtagtccccttcgaggtggtgctccacgccgtcggccagcgtggtcgggtaacactccgcagccagcgtttcgtgttcggccgccatggacatcaggaccgggtcgttggcaggaacgaaaacgcgccctccggtccgggcgagccagtcgtacagctcgcctttcccgcgccggacaccctccgggccgccgaaaccttccaggtgggctcgtccgatgttggtgacgatgccgtagttgggttccgcgattgagcagagcagggcgatctccccgcacgcgctcgcacccatctccacgatgccgaactccacgtcgcgggtcatcgccaacagggtcagcggtacgccgatgtggttgttcaggttgccccgggtggcatagacttcgtacttctcggccagtacgcggctgaccagctccttcgtggtggttttgccgttgctgcccgtgatggcgaggatcggcagccccaactcccggcggtgttcccgggcgagggcttgcaaggtttgcagcgcgtcgtccacgacgatcagacggtctgccttgtcggggcgggtgttcgggagcgagggatcgtccacgacggcgtatgccgcccccttttcgagggcgtcggctgcgaagcggttgccgtcgaacgacgccccccggagcgcgaagaatacggagtcgggctcgatgcggcgggagtccgtcgaaatgcgcgggtggcgcagatacagttcatacagggatgacatcggggaaatcgaatatttggtcatgttttccttgtccaaaagaagagcggaacgcttgccgatggaaagcccggcgaggggcatttgccttttcggaaatcccggcggctccggaatcccgcgtcggagcggaagtgctgtggctcttaaatatgtttgtcgccttcgttgtatttcacttcgtcgatgaacttcttgatattctgttcctcgctgcgcggacagatcagcagcacgtcctccgtatccaccacgatgtactccttcaggccgttgatgacggctactttgccttccgggagggagacgatgcagctgcgggtgttttcgtccgtatagcatcccttctcgggtttggcgttggcgtaacggtccttgcgggcgtgctggtagagcgagccccaggtacccacgtcgctccagccgaactctccgcggcgtacatagacgttgttcgccttctccatcacgccgtagtcgatcgagatggagcggcattcggagaatacccgggcgatggcttccgcttcttccgaagtgcccaataccggctggatgtccgagaagagggcgtggtgctcgggcaggtaggtgcgcaccgcttcgatgatgtcgccgactttccagacgaagatgccggagttccagagaaattcgccgcattgcaggaacgtctgcgccagctccaggttgggtttttcggtgaaacacttgaccttgctgatggtccggtcgtccgatacctggatatagccgtagcccgtttccggacgggtgggcttgatgccgacggtcatcagagccgcccggtcgtcgatgaagtcgaggcattcgccgatgatggcgcggaaatcctcctcgttgaggatcaggtgatccgccggggtgacgatcatcttcgctcccggatcgcgcttctgcagtccgtaggctgcataacagatgcagggagccgtgttgcgtccgacgggttcgcagagtacctgttccggcccgagttccgggatttgttccagcacgaggtctttgtagcgggcgttggtcacgaccaggaaattttcagccggagccagtttttcgaaacgctcgtacgtcatgcgtataaacgacttgccggtgccgaggatatcgaggaattgcttgggcttggattggcggcttttgggccagaagcggctgccgatgccgccggccatgatgacgcaataggtatgtttgtccatgatgagttgtcgctgcggtttgtttttgaatgatttcagaatttacggccggcatcgccggatcgatccattagacaaagatagctaaaattattctcggatgaaaattaaatattgttcggtatgtttttgaaatgcggatatttgtcggccagggaaattttacggatgatacggacgaatcgtacaacgaactatccggcacttgggaaaaagtgccggatagtggacgtggagtcgagagatgcggtttaccgcagtacgacggtgatcgacatcggaccgtgcgccccgaagaccagggcctgttcgatatctgcggttttcgacggtccggacatgaagcatccgtattcgaagtcgtccaattccggtcgggcgagagcctcgtgcatcgtatcgaccagcgcatcgcgcgggatgaggatcatcagggccgtggcaccgaaatagagggctttgtggcggatatcctgccggatccataccgcgccgttttccgccacgccgaaacaaccgtcgattacgcccaggtcgatatcgatcagcttccgggcgtcgtccaccgtgtcggggttgatagtggcgtgtgcttcgggcaggacggaggcgatggttttggcgtcgggatagtatcggcggatcaactctgtaagggggttcccgtctgccgcgacgacctgcccgccggccgctttcacggcttcggcgaaggcggccgtgcgatcttcgaaccgcagcggagtgaagtcgaaagcggggtaatcgaccggaggcatggcggctccggcgatgcggttcagtattatttctttgctgttcatcgttcggtcggtttttcggatttgactttgcccgctttccaccgggcgttgaaggtgcttcgggcgaagtggggtatgtcgcgcccgtaagcataccaggggttcaacttgttgttgagtacgaagcggggcaggtattccgcgatgcgggccgctccgacagccgcgtaaaaacggcccggaccgcccatggcgaagtccatacctttgaccatgaactttttgtgccagtcgatcaggttcttttcgcccatctcctgccgccacgcgtagatctgttctccgaggtcgatcttggccgggcatacgtccgagcaggagtaacagagcgagcagcccgaaacattgccgccgtaccgttcgggcgaacggagcatacccaggttgatacccagcggtcccgggatgaaatacgagtaggagtaaccgcccgatcgccggtaaacgggacaggtgttcatgcaggcgccgcagcgcaggcatttgagcatgttgcggtgcgccgcgttagccagggattccgtacggccgttatcgacgatgatgacgtggatctgtttgcccggtgcgggacgtcggtagagcgaggtgtaggccgttacgggctgtccggtggccgagcgggccagcaggcgggtgaagacggcgagcgcccggtagtcggggatcaccttttcgagccccatgatggcgatgtgcaggtcggggaacgaagtgccgaggtccgcgttgccctcgttggtgcagacggcgaacgccccggcttccgccacggcgaaattgacgcccgtcatggcgatgtcggcgccgaggaacttggagcgcaggtgaatccgggcctggtgcgtgagataggtcgggtcgctgttgccgggttcggtatgccacactttttcgaagagggcgccgacctcttcgcggcggacggcgatcgcgggcagcacgatgtggctgggcggctcgtgcagcatctgcatgatgcgctctcccaggtcgctttcgacggcatcgacgccgcgctggagcagatagggcgtcagtccgcactcctccgacagcatcgacttgctcttgatgagattcttgccgccgtgagccgagacgagctcccagaccgtgcggttcatttcgtcggcatccgcagcccagtggacgacgatgccgttggcggtggcgttgcgttcgaactcttcgaggtaatgggccaggtggctcagtgtgtggcgtttgatctgtgacgaagcttcccgcaacgcctcccattcgggaacttcgtgcatcattctgtcgcgcttggcgcgtacggcgaacagggctttgtcgtgccaggcggtgcgcggtgcgtcggcgatgaatttcgccgcggctttggaatggctgctcatagtgtcgaggtgaggatttgtacgatgtgcagggtgcggatcgggagtttgtcgtggtcgatgatgccctgcatgtgcatcaggcacgaactgtcggcgccggtgatgtattcggcacccgtggagaggtggtcgcgtactttgtcgcgtcccatgcaggtcgaaacggcgttctcctcgacggaaaacataccgccgaagccgcagcactcgtcgatgcgcgagggttcggcgatttcgatgccttcgaccatcgtgagtaggtcgcgcagtttcgaatgatagggcaggtttagctcgctcggcgaaccgagcccgagcttgcgtaatccgtggcaggagttgtggatgctcaccttgtgcggaaaacgggccgggagcgaggtcggttttacgacgtcgtgtacgaattcgcagatctcccagatgcgggaatcgatgcaggcgtgttcgcggtagtcgttcagcaggcgggggtatccctccttgacgaagaccacgcaactggccgaaggccccaccacgtagtcgtatttggcgaacagcgcttccatccgctcggccagggccttggcgtcgcgctcgtagcctgcgttggccatcggctggccgcaacaggtctgatcgaggggataatccacctctacgcccaactgtgtgagtagcttgtaagaggcttcgcccacctcgggatagagcgcgttgatgtaacagggaatgaaaagtccaactttcatcggtcgtgtgtgtttagaagctgtttgccgaaaaagcaacaaacaggattccaaagttaacttttttctgaaaaatatggatgttgagggtgaaaatagcttccggcaattttttcgatgtgcattttacgacggtcgtgtgcgtgtaaccgatagatttttcctatatttgcctactaataggtggactaattcttttacaaatgcggatacgacttttcacgataccgaatttattgaccctcatgaatctgctctgcgggtcgtttgccgtcgtggcagcactgatgtacaatgatttgacacttgctttctggctgatagtcgcaggaatcgtgttcgattttttcgatggtttcgtggcccgtctgttgcattcgtcttcggcgatcggggtgcagctcgattcgttggcggatgtcattacctcgggactggctcctgccgcagtgctctggcaggtttgcctgcaaaccgaaccttgctgtctgccggcggcctgggagctggggtatggcgtgttcgtcctgacggcgttttccgcgctgcgtctggccaagttcaacatcgacgaaacgcagacggtcgaattctgcggacttccgacgcctgccggatcgcttctctgcgcttcgctcggcatgttgtggcagcaaggggcggtcgctctttcttcggacggggtgttgctgatcgccgtactgacctccctgctcctcgtttctccgatccgtatgttcgctctcaagttccacggcttcggctggcgtggaaacgaggtgaggtacctctttctgctggcgagtatcgtgttgataattatacttcgtacatacgctatcccggtaattatcgttctatatatcgtcgtgtcggcggttcgctggctctgcatgcgctcgggaaatcccgataaagcaccgaaagcctgattttttactatctttgccgcgatttgcgcgtacgtattccgatgtttccgaaggtgttgaaaaaaattctgtggattttgctgtggggagggctgctggcctttccgacgttggaggcatccgctcaattcgacgccagcgcgatcctgcgaaatcagaacaatcagaatccgaacgacccgaataatccgaacaatatgctcggcagcaacccgttccagacgcagaacggcgaggaacaacccgccatgccgaccgattcgaccaagaaaaagcggattcgaaagcctctcgaatcctattttttcaacgattcgatccgtgcgctgcccaacttttcgtggacgatctcgcgggactacaaccaggtgcatatcaatccgctcgataccacgctcgccactttccgcatcgactacccgttttataaggaaggcgtcggccatgctgccgtgggtgcgttgggacaggcttcgttaccgtacaactacttcgaacggcctcaataccgcaacttctcttttgccgaagggttcgatgtctatacctatcgcatggaaaacgtccccttctacaacctcaaacggccgtatttccacttcatgtaccttgagtcgggacagaagaagttccgggaggagaatttcagcctgacgctggggcataatatttcgccgactacgggcttcaacgtcaattatcggtcgcgcggcaccaagggcctttacgagtggtcccgtaccaagaaccacaacctttcggttgccgtttcgcacacgggaaagcgttattcggtgcatgccggattcatcaacaaccacatagaaacacgtgagaacggcggcgtggtgggtgaatgggcgatccgggatacgactttcgaaatgccgtcgggcgtgccgatgagactgacgagctcgcaggctaccaacatataccgcaacaatgcgtttttcgtcgaacagtcgtacggtattccgttgctgccggttaccgaaagcgacttttcgatcgccaatctgccggccgtattcatcggtcattcgttcgagtacaactcctggagcaaggtttataaggatgttcggggaacctataccgacgaccgttacgaacgggatgataaaggtaatttcgttccggcacgcgatctcgaatattacaagaactggtttatcaatcccacgcagacgcgcgactcgatctatgagcgggtgatttccaaccgggtgttcattcaggcgcagccctgggatcgcaacggtgtggtcggtacggtgaacggaggtgtaggactcgacctgcacacctattcgcagttcaggctggattcctacctgaacggtaagtacgagaaggtggggaaaagcagttacttcgtatatggatcggtcgaaggaaagatcaagaaatatgtcgattggggagctgacgccaagttctacccgtcgggatatcgcggcggtgacgtttcgttcggcgccaatctggcgctgacgggatatatccgcaaacgtcccctgattctcgaagggcgtttccgtatggaaacgcgttcgccggattactggcaggagaatctattctctaaccactacgtgtggttgactcctttgcgcaaggagaatgaaactcgtttcgaagttgctttccgtgtccccgattatgcgtttgaggtcggtgtgtggcaaggcattgtcaccgataagatttattacggtgccgacagccagatagcgcaggacaacggaagcgtcagcgtgacgagcgtgtacgcccgcaaagatttccggatcgccggacttcatttggaccataaggttttgttgcagtggagtacgaatcatagtgtcatacccgttccgctcgtcagcgccttcctctcgtattattacgagttttgggcggtgcgcgacgtgctccgggtgcagttcggtgtcgatggccatttcaatacgcgctactatgcgcccggctacaatcctgcgctctcggagttcttcaatcagcgggaaatcgaggtggggaattacccctacctggatcttttcctgatgggcaagtggaagagaatgcggatattcctgaaatatcagcatatcaaccggggcttgttcggaaacggcgaatatttcgcgattgcgaagtacccgctcaatccgggcatgtttaagatgggtatctcgtggggtttctatgattagcgtactgtacggcacaggaagctgcctgcaaaagcaagttttatgttaaagaaaacctgtttaattttcgtatttttaacattacagaccactttttacggattcaacgccgatttttcgacgtcgtccgaagcggggattaccctggaggagaaaatggaagcccggtatgtgatctctccctacgatcacgtaattcggaatatcagcgagcgggaggggaacgactggcgcctgatgagtgctattgcctatcacgagtcgcgtttcaaagccgatatagtttcccgccgtggagcgagggggctgatgcagatcatgcctgcagtggcccggcagttcgacgtagcctcggaagaagccttgctcgatccggaaaccaatgtattgctggccaataaagtgtggaatcggatcgattcgacgctcgacctgccggcgggaatttccgagaaagaccgaatgagcctgatcctggcctgctacaacggtggaatcggtcatgtcaatgatgcccggcggctggcccgtgtgaacggcgaagaccccaattcctgggaggtggtgctccgctacctggaactcaagtccgatcccgcctattaccagcacgaggtcgtgaagtgcggcaaatttaccggctaccgtcagacgcgggctttcgtgcaggacgtaatgaatcgttataataagtattgccggatcgcgcagctctgatccggagggcgccgagagggtaagtccgataacagaacaaaaaagcagggagtgattccctgcttttttgttggaaagcgctgcggattcagcgtttggttttcgtcgttcgtatccgatcggagggatagtctgacggcgaatatacctattcaccggttttgtccagccggtcgtaaatcagttcgaggtcatcgacgacgagcacgctcgaggtgcttccgatgaaatagtcgccccaacgggaagccgagcagacgacgacgatatgggtcggtttgcggtctgtcgccacgtacttcagcggtatggtaaactcctgccattcggagtagctggcggtgagcggcagttgtccgtagccgattacggccggactcgtcggatcgaagaacgaactggggttgcgggtgtcgatcgcaatcgggttttcggccgatccgaactgttctccctgcgagatgccgtactcttccggggtccaggtgccgacggcgatgtagatcatgccgttgtcgggatcgccgaccttgaggttcatccccggcggctgggtgctgcccacgttggtcagcattccctggttgtatttgaaccagccgtgcagagccgtcggacgggcttcgaaaggttgtccgaagcagacgataccgtgcgtgagatttcggattccgtagaatatgcctgtaaagagattgccggcggccaatttgtaaacgccgaccagacctgcgagcttcgacgaaagctgtgcggcatagatgcccgatgtgccgggacgcacgtccgtcgtcttgtcggtcggagtagcgttgccgatgctggcgcctttgttgcctgaattccagaagtgaatgccgtcggccaggtagggatagacgactttgtcgatcgtttcccactcttcgaaacctccgttcgggagttgtggtgctgcttcggtcgtgacgcttgctacttccgtttcgttgctgccggagtaggcgactacttcgtattgggtttccggggtaagtcccgtgatacaggtgtcgaatgcaccgcccgagatgttgatttgctccttatcgacttcggtccacgcctcgtcgccggtcttgcgataacggaatcccagttcgtccgcgctgttgccttcggcataggcccagatgaccccgctccaggcatcgacctgcgtgaagcgtaccttggtatcggtagcttcgacgtaaagcgaccatttctcttcgaagtcgtggtaagcgacgtaaacgtagcggaccgattcgaacgaagtcagctcgtcgatcggaggtgtcatcgtggtgatgtctgccggaccgagtttcagccgcgtgaccttgagatcgctcaaatcggtcccttccggaacgtatgctttcgccgtaagttgatcgacgtcgatttccgcagcgccgatctgcgattccacttcgaaataacgttcgatctgctggtccgctacgatcgtccattcgtaatcctgataaaacgaaagggtgaggtagagcggagtccgcaggtcgaatgtccccgaaaggggtttcgaagaccgggcattttcagtgaccgatattttgtctatcttcacgttggatatgtcggtttgttcgtccagatggagcgtgacgatccgctcctgggtgttgatatcttcgggcgaacaggtgaagccttcgccttcgacaccgaggatttgcagcgtgacgaccggatatggaattgagttctcgatgcaggaggtcagcagcaggagtgtgccgataaggatatgccggaaatgtttcatcatgctttgttggctttcttgttccatagatgaacggtaacgccgatgcggatattgagcaggttgaggcggaaccgcattttcgaagctgttcgttggccgatttcgttgccgttggcatctttctgcttgatcttggtgtattcgatacctcccagcccgaaggaaacggtgctgcacacgttcgggaagatgtaaaccgccagacccggattgaacccgagcgacagtttcaggtcgtcgctgaacgtgcttctgagggtgccttcggtttcgtaggtaaactccgaattaccggtcttcatcgaaagatctacttcaccgaaaagcccgaagtgtcctttgctgtccaatcccgcataggagcggaaatagaggccgaccgacagtgcactgctttgcaggtggaggtttttgaaggccagattgacgtcgttttgctctcccagattgaaattgcccgtgtccagcgttccgttgatgttggtgtatccgaaacggacgccggccgacatgttgtccttgaagaagtagcctacagaggggttgatggtgaagatactgccgttcagattcaggttgtccaggatcagcaggtagtccgtgtcgtcgcttgagagggtgccgtaagatacggtgaggcccagggcgatttcacctgcataggcgaatttgattttgttgatttcacggtcgattctccgtttcatcggcaggaatcgttgtttccgacgtaccggggaaaccgaggtcggcatcgatgcggacgagtcgctcagatcggcgtagaacgtcggggccggaagttcctcgatgacagggacggtcgtcggaaccggagtggcgtagaggctgtcctgcaagcgggaagacggaattgcctccagggatgtcggttcctgggctcggagcatggaaaccgttgcgacggctatcagtatggtaaaaatcagtcgtttcatcgtatttccgcgttatagatagaaagatactcccagtccgatcgacaggatattgactttgaagttcatcaggctcgaagttcgctttcctacggttacctggttgtgtacctggcgtgtccgggtataggaaagacccattacaccgacattcacttcgaaagccaggttgttggtggcgaaagcgaccagtccgggcgatacgcctatcgaaccggagaaactggtttcataagtgcctcggatcggggagtccgctgcgaatcgggactgtccgccgcccagtgtcaggctcatttcgttgaacaaggcgaaacgcttgttctgtcccagaggaatgtactgacgccagatgaaagctccggaatagttgtgttgcagggtgttgtagaaatcgacgccgaggtcgatatcactgcccagtttgatgctgccgctatctatgcggagcaatgagcgggaatagatgaatttgacgccgatagccatgttgtcccggatcgcgtaggcgatcaggggggtgactttgaaggtgtagccgtctgagttgatatcttcgattaccagaaacgtgtaatctttgttcgtgtgggtagagtaggaggcggaggctccgaaaatccattgtccccgggggacgaactggttggacatggaagtcaggccccgttctgcgcgaggatcggccttacgctccggggcggattccatcggagcaggcgattgtgcatcggtccgaagcggatgttcgggccgagggctttcggagcccgtgttcacggtttccgaagaatcgggttgcggtattgccgaatcaatcgcaggtcccggagcggcctgcgattgattgcttgcaaaacatagacacagtgacagtgtcagtgtcaggatggcgacggttcctcgcatgaaaatcaatatacaaattcgatgtcgtcgatatacattctgctctccttgttcccttccatgtagtcaccgcagtagctcgccgaggctgttaccatcaggtaattgggcttttcatcactgcggtatttgatgggaattacgatctttttccaatcgctttgggaggtatcgttgagccagtccccgtggccgtagatggggccttcgggcaggctttcctgggaaggatcgaagaaggtgctctggtcgttcgtgtcgatcttgtggtaggagctccatttgcccatgcagacgaagaagcgggccttgtcgccggacccgaccgtccctttgtaccagaatgtgatcgctttgggacgggcgttgaaggtgaacggacgacccatatacacatcgcctttggtgatgttgtgaacaccgccgaaggctccgatgaagaggttgccggcagcgattacgccgaaagcgctctgggtcttgagcagggcggacttgctcccggtcgatcccggacggggatcgtctgcgggttcggtcaccacgataccggcggcattggcaccggggttacccgtaccccagaatccggtatagcctgtacccatgccgttcgagccgatttcgtccgccgagcaggggtaccaggttttgctgttcgtccaggtttcgaatcccgcattgggaagctgaatgcccgttgcggccgagaaattgtgtatctcgcccgtttccgcatcgttgatgagcaactggtattcgtaatcgcggtctgcggcgaagtcgatggcttgtgccgtataggtatagtcggcacccgcaacggcggttacggtcttccactcaccgaaggcaggcgactccgccaggcgttcgcgttcgcggtaacgtactttgacgttggtgagcgccggatcggtgacgattacctgaaaatcggccgtattgagccagaggtcgtacaccgccaggtcggtgagtccgggtgttgcgatgcgggctttgcccgtaccttcggcttgtgcgacgtcggtcatcgtaaattctacttcgtgaatgccgccggcgaacgtggagaagaaggttccgccgagggagagtttgccgctgttgtcgtcggtcttggtgtagctgatgcctttggctgcggcttccggaagcagcgcgccgtcgctcaacacctggatcgtttcgtcgttggccttgatggagatgcccgaaagcgcctgtaccgaggatactgcgaacgaaatgtcgtccgtgttgaatccgattaccgagttgatgtcgaatccgtcgcccttgatcgtcggctgcgggctgaagatgaagggatcttcgtggatctctccgtcctgatcgacctgtacggtgatgcccaggtaaccgttcggagtcttcgaatacttgaatgtcagcgtataaagattgccgctttcgggtgtcggaatgactccggttttagaaacgctacccaactccgtgctcgagctgtaaaagccccaactcaggttgtgaacatcttcgggcagcaggtaataacccgttgcgttctcggtgtatttgagcgtcggtaccgagccgttttcagcttccgttttggagaaggtgtcgatggcgctgacgtaagccttgaatcccggatccattttgtccagaatcgtctgatcgaagacgactttgacgccgatgttggtggttgggcagactacctctttgaggacggtctgttggggttcgatatcgacgtccaattcgccgtaataactcttgttggtgaaggtcgcctggctctggtcccctgcttccactttgatacggtaggaccctgccaccaggtagaaatcacccggagcttccgtagccggctggtatttgcggatcagcttctcttctccgttttcgatcttatagacgcgcatgatactccgatccagagcgttgtatgcgtcggcacgcgagccgccgatattgacgctcaggcgcagggttcccatctcttccgaggcgttgccgtcgatgtcgctctgcgagcaggctgcggtcaggaaggccacgcctgcaagcagcgaaatatatttaagaatctttttcatcactgtttcggtttactgttggggaacatagagcatgatggacttgatgttctgtcccgaagcatccgttgcggtcaatttgaagtccgtgttgcccggagctacggcatagagcatcgtcataaactgagaaatgtcgaattgcagggttttctgtccgacgatttcgtctttggtcttaaaccctaacgagtggagtccttcgtccattttgtcggaagccggattgaccagatccatatgcgcttccaagccgataccgaggctttcgaggacttcggcggtgagggcatcgctgatgatatcgaccgtcaggccggttattccgctctcggaggcgaggttgatgaagacgttcataccctcctccgtgagcgtgtggcgggagtcgatatcgacaatatccgtaccttccggattggtgctccagaagatgttcggtccctctgcggtgccgctgtcgtgggtgaccttgatggtcattgtcgtgtaggagcgacggccttcggagtcgatggcgatgaacttcgcggtatgggtgcccgtgtggtcgtacaatcctttcataccgttgtaattgaccttgacgagcagatcggagccgctttgcttgactacgcagtagtcgccggccggattttcgcccggccagagggctaccgtgttgttgctgtagccggccgttgcgagagcttccaggaactgggcgttgtccgaatcgaagacaacctccagcgaggcaacggtcgaaccctggtaaggagttacgacggccgtaatcatcggggagcagctctgaacgtcgaagtcgaacatgctggtcgtgatggggtagggctgggcgatatccccgttttcgagggttactgccggagagttctcgtccgaaatttcttcgtcgggaatctcctcttcgccgtaagaatagaacgaagacatgacatccacgtcgattttctcgtcgtaaacccatgtttcgaccgtaacctggaattggacgttgccgtcgctggcatgcaggatcttgatgttgatcttgcgccattgtccggctttgacgttctgtatctcctggctccaattgaccggcacgtaggaggccggctctccctcgccggctttgttgtattggccggaaaggacgattttcagggtgttgtccgtatcgactgcgcggaagaaaccgggtttgagcgtttcgcccgtggcttcggggcgtccgtaaaccagggaattgtcctggatcgaaagggtgacggtgagtttgtctgtttcgtcgtccggcttgaacaggctgtccaaatcggcggaaagtccgaccgtcgccttgatatttcccaatttgcagaccaggttattgaccgtggtcgtgagctttttgattacgttgaccgaaatttcgccgtaatagacgggcgtttcccacgccacgtcgggtgtgctggcgtaattgggcgattccgccgtgacggtatagctgtcctgcggtaattcgatattgcccgtggtctttatttcggcataggtgtagctgccgacctgttcttttttcgaattgtaaatctttacgatataatcgtccggtgcgtccaccgtgctgcgcgtcgaagaggtgccgggagcgttgtccgtcggcaaaatttccatgtcgtccgctacggtcaggtcccagttctcaaagctcaggatacccgtttccgaaccgggtccttccggttgtccgcccgtcgggagatcgtcttttccgcatcccaccgccatgaaaagacagcagagcggcaagagcaaatatttggtaaaagtcttcataggatctgtttttagcttattttatacggggttatgcttcggggttgagttcgatttcctgcgggggtacttcggtcagcgtatcgtccagtcggatgctgatgctgccctgtcccgcctgcgaagcgtcgatccggattttgtgccaggtgcgggccgtcgtgacaccgatctgctgctgcgggaattccactttcacgccgttctgcgccttcaccgccgtacctttgagcagaagtttgcttcccggcttgacgaagatcggagtgtcgggcgacgaggagtgggtgaaactgaaattgttgcccgcttcggtctggacggtgaattgcgcttcggaatagtatttcttgaaccactcgccgcattcgaggctgattaccgagttcgtgagcgaggcggtaatggtcttttgaatcgtcttgcgggcgagtatcgtaaagtcgagcgctccctggtagcagaaagccgtgctgccctcctgctgcggatcgccgtagctgatcgtcgccgtatagtcgccgctgggcatgaagggggccgtatattcgctgagcgtggtgtattcggcgaggtattccgctgtcgctgtgccttctttgccttttacgaccagcttgaagctgttgccggacggcttgcagttgtccggcagggacgtttgcgcccgggtcgtctgcgaatcgacctcggagcaggtcgtggtccggaattcgaccgagccctccccgtctgtcgtttcggggatttcctctttcgagcagcccccccccaacagtgcaagggtcgttagaatcaacaggtattttttcatagggttattgatttggaggtttattttacgatggttacgcggatgttgtcgaggtacatataccaagttctcgatacccatccgttgccggtgaagttgtatgttctctgagtcagccacgacaggcgcgttgcattcgttgctgcgggaacttcgcaggtgcatactccctgaatatttccgaacgatatgccgctcaatgtattgaggttgtcgatctgttctttcagcgtgttttcgaggccgtcgttaccttttttaggggccgtatccgtgagggttccgaaactgcaatagagatagtcgttgtccttgttggcattgaaggtcactttcagctttacggtttttccgggtttgatataggcgagcggcggagtgtcgagccgtcccggatactgggctacggtttcgtgccggacggaaatacgcatcgccttttgcgaaacctgaagacgggttcccgtccaaccctcgtcaaagccgtactgcgacagagagattccgtccggattggatgtcgtagcttctgttttgtattcgaaatcggttttatcgtcgaaatcttccgaaaggaggtacgggattttgagtgcgatcggcagatgttcgccgggagtgaacgaagcgacgcttacattttgcggcacgagggcattttcggtttcgaagctaacctgcaacggttgttgagccagcagatcgccgtaaaggtcgccgtagaaagccaccgtgtatttgttggattcgtcaatggggaaggtctgctcggttgtcccgtcgcggaaagtcattccttcgggagctttgacgatcaggttgtaaggctcttcacccagattcgaggagtcgcccgtgaccgagaaatcgacataacttaccggcaactcggtcgggatcgtcaaggtaatgggggtgatgtgtcctgccgccatttcgcggtcgatcgggacggagagcgtgtgggagcggtacccgtttgccgtgtaggccgtaaaagagatgtcgccgctcatcgtcgtgggattgatgaaggcccaggcatagttttcggcttcgtccgtcagcggagtggccagatcgagcgtgatgctcttcgagccttcggccagggacattggggccgaaggatcggctgcgtcgaacgaaacggttccgacgacttctgtcggaaaatcgatgaccagtcgtgtgatcggttcgccccagatgttgcgaccggcagggacttcgattcgcagtgcgtggcatttgtgacggaagcgcagcgcgtgcgacggcggagtttcgagcatttggtcggactgttcgaacaggggaagcgcgttggcggtcagcggatcggcggccagaatatcccatttcccttcgtaacggcccgtctgttctgccgggatccggtaagatacctgcgtgccgctgacgctttcgggcaccgggctgacggccgtgtaggtataggttcctgccggcatatcggcgaccgtcgagctgaagacggcggtcgaatagctgggggtgaagtaggccagcgagaaatgctgggcgttgagcgtatagttgctgccgtcggcggtcgcccaaagggcgatcttgtcgtttttgtcccagcgggtcgaagcccagtcgttgtcgtcgatccaggttcgggtaccgtcgggcagactgtaaacctgcggttctttcgtgttgtcgcacaaaatggcgacttcgactccgccggacggagaagtcggctgctcgatttcctcgttgcgggagcaggcgccgatcagaagcagcgccagtacagggagaaggatccgatgttttttcgccataagacagttagtgaatgatattcacaattttcacaaaaataaacgggttttttctataatggaaataaattcaacgaaacgggtaaagttcatcacgaatccccggttttacgggcgttttgtttgagataacagcgtggaattaacgtcaaatacctccttattccaaggaggtatttgacggaatatcgctggaatggagttaatatacccattcgaagtcatcgacatagaggcaggctttcgagtagcccgtcatgtagtcgccgtaggcattcgcggcgcatgagatcacgatcgtgtagttccctgtgggagacggagctttctcttcgtaccaatggattttgagtgcgtcttcggaagaaaccaaggcatcgccgggggtgctttgatcgatccacatcgagccgtagccgacgactttacctgcttccgatacgacgtccgctccgttggccggatcccaggctcccgtggtcgagccggttcccgaaacgaccgtgtggggctgggaccagtccacgatcgccacgaagatacggcatttgtcgggatcgccctttgccacaccgggggccggattttgcgatcgcacgatgtcgatgtcgccggtcgtggcgtgatattttacgcgcaaagccttgggacgtgccgtgtaggtgtatttgctgccgaatttcaccgtaccggtcatgctggcatagttgaaactcccggtaaagagattgcctgcagccaggacgaacatatttttgctctgcagtttcgctgcgggtaccgctgcgccgaatttatccgtggtagaagaacacaaatctgtcgtgatgccgttattgccgcagtcccagaaagaatctccggttttattggggtagggaacgtctttgcttccggacagacctgcccgggaaacagtactccattccgacatgtccgcgttgggaattacatcgcctttggccgttgtgaaacgtccggtttccttttctgtaccgtccagcttcaagcggtaatcgtaggtcgtacctgcgaaaacgccggtggcatagtccggttcgtaaacggttttacccatttcgttggtcgatgaactccaggtcggctcgatcgcggccgtgaaagtgccgtcgccgttgtcggaaacggtcgcctgctgccaggcgtcgtcggtgctgcgcttgtattcgagcgtcgcgctcgcggccgttgcggaggggacgattttcagcgttgcggtattttgccacaggtcggcggtttcgagcgttacctggccgtaatggaaggtcaggtcctgtacggtcgtttggccggccaggtcggtaacggacaccttgaatacgtggttgccgattgcgtcggggagcatcgcaatcatcgggacgagcttggtgatgtcgaatacggtcgatttcgtatattggatctccgtgccgcatttcagacccaagtctttgtattggatgcttcctgcgatcgaagtttcgtgtaccagatcgaggttttgtatccccagcgagttcagggcgtcggaaacgatttcgactttcagttcggcgataccgcccggtaccgtgatgtcgatggctgcggggtaggtgagcgactggtccggccctaccgtgatttcatgcgtggcgtcgatgtcctggtcgggccagtcgagcgacggggcaggaatggcggaaggggtcagcgtgccgacctctttcttgtagaggacacccgcctcgaacggcttgtcggtacggtcgatctttacggaggccatctgtttggtggcggtgatgatgtccagattcaggttgtaattgcccggcaggacattgaagaaggcgtccagttgagctgcggccgatgcagacccgccgtcgaagtttatcaaaatcgacttcgaccgttcttccgtgtcgagtgcgggtgcggcggcctctccttgtgccaggtcgaaattcagggatttggccgacaggaaatcgtcgctttccgccgtcagcagcacgcagcgaatcgggtcggaggtcgaattggtcaggtcgaaatccaggatcgacgtcagccgctgcatattgaagcggatcctttcgccgctgtcattgacgccttccgctgaattggccgtagtttgtgcgggtgctatcagaatgtcgaacaggctgttgtaggttccgcccttctggatgcgggtattgccgaaaggaatggtggccgacgtgccgttcagggattgctctccgtggggataataggccaggtaggtccaggcgccggttcccggagtgagttcacctttgaaaatgccttcgctcgaaaagacgaagggtttgttgatttgcgcgacgccgttcagcgttgcgtgtatgccgagtttgtcgatatcgacctcccaggcgccgttgaaacggtcgtcgccgatttcgatcgtcgcacgggttgccggtagttcggcggcgaaagagacagggacggtttttccgtcgttccctcccggagcggcttcatccgtcgcaggatcggcggagcatccgcagaggagaaccagtccggccgttgcgagggcaagggtattgattatgcggttcataagttcgatggttttaattagtaactgtcgttcgttgcgtcgttgtacgacataggttctacggtgccgcccgggaaagagtcgccgaatccgcgctctatgcggatgtccaaaaccccgatgctgggggtcacatacttgcgaagcgtcttggttgtttccataatgcttatctgattttaagttcgaagtcaaaattatagtttgcggaacatgaaaaaaaataaattcaacgagcgacggaaaagttgtcaccaatacgctttttttatcaatggcttccgattccgttgtggaaaatagaacggcggccttcccggaagaaggccgccgttcgcatcgaaacggttgaaaaacgctattttttcaggtatttgtcgagccagccgaaaaattcgcggttccaaaccactgagttctggggcttcatcacctggtggtcttcgtcttcgaattcgaccagacgggcgtcgataccgtgcagacgtgctgctgtgaaggcttcgagcgactgcgtataggggatgcggaagtcgagttcgccggtgatgatcataatcggcgtatcccacttatcgacgaacttgtggggcgagttagcataggtacgcatggccgtcgcgttctgcttgtcccagtaggggcctccgtagtcgttgttcaggaagaaaagctcctcggtcgatccgtacatggcttcgaagtcgaagataccgcagtgggagatgaaagccttgaagcgtccgtcgtggtgtccggccaggaaatagaccgaataaccgccgtacgaagcgccgacgcagcccagacggtccttgtccacccagggctccttggcgacgtagtcgatggccgagaggtagtcgcggatattctggcccgagtagtcgcccgagatctggtcgagccactcctgtccgaacgaaggcacgccccggcggttgggggcaacgacgatgtagccgttggcggccatgagctggaagttccagcggtagctccagaattgcgatacgacgctttgcggaccgccttcgcagtagagcagcgtcgggtatttcttcgcaggatcgaaatcgggcggcaggattacccacgtcagcatctgtttgccgtcggtggtttccacccagcgtttctcgactttgccaaggcggatcttgtcgaggatcggctggttgatgaacgtgagctgcgtgatggctccgtctttcaggtcgatttcatagagctccgagggcgaagagatcgtgcagatatcggctacggccttgccgtttgcgatcgatacggcgttgatgtcgtgatcgccccgggtcagtacggaaacgttgccgttcatgtccacgcggcagagctggtgcgtagcctccatcggcgcgaggaaccaaagcgcttcgctgccgtcccagatgacgttggtagcgttgtagtcgaaattcttcgtgagttccttcaccaggcccgtttcggaattccagaccatcagacgctccttgtcggcttcattgcccgcacgacgctgcgaacggaatgcgattttggtgccgtcgggcgagaatacggggtatttgtcgtagccgacgaaaggcagttcggttttggctgccgcatcgtgaccggagatgggggtgagtcccttgcagatgttggtcgtggcgcctgtctccgtgtcatagacgaaaatgtccgagtcggtcgaaacggcgtatttcgcacctgtcagcggtttgcaggtgtatgcgagtcgggtgccgtccggagcccacgcgatttcggacatatcgaaatagggtgccagcggagtgtcccactccgcaccttcgccgatgatgtccacgcccttcccgatgccgccggaggtcagctccgcgatgaagatgtggcggtattcgccttcatcccagcggtcccagtggcggcacatcaggtcgtcgtaaacgcgggctttcgattcggccatgtccgggtggatgtcggacgacttgcggtcggcgacctgtacgccctgtacataaaagactttgtcacccgcaggatttacgccgaacccttcgatgtccttgtcgagtttcgaaagctggcggggattttgtccgtcggcagccatttcccagatttgcgaacttccgctgcggtcggacaggaagtagatcttgctgccgtcggcattccatttcggatcggagttgttcgacgagaagtcggtcagctgggcgacttcgccgctggcggcgtcacgaacgtagatcgccgtaacgccccggttctcctgcatattgtaccaggtgacggtgtagagcagccgactggcgtcgggcgagagcgaggccagtcctacgcggcccattttccacatcacttcgggcgagagaacgccggcggcgatctcctcctgggtgagcgagttgtcgatagcgaggggctgggagcgcttttcactgcatccgccgagtcccacgagcgtaattgccataaagaggaataaatttttcatttgagatcgggtttacttcatatgatttatacttaaatttgcgcttgtcaatagcgatttttatgcgtatctatctatattttgcagataaaactctgatttttaccgatgaaacgtcgccggcacgtttttttgccgtcgatcttccgcagggcgggcgtatttcccggacgaagatacttaattttctggaaactcacaatgaggttgcggtttgtacgcccgatcccgagcaggcgttttccctcttccggcaggaattcgctgctgtcgaggctgcgggcggcgtggtagtgaacgatcgcggcgaatatttgatgattcaccgcaacgggcgctgggatttgcccaaaggacatgtggagccgggcgaaagtacggcggaatgtgccgtgcgcgaagtcgccgaggaaacgggagctgtgggtgcggaggtggttcgcttcctttgccggacgttgcatgcctattatatgcacgggcggtgggagctcaaggctacgcactggttcgaaatgcgcgtttcttcgagccgagcccttaaacctcagcgggaagagggaatcgatgtggctgcgtggtgtccggccgccgaactgaaagatcggctcgaagggatgtttcctacggtgcgccgggtgttcgaatgtttggaaaaatagagg

SEQ ID NO: 10408 - DNA, 3724 bp, Unknown
  gut microbiota DNA sequence
catggattgtctggcttgcatttttgattttcagttttttagcccgcacggccaacaaggtttgcagaatctctgtcgccctttcatttaatgttttcatggtttgtaaagtttagagttattccccattacttgtaaaaagataactccattcataaccaactaaaaaggcggcatatctccatgtaagaatagctttccgattctatataatgcaaataattctatgctgttatatggtttcgggcataaatagggagcggtctgttttatgtggaatcctattaaatggtaagtaaaaaattcgattttccatccgaaaagggggaggggtgaaaaatagggattgtccgctcggtcggggtatctcggtttgtttgtctgcaagtgacaaccttttcagaaaaggatattttatagaccctttcacaaagtttgtcacctttttgttgcgggacaatttcggcataaatcgcacgatatgtggaatggatgataaataggtttacccaaaactaccctataacagaaagaatcgctatctttgccgaaaagcaagtgtaccatgtcttataaaccgccttacaccattacgccgaagatcacgaatttggttgcacaaatcagcgaagcaatcggcggctattatgcgcacgaaaatctgcgtctgcatcgtgtcaatcgaatcaaaacgattcacgggacgctggctattgagggcaacacgctttcgacggagcaagttacggcggtattggagggaaaacccgtcgttgctcctattaacgaggtgcaggaagtgcgcaacgcccttaaagcgtatgagttgctcgatatgcttgacccctgtaaagtcgatgatctgttaaaggctcacgccacgatggaggcgggattgatcgacgaaatcggttgtttccgcaaaggcggtgcgggtgtggtgtcggggaaaacggttatccattatgcgcccgatgccgaacgtgtgccgtttctcgtaaacgatctgttcgagtggttgcgcatcacggatgaacacccgttgatcgcaagttgtgtctttcattatgaattcgagtttatccatccgtttgcggacggtaacggtcgtacggggcgattgtggcagaccttgattttgagcaggtggcggcctatcttcaaaaacctgccgatcgaaaacattgtatataagtatcaaaaggagtattataaggcgattgccgtaagtggcggtaaagcgggttgcacgcctttcgtcgagtttattttgggggtaatcgccgaaacgctcactacccaagaaactacccgaaagactacccaagaaattattttggaagccatcgcccgcaaccccagcattacacgggcggagctggccgaggttgtcggaatctcacccgacggtgtgaaatatcatttgcagaaactcaccaagttgggcaggctcaaacgggtggggtctacacgccgcggagagtgggtgatcgagtgacaggaattccgaaaaaggtacttttatagatccttttcaaaagtttgtcaccgacctgttttcacccgttacgggctatatgatccgctttcccaattcgatgaaccgttgtttgttggtgcgcacctccctgtactcgaaatatattccgatcatctttgccgtcacttttttgcggtaggggatgccgagccgcataatcaggtcgttcataaaacgattgacgacgcacacgggtagcttgtcgcccgttttcagtcggtcgtacacctccccgcaaactttttccgaggtcagcagttgttggctttcgttttcctgtatctgtttgccgatttcgttcatgttgtagttgtgccgttcgatctctgccgctccgagagcatagtaggcatccaccatcatcggcacttggttctgaatctcctcgcgcagaaagtagtattcattccacgttcggttttgttccagtatctccaactgccgcacgatttcgcggaacaggtctttcattttcaatcggggatttatgcgttgcagtcggtcgcagtccgacaacggatagatatgttcggcgcaatttgtgtgaaatgctttcgcgtactcctcccgcaccagttcggcgtcggtgtagtaccgcttgatccgctcgtcgtcataggcgttgtcccacatgaaccagttgcgcgttccgtcggcgttcatgaaccgtttgtagtccattccctccaatgcctgcgcacgggtatcgcaacccgcccccgacgcttcgatttgcaggacttgtttgtagaccgcttcgcactcctccaacctcgtggcgatctcctcccgcgatttgcagggcatctccttgttggtgctgaaaatatgcgcggcatcctccacgccgttgcggaagcgtccgacgatctgcacggcttcggtcgtggggtcgatgacggtgtgcgccgcaaacgaaaggtcggttacgatcagcacgcaggctgttgtcggcagttcgatgtccaccgccgaaaagaaacggctcgtgaaaaagttgatttcatccagttcttcgagcgaggagtaagcccgcgaaaaatcccgcttgcggagtttcttcacactctcgtaactgcaaaagaccttgcaccgtttttcgatcttataggtgcagatcatgcagtggatcgtatcggtcgagttcagaaagatgcagagcggatgccctttgccttttacctgtcccataagggtacgcacccagccgacggtgttgttcgtatgtatgagcaacattttcggcttgtggtcataggtcgggcggagtatcttcatcgtaaagccctgctgctcgaaacggggatcggacggaatgatcggcgtcgcagaaaccatcgccttttgcttgcatcggaaaaaatcatccatcgggagcgtgatagagccgcggtagcctgcatcctgtatcgtgcgttcgcactcgtcgaacagcatgaaccattcaccgtgcatatccgtatgcgtctgcaccatcgccgagcggactttggggaaactttcgggcgtggtcatgattttcagatagccgtcgttgtagttcgtgttcagaaagtcgatgatgtcctcggtcgttacgccctcgaacacgccgagtatctgcgggtgcttttttagcttgccctcgataacgggaacattcggctcgatgatgacggagtgtcggggcgcattgatttcggcataggtcgcaccgcatcccgtgacggtcttgttgatgatcgaattggtaggtatttcgggcatcacggcatcgaaccgctggcctgcatttattgtgatatattcaatcttcatctaattgtttgatttgtaattaaaaaaacttggggagcgagcggtgaaacccgctcccctcgttcagcagtttagttcagcaggtcggtgatgtcctccattgcctcggcaggcattacgactttgccgttggaaaagtggtactttttggcaaggtagccgatgccctcctcgctctcgttgtactcctcggaggtgatcggggtcagtttctccacctcggcggccacctctgccagccactcggactgacagcagatttcacggtcgggttcaaactccgttacttcgggcaattccttacccatcaggaacgccagcaggtagttccagatttgggcgttcagcaggagtttgccatccagttcggtgtaccccttacggatt

SEQ ID NO: 10409 - DNA, 102730 bp, Unknown
  gut microbiota DNA sequence
ccggtttagaggttgatattttgtgcttggaggttggcgtgggcatacgctttacagcacgtattcgtagtggggggcggtttataaacgcagccaaatgccgagaataacggcgcccgaaaccgaaatcctgtaaaatgaaccggatattgttgctttgccgctgcagaagaaatgcaggccgtatagattgtaattccttcgaatgtgcgggagatttgtatgtcgcaggacggatctatgatcgagataggctcttcgtttgtgcggggttttcggaaattcaatgtagagcgatccgctattttaagtaatccggctcttcgggacggaagtgattcgtgatatggttcgggagcggaatgtcacttgggaaatacaggagcgataatcggcaaaacgggatgggacggagttcagatccgaatgcgatttttggagggttgaaatagtcccaaacgataaacaacgaagtttttgcgtatgcggcgaagggatcaggggtttcctctgtcgtagtatcgcactgtcctatcaatatctatagagtattgtattgccggcggaattcgtctgtactacacttttgcttcctgcggatggatttccctgactattcggcctccttggaggcggcgcttgggttaaggactgcgataccgatcgtgttgccggtagggatcgtgctccgggggaggggtgagtcaagaactggatgccggtctggaaacgtgtacccggtggaacggattacttccgttcgtttccgatgttatgctttaaggcccggagctgtgcttgcatgcggtgaggaccttggttcgcggatgaaatcgcgggtacgggatcccgaatgttctgtcgctgcggttggatcccatatttcagccgaagataatggttggagttatatgaggtccggatcgttttcgcagacagggacggattcgtcgtagaattgttggtgtcttcctgctgtgggaataacgggcggtttcctgggcgcttgattggtcggtgtcgtggtgaggaagtggagtgccgggagcatggtttcgcaagataataaccatgttagctcgatccggtgaagccggcttcatttgaattcggggttctctaaatccggcttgtcagtaggcgcagggtcgccgtatgcggagtgatttcggtccattgcgtcgatgcgggcaacaaccaggtttcgccctgccggacatcgattcgattgccttcgttgtcggtcaatgaaccactcccctgaagcagaactattgccacgaaagagtccgttgccgaccagtcgcagcgtgttcgtgcggtcagggtatatagcgacgtagtaaagtaaggcgtggtgacaagccggacttcctgattgttctccggagcgtacgttatgcggctgttttcggaagattcgaaatcgatcgcttcgcgtgccaattcggtatgcaactcccgggaattgcccgctgcatcccgccggtcgaaatcgtagatccggtaggtgatgtccgaactttgctggatctcgacgatgaaggacccctttccgatgctgtgcacccgtcctgccggcagataaaagacgtcgcccgatgcgattgcctggcgattcaaaacgtcggtcaatgtattgtcggcaacgcgacgttcgtactccgccggtgcgatcggacgggagaatccggtcagtaacgaagcgcccggttccgcttccagcacgtaccacatctcgcatttcccgcttttcccgtggcgctttcgtgccagttcgtcgtccgggtgtacctggatcgaaagatcttcccgggcatctatgaattttaccaacaagggaaattcctgcccgaaacgggcatagttggctttgcccagaagctctgcgccgaagcgtccgatcagctcgggcagggtgcttccggtccacggcccttccgccaccaccgattccgagccgggcatgccggaaagttcccagctttcgcctacacgggagagctcggatgcgagttccttgtaggggatgatgcgttcgccgccccagagggtctgcttcagaatcggatgaaatttgaggggacgcaatgcttcaggtcttaatttgttcctacaaatatactatttttcggcaagcaaaagctttctgcgacgagaaaatgaaacgggaagccggtgtatttgcaactgggttgcaaggaaaatgcactatatttgacaccaaagaagaataaaagcattatgaaaagtcaaacgaatggtcgcggctgcgccgcttgcgatgcaggtcctgaccacgaccgtcattcgcaaagctattggatgcccgttgcgtcggccgtgttatttgcggcgggactcgtcatgcaatataccggtgtcgaatttttcgcatcttccgcagtacggttctgctggtacctcgcagcttattttccggtagggcttcctgtgctccgggaggcatggaacggtatgcggcagcgggatttctttacggaatatacgctgatgagcctcgctgccatcggtgctttctatatcggagagtatcccgagggggttgccgtgatgttgttttattcgatcggagaggcgttgcaggagcgtgccgtggagcgggcgcggcggaatattcgtgcgctcgtcgatatccggcccgaacaggcgaacgtcttggaggacgggaaaccggtggctatgcccgctgcgcaggtcgtgccgggccggacgatcgaggtgcttccggggggacgtgtccctctggacggcgttttgctgtccgaggcggccccgttcaatacggcggcgctgaccggagagagtacgccgcggacgatctgtaagggagatgaggtgttggcgggtatgatctcttcgcagcatccggttcgtatcgaagtgacgcgcccgtatggggagagcgccctttcgcggattctctccatggtcgaagaagctgcggcgcgcaaggctcccgccgaattgttcatccgccgtttcgcccggatttatactcccgtagtgacaggattggccgtgctgatcgtcgctttgcccggattgtggtcgctcctgcacggaggcttcgcctattcgttcgacgaatggttgtcccgggccctggtatttctggtggcctcttgtccttgtgcgctggttatcagtattccgctgggctatttcagcggtatcggcgttgcttcgaaggctggcgtgctctttaagggcggcagttatctggatgccattgcgcgggtcaataccgtggttttcgacaagaccggcacgctgaccgagggtttgttcgaagtccgggaggtgcatgttgctccgggcgtgaattccggggagctgctcggatgggtcgcttcggccgaacggaccagtacgcacccggtggcccgggcagtcgtgcagtatgccgagagggagggtgtcgctcttctcgcttcggagggcgcagttgaaatcgccggacacggcattcgggccgaattcgacgggaaacagttgctggtgggcaatacgcgtctgatggctcgcttcggcgtggaatatccgtcggaggtcgatgcgattcccgaaacgatcgtcgtatgtgcactcgacggccggtatgcgggctatctcgtgattgcggacaagcccaaggaggatgccgcgcgtaccgtggcggaattgaagtcgctcggaatcgaggacattcggattttgtcgggcgaccgggaggcgctggtggcgaatttgggccgcacgctgggcgtttccgaggcccggggggatctcctgcccgaaggcaagatggagatactcgaagcgctgcgcggagagcccggcaaagtcacggctttcgtcggcgacggattcaacgacgctccggctctcgcaacgagcgatgtcggggtggcgatgggggctttgggcagcgacgcagccatcgaaacggccgacgtggtgatccagtccgaccagccttcgcgtctgcctgcggcgatccgtatcggacgtcttacgcaccgcatcgtgcggcagaatatcctgctggcgatcggggtgaaggttgtcgtgctgacgttgggcgcactcggcatcgcaaccatgtgggaagcggtcttcgccgatgtaggcgtcactctgcttgcggttctgaatgccgtgagggcttccaatcgtcgtttttaatgcgtatcttgcacctatgaacgaaaacgaatacatttcccgcctcaaggcccgcgatatccgtcctacggcgctgcggctgttgattctgcgtacgatggccggattcgaccgggctttcagcctcgcggatctcgaagaggagctcgatacggtggataaatcgactcttttccgtacgctcactctttttctggcgcatcacttggtgcacggcatcgacgacggcaccggttcgctcaaatatgcgctttgcagcagcgattgcgattgtgaaatcgacgacctgcatacccatttctattgcacgcattgccggcgtaccttttgcctgcgaggggtggctgttccgcaggtgggtctgccggacggattttcggccgaaacgatcaatttcgttatcaaggggatctgcgccgactgttcggggcggaactgacaggatggatcgaggcggcttgtctgaacgacgaagccccgtccgccccggtcggaaacggtcgattaaaggtccgggaatttccggaggctccttttccgcagcggatgtcagcaggtggcgagccagttgcggatcagcgccgggccgcaattcgaaatgcaggattcggggtggaattgcacgccgtgtatcggcaggttccggtgataaaaggacatgatgtgtcccgcttcatcgtgcgaacttgcgatcagctcttcgggcatcgagtccggatcgacgatccacgaatggtagcgtcctacgatcaggggcggagcgattttctgcagcagcagatcgcccgcatcggttacggtcagcgtcgtcggatgtccgtgcagcggggccgacagttgtcgcagttcggctccgaacgcccgggcgagcgcctgatgtcccagacagatccccagcacggggattcgctgccgcacgatctgtccgatcgccgccataaggtcgccggcctcttccgggattccgggacccggggataggagtatcccgtcgtaatcgccgaatttttcgaagtcgatccggtcgttgagttgtatcgtaatattcaccggttcggacgattcccgaagcagttgtacggcgttgtggacgaacgagtcgtaattatcgattaccagtatctttttcacggctacaaaagtaaccttttttatacctttgcggaataaaaatcgtcagaatggaagctcagcttgtccgaaaagccgtgaatcgttgtgccgcgcagggaaaaccgtttcttttcggggtcgatttcgaattgcgggagggatttttcgtggagaatccgctcgtctgccggcagatcccgtttgcctgcggagagattaccaatgtgccggatagcttctccggggaggcggaaattacgccccgcctggagattctgcataccgatcgggaggcgtatcttcgccggttcgccgtcattcgccgggggttgcttcgcggggacagttttctgaccaacctgaccgagcggactccgatccgaacgaaccttactctcgaggagatcttccgccgcagctgtgcccgttacaaactgttgctgccggggcgtctggtctgtttctctcccgagtgtttcgtccgcattacggacggggtgatccgctcctacccgatgaaaggaacgatcgacgctgcgttgcccgatgccgaggcccggttgctggaggattacaaggagcgttgcgaacattacaccatcgtcgatctgattcgcaacgacctgaaccggattgccgatcgtgtgcgtgtcgagcgtttccgttacgtcgagaagatcgctaccctgcggggcgaaatcttgcagacgagctccgaaatcgccggcgacctgcggtcgggatggcggcaggaactgggcgacctgcttttcagcctgctgcctgccggctcgatttcgggggctccgaaacccgcgaccctgcggttgatccgcgatgccgagcagtgcccccggggatattatacgggggtattcggctatttcgacggtcgcgatctggacagcgcggtgatgatccgctatatcgaatgcgagaatgggcggttctatttccgcagcggcggcggcatcaccgtgcacagcgccccccagcaggagtacgacgaggtcgttaccaaaatttacctgccgattccctgattgcgatggatgagttgcttttcatagaaaccattcgggtcgaggacggaactttcgttcgtcccgaacttcatttgcagcgtatgcggcagacggtccgcgaagcgtacggcgtcgcctccggtttcgatttggcggatggttcgattccgcttcagcatcggaagggaacggtgaagtgccggatcgtttacggccggtcgctgtcggagatttcgtttgcgccgtatgttccccgcgagattcgctccctgcggctggtcgctgcggacgacgaattggattaccatttgaaatatgcggatcgtagcgcccttgcccgtcttttgcaacgtcgggacgattgcgacgagatcctgatcgtgcgcgacggggcgattaccgataccagttacagcaacgtggcgtttttcgacggacggaaatacgttacgccggatactttcctgctcaacggcacgcggaggcagtacttgctcggtacgggagttttaaccgaatgccgcattacgccttccgacctgggcggtttcgagcgggtcgtgctcatcaatgccatgttgggaatcgaggacgacctcgccgttccgatcgaacggattcggggattataaccgaaggtaagtggcataatcgcagggttgcggaccctgcgttttttatcgatcaaatccggcctttggcgggattcagcggtatgtcagctttgtcgttcgtaataggcgatccggtcgcaacagactttttccgtgatgtcgcgcatgagttcgaggcgcgggatcaaggcgtcgatgtcggtcttggtaacgacgaaatccttgttgtagcgggcttgtacataggcatcctgtaacagattgaacaggcgccgctcctcctccgtatttcgagggaaaaccgataccagttgcagcgtgtgcgtcttgcagcgatccatcagaatttccagcgcatgatctttatagccgtaaaggatatataccagcggaatggtacgcaggtaattttccgcagcttgatgtagatggaaagaggccattttatatttctgcaacccggcatagtaacgtgctcctaacagaaaatcgctggcgaactggaatttttcgctgaaatagtcgcgggcgatttgcgcgatttccgcatagttcaattttcggcatcgcgccagtttgaactcctgcgaggagtagagcatgattccctgctttttgatttcatggtagaagtattgtcccagttcgaggtttttattcagccgggaaatactttcgttgatgaattgcggccgggtgtaaaattcgctttgtttgttttcgaaaaaccgttcggtgatgcgggcgtaaacgtcgtattccttcaggccgagccttcggcgcgtgacgatcaaaatgtcgtagtcgctcatgaaaaaggtcgtcaccccgtaatcccgccgacggtcgcaatcgacgtacatatcccgggcgtaactgccgtaaagaataatcattacgcaatcttttatttcgtttcggatgatctccacaagttgatgcagatcacgtcttttttccgcaggcaggaagttgatcgaacttttcatgcatacaaagttagcaagaaaattgaaacgcctaatttttacaatgaaattaaaatactatatttgtgcgtagtattttcgcgcgatgacgtttgttgtagtggggcggcgtgtgtcgtccgggaacaaataagcagtttggatgcaatgcggaaatacggtagttcggcgtagccgacagacataaaagggtacacaactcttatgcctaccgtaaaattgggaatttacagtaatcaggtgtagcagttgtctgtccttgttatgccctgctcgtttcgacgggaggggcaggcaagggcgcaggacaatcgactgattacgggctcccaatgccttcggtagtagattgacaccgcgccttcttttcattttatatgcgagaaggtgcaaaatccgatccataacattttatgtccggggcccaacaattcctgatatagattgatacatccaaagaagctgtaaatcagaaagtaagaattgctcctacggaataagtaatttttggttggtatgaaaaaaacggattattcttcctggagaagattggagcgcgtgattgaatcttctggattgacaatcaattcattcgccagatatgtcgggttgccgcgaggcgaaaatctttatcagatcaagcggggaaattatggagtaagccttggtgtggctaaaaagatccatgcgaaatttccgcagtatccgatttcctggttgatgcacggtgaagccgaatccgctgctacgccggaaggcgatgcttttgtcgttcggattcctgtatatcgggactcttccgtggcggagtttccgcccaaggaggttccagaacggtatctgcttctttctgccgaagaggctcggggggctcaaattgcattatgcacggacgatcaattcggaacggttttgcagcattggctcgtgttgctgcgggagccggacggagaagttataaacgggagagtttatttcgttatgacggagtgtttctatctgttttgttccgtctatcgtatcgagggggatcctgctcgtctgcggttgaaatctttgtttgcaactgcagacgacgacctggaggtccgatgcgaagagatttgtgtgatgtggccggtttgtggggctatttgcggattaaaatagattcgtagtatacgggtttccgaagaatagtgttgttttttgtcggaatagtcttatcataatgtaaataggaaggtgtttcagaagtgaatttatgctgaaaaaaattaaattcgctctttccgaagggattttgcataataagaaaacactgattgccgaacctggaaaagaataaggcgatcgctttattctcttatttgtcaatcgaatataaaaataaaaaaggatggattcgaaaaatccatccttttgaaagttgctttgtgcggataaagggacttccgcatgaatgtaagcccaatgtatatcaacgaattgcgacggctttggcttctgtccccacatcgcctaccgtcattttgcacggtcttgcgcccgcctgcccgtttcgcctgcgcggccgccgtatctccttgcatgacattatattattctaattgaattatgcggtttggataatatcttccggttaatgcccgattactgacgatgtgaatgcagagtatggatatttgtttgtatagttcggttttcgtatctttgttttgctttaattttaaattgtttttattatgaaactgaggttgtgtttttttatgcttgcattagggatatgcggagcagtcgtgcaaggttgtgatgacaatgatgataacttggatgttcttgataaattgcaggctgcattttctcagaaatatccggaagccagtccgaaatggaaaacccggagtaattattacattgcggatttccagaaccagaattatgcagccgaggcctggtttacttccgatgccgtttggctgatgaccgaaacggatcttcctcatgcgtctttgcctgaggctgttaaaaatgcgttcaagaacagcgaatatggacagtggagcctggatgatgtggatatgttggtgcgagaaggcatggagccggtctatgttttggaggtagagcagggcccgcgggagatggatctttattacaacgcggagggaattctgatcaaggtggtggaagattccgaggatgattccgaggattatctgccgattgaacttcccgaagaggtgaaaaattttctgcaggagaaatatgcggcatccaaaattgttgaaacggatcaggagcacgggcagtttgaggtggatattattcatgacggagttgccaaggaggtgctttttgacaacagcgggaattggctttcctcatcttgggagatcagtctggatactcttccggaagtcgttaaaactgcgatccggcaggaaattaacgataagtatgtcggttatgaaaccgacgatgagccggaactggtagaaacgccggacgggaattattatcgaatcgagctggaagcggaagatgacagggaggtgattctcaaaatccgggaagacggatctttactgcagtagattcgtttgaataggcataccgacaggcagatgaaaatctgcctgtcggtatgttcgtattatatcatttgttttaatagaacgatttacctatgaaaaaaatcggtttgctgctatttttgcggtattcacttgctctttgtccgcacaaaataggctttccgtctttatcggaaattccaatcggtatgcttcggtcgatttgtcggatttccgtcggcgcctctgtgtggaatacgatatttcggcagaatcgctcaatgattattaccggcgttgcggcagagattgggggcatgtgggccttgcactggagatcgcctgaacctcgggacgaagcatgcgcgatgtctgtgaccattacaaacgttataaatgtgagggctgggggcggattctgatcgaactgagaatcggtcccgagtcgtcgtatcgtgttccgttctatgatcgggtgcattgttatagcgattactggcacgagcattacgactcctattgcaaacggcatgggaagtatctccgcacaagcacgggtataagaaacacccgaaatacgggaagcggaaatacgggagatatcatgacgacgacgatgacgattgagtgaccggtaataattccatataaatcattatacgtataattgttttatgaaaaagattttattggttcttgtttgcagtttgtttgctttcgagacggtttcggctcaagggaaaaacgccgtgggattacggttgggagatggcgtggaatttctttatcaatgcgatctttcgtctcggaattttttgcaattcacgctggcgactcctcattttgaagggctgtccgttacgggaatctataattggcgctgctgccggtggaattggacaccccagacttgcgattggtatctgaatgtcggtgtgggtggagccttgggactttatgactttgacgattcgggttttttgctcggtgtggccggctcctgcgctttcggctgtcatttcaaaaatgccccgatctctttggaggtagattaccgtcctgtgatcggagctgtgatcggcggtggacatgacggcttctttgatcccggattctggaatttcggattgtccgtcaaattccatttttgaaactatgaatgatcgttatatattcttaatagccgtttaagtaggaacggctattcgataaatctctgaacacgaactgtattgaaaaacaaataaaaaggtagaaaaaacgagagatttatttttggtactgatatacatatctacactggaaaatcttagaaaggttagttcgaaaatcttatgattctaacctcttgtaaattacgtcaaaatggtatttctgttaagttctgaaagtcttgtccatttctggaaattgaagttattttcccattctttccctttttccgtttggtggcaatacaggagaatcacaaatgtcatttgatttatttaaataatggattatacctatttatacaaacatagctatcagagaattgatgaaattcaaaatttgctaccatatgatatcttcatatccagctatgtaaattcacagagagtgcaggagcctgcagataacattcaagcaggtcaaaaaatatggtttgcaacagaagaagaaggtcgggatctatatctatctggaaaagatgttacgtttgtcaaagcgaatgaagattatgctccaattacagaaaaattagacacattacaattatctggcaagtctgtttgtgtggatgcaactggttgcaggggcccgtatttgatgtttctaatgcggtgcatgtctatgtataagattaataagtttgatatattatatactgaacccacacaatatagatgtgcttaaaacactcaattctctgacttttttacgaagtaaaacagatgcatggaaggtctggtatccatacgtcaaaggacgacaatgatttgcttattatagcagcaggatatgatcatagtcgtattgtagagtggcaaccaaaaagaaaggatgcaagaaaaaaagtgttgttatttggttttccagccattagtcctggtatgtttcaggaaaatatcttaagagcgcatgaggctgaagcggctatagaaacggagtgctttaaagatatggactcgaatatatatgcaccagcatatgatccatttgttacagcgcaggctataagtgagtacgttgaaaagcagaataagcgagcacccattacaaatatctacctgtccccattatctacgaaacctcatgctcttggtatggcttgtattttttatgggaacatggatttaataaaaacattagtctgatttatccgtattgtcaacaatatataactgataattccgatggaattgctcgtatctggcgatatgaaattcaactaccttaagtaagagaaagctaaactattaatatcgtaacacgaagtaataaaaatatatttaaagtttattgtgggattataggataacccaattatatattatagtatgtttgcagtaaagaagacaatacaaatatggcaaagattacggtacgggacacaaatgttacagttatattgctcaatgagaacgactatatctgtctgacggacatcgcgcgatacaagagcgacgactcgaatgcggtgatcggcaattagttgcgcaatcggaatacgatcgaatatctcggaatttgggaaagcctgtataatccggatttcaaacccctcgaattcgaggggtttagaaaggaggccggactgaatgcctttaccctgtcgccgcaaaagtggatcaatacgaccaatgccatcggtatcatttccaaatcggggcgttacggaggaacctatgctcataaggatattgcgttcaaatttgcgagctggatttccgtagaattcgagttgtatatcgtcaaagagttccagcggctgaaagaagaggaacagaaacaactcggctggagtgccaaacgcgaactgtccaaaatcaactaccgcatccataccgacgcgatcaaacaaaacctgattccggccgaagtgaccgcgaaacaagcgagcatcatctatgccaacgaagccgacgtgttgaatggggccatgttcggcatgactgcaaagacgtggcgcgagcagaatcccgacttgaaaggtaatatccgggattatgcaaccatcaacgaactgatctgtctgtccaatatggaaaacctcaatgccgtattcatcgaccagaaaatgcctcagggcgaacggctcgtaaaactcaaccggatcgctattcagcagatgcaggtattggagagcaatgacgaacggaaactactgaaatagcgcaatggatctccgtaagatcaacagttatatgattctgctggcgatagtcgttgtcgtcggcttgttcgtgtccacggtcgcgcgactggtgatattggcaaaaggggtggatgcaggtacggcgaatcttgtttttctgattatgctgggtacctgtgcgatagcctatctgaccattttggcagcattttccagcattgcggatttcattgccgataaaattctcccgaagatagcccgaaagaaggctcttactgctgaagcgaccaggattccaccgatcgatgatatacccgattcggatgtcgagcaaatcaagcaggaggcagacaaacgatttctcgaacggcagaaagaacagatcgaactgttccgacgttatgggcatagagaggtaggtccctacatcacttccgatgaacttgtgcgtctcgatcgctacatcgaatattatgcatgcaggaatccggctcgacagaacttactcctattcgtccgcaaaagttgaaaaatgccgatctattccatttcggatggaacatggcacactatttcggacgaccgaaacaggaggtagtgccgtggctgaaatccgcatttgctccgcttgccgagttggaggattcctatatcaaagggaaactatattcaccacagacacgtcaattcaccatccccaacattcccggctatatggccgaacacggcggctgattttcccttcaaaaagatatttcagggagattttaaggagatagcgagtgtttttgatctccgaaaaatctccctttttatttgccccggttccgattggacggaacgaacgaatccaagtttaatctaaaaatttcgattatgagtttaagggatttattggagtcgggggcaaacgtcagcgtgacggtgacgctcgacgatttgagagcgattttcaacgaagcggcaaaaggcggaagaatttttggagcgcttaggaatagagatcaaagaccgcgaacagggccggggaatgcggacgagatagagtaaaatctatttctgcgtatagcttatatgggcaataccccgaatgagtggttgttcgtctgcgaattattttctatttttgtaacgtcgagcgtagtaatgcgttcggcagacatactgaaagtgttttcgcactgtctttacaacgaaatctgacagtttcaaaaagagaaaagacaacgaatgacactcatttcttgtttagattatggcaagggatacgttcagtgttcccataccccatatctactcaagtgtggggtattgcatcgtttattttctcttgggttttgtcagaacctcgttgtagataagcgaaatcagctccacactttctttttgattattcaccattgaggggccggatggtaattacaatttgaatattcaatcaattcaaataataattactatgaaaaaaattctatcggtgttgtatattgctacattgctgtttgcaagttgtagcgatgagtatgacgattcggcattgaccgggcgcgtagataatttggaaaatcgggtggccaaattggaagagctctgcaaacagatgaacaccaacatttcatcgttacaaactattgtaacggcattacaaaagaacgactatgttacgaacgtgacccccatcatgcagaatgggaaagaggttggctatacgataacgttcagtaaaagtaatccgatcaccatttatcatggtaaggatggacaaaacggaactgacggagaggatgggaaacccggagttgacggtgaagacggaaagaacggacatactcccgttatcggagtaaagcaagatactgacgggagctattattggacactcgacggtgactggctgacggacgatagcggcaataaaatcaaagcagagggaaccgatggcaaggatggtacggacgggtcgaatggagaagacgggaatgatgggcaggacggaaagcccggcatggacggcaaagatggtattacccctaaattcaaaatcgaaaacgattattggtacatttcctatgacaacgagtccacgtggacacaactcggtaaagccaccggtgaagacggtaaagatggagaggacggtattagcggtgatccgatgtttacggatattgactatgaaaccaataccgactatgtaatttttacgttgtctaacggtacgcagatcaaattgcccacgtggtcggcattcgaggctctgaaaacactctgtaatcagatgaataccaacatttcgtctttacaaacgattgttactgctctgcaaaataatgattatattacagagattacccctgttatgcaagatgggatagaaataggctatacgatcagattcaataaaagtaatccaattactatttatcatggtaaagatggccaaaacgggacagatggttcggatggcaagcccggggctgacggacaagacgggcatactcctgttatcagcgtaaagcaggatactgacggcgtttattactggacgcttgacggcaagtggctgacggatgatagtggtaataaaatcaaagccgaggggacagacggaaaagatggtgcagacggttcagatggagaagatggaacggacggagcgaacggtaaagacggcattactcccaaactcgaaatcagagagggatattggtacatttcctatgacaatggaacaaactggacacagttgggcaaagccacaggtgaagatgggactgacggaactgatgccgtttcgattttcaaggaaattacccaagatgaagattatatccatttcaaattgcaggatgattcggttatttccgtgcccaaacatcatccgctgtctatcacattctccgaaaccgaggatattcgggtattggcggataaaacatactcgatcggttataccattacaggagctgatgaaaataccgttatcaaggctttggcacaagacgggtttcgggctgtggtaaaaaagacggacaatgcaactggaaccatcgaaatcactactccgagtacgattctgccgagcgaggtgctgatattcgtcaccgacggtaaggaacggacgattatgcgttcgatcaactttgtcgaaggagttatcgttgtaacgaccaaatcctatacggtcggttacaatggcggtacggttactgtcgatctctcgaccaatatcgactatacggtcgaaatacccgaagccgataaatcgtggatttccgtagctgatacacgtacccgtgccgctatgcgtgatgaaaccctgacatttaccgtagcctccaattcggctcttacagttcgttattcgacaatccggttggtcgataacctcggtataacatcagaaacgattcttatcacccaaaaatctggaacctcacaaaccgttcatgttacaacggccggaaccctcgatcaacttatcaattctgaggataaggacatcatcgaggaattgacccttactggcaagatcaacacattcgacttcgactttatcagaacgatgaaaaatcttaaagcccttgatctttcaaagaccgacaatacgactattccggcaagttgcttagctaatactaatatttcgacagttttattgcctcttggtcttactgcgattccaaatcgtgcattttatcaagcagcaatcacttcgatatacattcccgaaacagtgcagactatcggagaatatgcattttatcagtgtaaatctattacagggaaccttgtaattcctgatgccactacctcaattggcaactactgtttcacatcatgtacttttaacggcaccttgacactcggcaatggattacaaactattggtgagtctgcttttggagggaaccaatcattggtaggggatctaacaatacctgtaacagttacgtcattaggcgcttctgcatttagtgggaatgtaggcttcaatagacatctcacgattgatagtggtataaatataccgtttgcctgtttttatgattgccgtaatttttctaaactcactatagctgaaggggttaatattattggcgagtctgcctttgaaaatctttcaagcattacaggtaatcttaagttgcctaattccataacatcaattggggctcgtgcatttttcggttgctctaaaattgatgggtatttatctcttggtccaaacattacatcaattggagattgtgcatttgtaaaaagcattgattctgaagaaataatacaagaaaaagaaaagctctccaccgatcccgatatggactactatgatcgtattatatacgacgatacttattattctgctattttttccaaaatatatatccaatcttcactaccgccgacgattactattaaatcatttgggctgaaagaaacgacgatttcagataagagatttattaaaagagaaatcgtcgaaagacaaccgggatggagcaggaaaagacagtatgacatctataatgcttacagatatagaggctcgtatccaaatcatttgattgttccaaccggatgtacagcaaattattctgattgggaagttgatttaattgaagaagttgatttttagctttttaacatcaataattatgtgtacaaattccaacactcaaccatcgaatggacagcaactgtcacccgatgcatttattgagaactcccaaaacgatactcaaaagatgaatacatttacagcttatgaaaaagcaattgaaggctatcagtttcaggtaggccgctacaacatctggatgaactattatgccatcttcgtcggcgctttattcgtcgctctttactcgatctggccgaaaagcgaaatcgaaacgctatgttgcgcatgcaaaccggtttgcggcaaagctcctgcggcagttgcagaatcgcaggagtggttcttgcccctgattatatccgttctcggttggatcgcctccctttgttggtacggagccttgctcgggtaccgtaagtggaacgagcactggattaaagtggtacagggtatagaaatggtacttaataaagatgtatatcctaatgtttacactgcccaaccggaacgtcctcagaaagagagtttgtggaaacgtattaagaatatttttcgatgcaataaatcaaaatgttatgcgccaggctttgtctctactcagaaaattaccggaatttttatttttttcgcagcattggcttggggcggtttgataacctacattttatatcaatggtgctgcggatggaacctttggagcattatccttagtgtcctgtgtggctttcttactgttgtattgctgtgtcgtttacattggggaaaatcaagattttattcgtcaactattattgatagatagctaccggcgatgaatcgttgaaaagaaactatatttacttacgaatcattgcaagctacgaatattattttagtggaacaatcccatttgacgtaaaaaacggaggctcatcggcctccgttttgtttaaaatccaatattcaataaacaaaaattttcaactttacaaaaaaatgcggacaaaatgcggacatatcagccaaaataaaaacctcaaatgattgtttataagtcatttgaggttttttgaatagtacccggagccgggatcgaaccggcacaacattgctgtcattggtgtttgagaccaacgcgtctaccaattccgccatccgggctgctaaatcggtgatttgctctgcaaaagtaatgatttatcgaggaactccaaatttttttcgcatttttctgcgtccttactgtctgccgaagtggacgatgagcctggcggccttggccggtccgacgagggccgagagttcttcggcaggggccgtgcggattttctccaccgtacggaaatggcgcaacaggagctctatggtcttcgggccgactccttcgatattttccagttcactgtgaatgaaagctttgcttcgcttctgccggtggaaggtgatgccgaagcgatgggcttcgtcgcggatgtgacacaccactttgagcggttcacccgtacggctcaagtagtagggcatcgggtccccggggaagaagatctcttcgatccgcttggccaggcctacgatggggacttgtttttcgattcccagttcgcacagcacggcataggcgctggagagctgtcctttgccgccgtccacgataatcaggtcgggcagttcggctccttcggcgatcaggcggctgtaacggcggaagacgatctcgcgcatcgaggcgaagtcgtctgcaccgatgacggttttgatgttgaaatggcggtactccttgcgtgaaggcttgccgtcccggaataccacgcatgaagctaccgggttggtcccctgtaggttggagttgtcgaagcattcgatgtggcggggcggacggtccaggtgcagctccttttgcatggcggccatcaggcgttcggtatgccgctcgggattcttgatctcgaggttcttgagctgttcggcgcgatagatacgggcgctcttgagcgagaactccagcagatcgagtttttcgccccgtttgggaacggtgaaggtcactccgtcgaaaagttgcgcggccgaggggaggtagggaacgatgacctctttggccagcgttccggcgatcgtttcggcgatgtgctggatggccagggtcagcatttgggccggatcggtgtcgatgcctgtggtgagccgtatcgtatagacgcccacgaccgaaccgtggcggatgcgcaggaaattgcagtaggccacatcgtcgtccaccagcagggagaagacgtccacgtccacgatgcgtgcgctgacgatcaccgatttgctcgaatagttgtccagggcgtcgaggcgtgtcttgtagcgttgtgcgacttcgaatttcaggtttcgggcggctgcctccatctctttttcaagataggtacgcacggggcgcaggtcgcctttgagaatcgaaaccgtcatatcgaccagtgcgtcgtattcttcttcgctttgcgctcccacgcaaggtcccttgcagttgcccaggtggtattgcaggcagaccgaatagcgccctttggcgatagccgccggcgaaaggttgagcgagcaggttcgcaggggaatcacctcgcggataaactccaggatactgcgctgcatcattaccgagccgtagggaccgaaatattgggagccgtcgcggttgaggatgcgggtggactgtacgcgcgggaacggttcgcggcgcacgacgatccagggataggtcttgtcgtccttgagcaggatgttgtagcgcggctggagggtcttgatcaacgagttttcgagcagcagggcgtccgtttcggtatcgacgacgatgtgccggatcgcagcgatctgcctcacgagtacctgtaccttggcgctgtgttccttgttctgcatgaaatacgagctgacccgcttgcgcaggcttttggctttgccgacgtagatgatcgtcccgttcttgtccagaaactgatatacgcccggtgacagaggcagcagggccacctgttctttcaacccgtatttttttacgttgtccatctgtcgcaaaagtagcaaaattttaacaaagacctctgccgtgcgctgaatcggagaatgagccggagtttttcggcagaagtcgtcgattgaacagattgttcgtggttgaaaagtatttatattttgattatttgtcgaaaacattatacctttgggccgttttattgagcaaaatctgcctatgaaaaattttttattcctgttatgtattctttcgctctgcttcgggtgcgacaaggcgtatgatctgaacaagatcgaatccggcgatgtaaccatcggcaacgaccagagcgaatggattatgccgttggcgcagatcacggtcggaatggacgagttgcaggacggcagtgcggatatccgcgctattttcgacgaggtcgatatctggttgccgacgacgctcccgggcaatgcggagtgggtcgatatcgtccgtctttcgagcgatggaacttatctggacggaatgctggaggctcttatcgacgagatgctcgttcccggatcgaaaaaaatggacgaagtggtcgatctgatttggtccaacgaaggttaccgcgagcgttttacggcgttgattccggccgatagcgaggagcttttcaaggcggaattcaagaagtttttcggcgaggacaacgaggctggcgaagcgttgcgcgatacgatgggcgagctggcgcgggaatttctttcccagattaaaatcaatacgattacttataatgcgacgttggatgtcgacgatgatttgatcgatatgcttgccgacaacctcgatcccgagggtaccgtcgatccggtcaatacgctcgatctgtacggcgaggtgcggagcagtctgccggtgagcttcgaagtagctgcggatttttccgaaacgaacgtggctatcgcgcctttcctggtcgaacccgacgaagagaatgatatcgctcccgtgcggctttacaaggatgatatccggagtttgttctctttcttcgaactgaatgtcgattttatgccgcagaaatattatccgcgcatcggattcagcgacagccagtcgattcgtatgatgctgcatttgaagaaacgcggcggtcttaatctgaacctttaatccggattcctcatatgaaaaagatcatatatactttgattgcggcatttgtcgcatgtacggccgtggcacagacgccgagtgcctactttatggagggttcgactttccgcagccagcttaacccggctttcgctccgctgcgcggctatgtgaatattcccgtattgggcggtgtgcaggtcaacgtttccggtaacctctccgtcagcgatattttttatccggtgaacggaagtttggtaacgctgttcgacaagaatgtttctgcggccgaggcgttgggaaatctgcgctcgaaaaatatgctcggaaccgatgcccggatcaatatcgtcggtttcggtgcattccgcaaggatcataagacattctggtcgttcgatctgaatatgcgtgtggaggcggaggccaatatgccctattcgttgttcgactttctcaagaacggacggaacgaggccgttatcaacgatatcaaagcctcgacacaggcttatctcgaggccgctttcagttactcttttccgctgacggatcagatttatctcggtgctcggggtaagtttctcgtcggcgcgggccgtgcgcggacgtcgatcgaccggctcgatataaaattgcaggagaatagttggaatatcgacgcggacggttcgttcgaaatgtcgggccttgagatgagctccatgcagcgtcccgacgggtcggaatattattcgttcaacgatttcgacgtctcttcctacaaagggcctgcgggttacggttttgccgtcgatctgggtgtgacgtacgacgtgattcccgatttgcagctctctttcgccgtgaacgacctgggtttcatttcgtggggaaagaaatacctggagcgtgggcagatgaccaaatcccaatcttttaccggcgtggagatcatcgacggtgaggttcacgatccggagttcgatttcggcgagctggagttcgaccgggtgcaggcttccaaaggcaagaccgagatgctgcgcacctcgatcaatctgggggccgagtacgaggtttggcgtcacaagatcggcctgggtctgctttacaacgtacgtgtctgggatgtgaagacgttccacaacctgaccgcctcggtgaacttccacccgattccctggtttacgctgactaccagttattcgtttctcaacggccaggggcacgccctcggtgtggcgatcaatgcctgccccagttggatcaacttcttcctggcgaccgatatgttgatttgcagccatacgccgcagttcctgcccgtcacttcgacttcgatgaacgtgacgctcggcatcggcgttccgatcgggcggcgcagccaccgcattccgggagagtatctctaccgataataatattgtatgatattagttaagaagcctgcatcggtagatgcaggcttctttgatgcggtgttttctctttttacgattctttgccgtaaccggtgtttgccggttttcgatggcggaatcccgaaggggtacgtcttcgggccggagaacacgtgggaacggtaggatttgattatgggaccaaagtcggcactcgttttaccgtccgcagcaaaggtgatcgaccggaacgtcgaacggatcggcgggcagctcctccacgacttgatgcggatagcacacgcctgccttgaaagcccggaaacccggctgcgacaggtatttgtcgtagaatcccttgccgcgtcccaggcgcatgcctgcggcggtgaacgccacacccggcacgatgataaaatcgatctcctcggggcggcacagcgcagtggcctccggttccgaaatgccgaacgagccggagtcgttcatcgaggcgggatcgtagtcgtagaatcgcattatgtcgccttccacgcggggcagtacgatccgtttggagcggttccagcgttcgagtgtcggggcggtgaggggttcgtctttgagtgaagcgaaaagggccaccactttggcgcgtgcgaaggccggaagcctctccgcttcgttgaaaatacgcgcggaaagctcttcgcgctgttccgaagaaagggccgtattgagccctttcatctgtttccggatttccgttttggtcataaaatgcctgattttaagcgtaaatttcgaattgttttgtgttgttattatgcaaacaatgactatctttgccggagcgcaaacaaatttttaacaaaaataaacaaatttcaaacattatgggctgttttctaactaattcttctcttggcaagaagttggtaatgagcattaccggttgtttcctcgtgctctttatcctcttccacatgtcgatgaacatcgtggcgatcttctcgcccgaggcgtacaacacggtctgcgcattcctgggtgccaactggtatgcgttggtcggaacgctggtgctggtcgccggtatcctgatccacttcatttatgcgctggtgctgaccgtgaacaactataaggcacgcggttcgcagcgttatgccgttaccgtgaaggaaaagggtgtgcagtgggcgtcgaagaacatgcttgcactgggatggatcatcctcggcggtctgttgctccatctgttcaacttctggtcgaagatgcagctggtcgaggtactgggacaccatgaaaattcgctcggcttctcgccgcaggacggcgctgcgctgattcagtacaccttctcgcagtggtactacgtggtgatctacctggtttggttcttcgccctctggttccaccttacgcacggcgtgtggtcgatgttccagtcggtgggctggggcaacgacatctggtatccgcgcctgaaatgtatcgccaacatcgtggcgaccgtcgtgttcctcggtttcgccgtggtcgtgctggtctatttcttccggagtctttgctgcggttgtgtctgctaacatcttacgttgaattataaaaatatagagatatggctttcaaattagattcaaaaatacccgccggggaactcgcgcaaaagtggagcaaccacaaggcggcgatcaaggtagtaagccctgccaacaaacgcaaactggatattatcgtcgtaggtacgggcctgggcggtgcttccgcagccgcttcgctcggcgaactgggatacaacgtgaaggttttctgcatccaggactctccgcgccgtgcgcattcgatcgcggcgcagggcggtatcaatgcggccaagaactaccgcaacgacaacgattcgatctaccggctgttctacgatacgatcaaaggcggcgactaccgcgcccgtgaagccaatgtttaccgcatggccgaagtttcgaactgcatcatcgaccagtgcgtcggccagggcgttccgttcgcacgcgagtacggcggtatgctggacaaccgttcgttcggcggtgcgcaggtttcgcgtacgttctatgcccgcggccaaaccggccagcagttgctgctgggagcttatgccgcactcaacaaggagatcgctgccggttcggtgaagagttatccccgtcacgagatgctcgacatcgtgatcgaagacggcgaggcgagaggtatcatcgcacgcaatctggtgacgggcgaattggagcgtttcggcgcacacgccgtagtgatcgcttcgggcggttacggcaacgtgttcttcctttcgaccaacgcgatggcttcgaacggttcggccgctttccagtgctaccgcaagggtgccggcttcgcgaatccctgtttcacgcagatccacccgacctgtattccggtgcacggggatcagcagtcgaagctgaccctaatgtcggagtcgctgcgtaacgacggccgtatctgggttcccaaaaagatcgaggatgtgaaagccctccgttcgggtgccaagaaaccttcggatattgccgaagaggaccgtgactactacctggagcgccgttatccggccttcggtaacctcgtgccgcgcgacgtggcgtcgcgtgccgccaaagagcgttgtgacgcgggcttcggcgtgaacgaaacggggttggccgtgttcctcgatttcaagaccgcgatcgagcgtctgggcaaggatgtcatcaaacaacgttacggcaacctgttcgacatgtacgaggagatcaccgacgtaaatccctacgaacagccgatgcagatcttccctgccgtacactatacgatgggcggtatctgggtcgattacaacctgatgactacgatcccgggtctctacgccatcggtgaggccaacttctcggatcacggtgccaaccgcctgggtgcttcggcgctgatgcagggtctggcggacggttatttcgtgctgccttatacgatcggcgactacctgtcgcacaagatccaggctccgaaggtgaagaccgataccaaggccttcgacgaggcagagaagggtgtgaaggataagatttcgaagttgctttccatcaacggcaagcagtcggtggacgatattcacaagaagctgggacacatcatgtgggagaacgtcggcatggcgcgttcgaaggagtcgctcgagaaggcgatcgtcgagatccaggcgctgcgcaaggagttctggaaggatgtgaaggtcgtaggcaaggcgaacgagttcaacgtcgagttggagaaggcgctgcgtctggccgatttcctggagctgggcgagctgatggcacgcgacgcgctgaaccgcgaggagtcgtgcggcggacatttccgcgtcgagcatcagaccgaagagggcgaggccaaacgcgacgacgagcacttcgtatatgccgccgtgtgggagtacaagggcgagaacgaagcgccggagctcacgaaggagccgctgaacttcgagttcgtacaccccgcacagcgtaactacaaggactaattcttctgtcgtctaactttaatacacaatttgaaactatgaatttcacgttaaagatatggcgccagaaagacgccaaggcaaaaggggcattcgaaacctacaaagtcgagaacatctccgccgacacctcgtttctcgagatgctggatattctgaacaacaacctgatccacgagggcaaggagcccgtggcgttcgaccacgactgccgcgagggtatctgcggtatgtgctcgctgcacatcgacggccgtgcgcacggcccgggcgacggcgccacgacctgccagatttacatgcgccgtttcaaagacggggcgacgatcgtcatcgagccctggcgttcggcggctttccccgtaatcaaggacctcgtggtggatcgcagtgcctacgataagattcttcaggccggcggcttcatctcggtccgtacgaatgccgtgcaggatgccaacaacattcccatcccgaaggccgatgccgacgttgcgatggatgccgctgcctgcatcggttgcggtgcctgcgctgcgacctgtaagaacggctcggcgatgcttttcgtcgccgcccgtgtgtcgtcgctcgcgaaactgccgcagggacgtgtcgagggtgcccgccgcgccaaggcgatggtggccaagatggacgaactgggcttcggtaactgtaccaatacgggagcttgccaggccgagtgtccgaagatgatttcgatttcgcacatcgcccgtctgaaccgggagttcctctcggcgaagttcgaggactaatcgtttgaagaatagatgcaaacaagcccggagcgaaactccgggcttgtttgcgtatggcgggatccgaaactcgccgaaattgcggggctgcggctgatttacgctgttcgcctttccggtcgttgcagcaaggaggcccgccgggagattgccggctggcgattcggccggattcgaggtcggggttgaaaatatggggcataacgacctttatgccccattccgaaccggtcgttgtcgccgccggagccgagaatctgttttccttcctacttttttatgtagctcttcaacgcttcgacgtactcctcgaaagcatccacgcctgtcggggtaatgcggcagagcgtgcggggcatttttccccgaaaggtcttttcgaccgtgatgtagccggctttttgcagtttgtcgatctgtacgctcaggttgcccgccgaagctcccgtctgttcccggatgaaaacgaagtcggcctcttcgaccccgaggaggatcgacattaccgccaggcgcagttccgagtgcagcaggggattcagttccttgaacatcttttgtgcgattggtagttgatgatatgtcccgggacgaccatcatgatgaaaaatacgccggcaaagataaggatttcgttgttcaggagtccggcggttatctcaattccgtcagaagttgcgatttttttcaggaaatagtcgtataaagggaagaggactgaaagagccatacaggtaagtcctgcgacgatgtatattttcgaacgaacgatcattccggttgttgccgttgccgtagccatcaccagtgtaatgagttcgaaaagactgtgtcggtaggagagtccgtgaaatagcgaaaagaggaagatcggaatcaatgataatgaggatactaaccagaccttgccgacgatgcggtcgatctccgtgcggggctccgtcggcttcttgtccgggaacaaccgcatcagcagacagccgatgatgggaatgagaaaccaggtgaagcaccaggcgggatggcatccggcgatgttgaaccagtaattgagcagggcgatcccgacggtcgtatagccccatacgaggaacgggcgtcccgcatggttttccagccggttgcgggtgttttgaatcatgcgcgagatgagttccatactctctcgtgcgtctaattttctctcttccatacgcagtgagttttgatgattatatattttagcatgccgcttttttctttgcagattcgggtatccgttcgttggcagccgtttttgactgtgtttacaaggcatccctcgccccgaatgatttcgggctgttgtccgaccgtatcggaaatcgagttttttcgtgcggtccgaccgtcggcggatcactccgcatcgtcatcgtccgagagttttgtcaggtggaatatcagatccagaataagaccgagcccccagcctgccatgacccacagcacccaccaatagtggggcgtcgtgagggcattgactccggccagaaatgcacaaattactgcgtatgttatccattcccggatgagccggcgctttctgcgtgcggctttcgcatcgatttttcgagttgtttccatagctttcggtttttgttggtattacaaatataaactactttattttataaaccaaataaaatgcctgaaaaattgaaattttacgatgattcggggcagggggcgttgaggatgaaatgtacggggtaggccgaaaggctttaccgagatctgttaaattatggtattatatgcgaccgttttttttgaattcggcggtagccgcaattttgcgggccgttattcgatgccgggttcaccctgaacttttttcttgggagggcgcgagaaacgtccgagcattgtcggtcagattcggatcggagggcagtatattgattgagatatatctttcgtggccctttattcgacggttgcagcgtcgaatccgaagggacgtttattcgcgggcttgtggccgcgtttataattcgccccttgcctgcatccttttcccggaggggatttggggtgctgtgctttcgaagaggtacattaaagtatataatcgcgccgcatactttatccgagcaggatcaggctgagggccatgatcgccatgccgctcatcacgccgtagatcgagatgtgggcttcgccgtattcgcgggcggccggcagcagttcgtcgattgagatgaaaaccatgattccggcgacgcctgccaggatgcagcccatcatgacgggagacatgaacggcatgaggataaaataggcgagcagggcgccgaccggctctgccaaacccgataggagcgaatagcggaaggctttcatccggtcgccggtggcgtaaaagacggggatcgaaaccgcgataccttcgggtatgttgtgtatggcaatggcgacggcgatggcgatacccagcgtgggattttcgacggcggtggcgaaggtggcgatgccttccgggaagttgtggatgccgatagccagggcggtcatcagtcccatgcgcatcagtttggcatttttcggtttcttctccagctcttcgatcatatgggcttcgtgcgggttctcgaccgaaggcaccagccggtcgatgacgccgatcagcagtacgccgccgaaaaaggccagggtcgtaatacccatcccggtttggggtccgtagatggctccgatagcctcccgtgcctgttggaacagttcgacgaacgaaacgtagatcatcacgccgcccgacagtcccaacgagaacgaaagcagtcgcttgttggtacggtgagcgaaaagggctattgtgctgccgataccggttgccaggccggcgccaagggtgagcatcaggggtacaaaaagagtgtgagccatctcgaatactgtttttcagttggtctttgcaaagatagtgcaagccgaaagctgtgtcaaatttatttggatgcaaccgaggcgccgcctgttttctgtaaagatcgtgcacgcggaagccgttcggttttgtcggaagcggccgggggctgcctatttgccgtaaagttagtgaattttatcctttctttgccggagaacatcgaataaggagtgtgcgttgtgtgaaaatcccgtcgtatggcgatcgattcactactttcggcaggagaagatcactattcccggcgagtcgcgtgttttcccgatccggtctttttttgcggcgcttgaaaatatcgagcgcagtgcacgatgaaattattcttgaagaaattttatttaatttgttgataagtagtgttatatgtatttttagggtggaagtggacgatatttttcggaaaagatggtgcgaatggtgtaataattgttacctttacccaataaacaaggcaggttcattctgatctttatcttctttgcattttcccggacctatatcccgtccggatttttccatcgttgaaatcgacctttgtaaactttctttgtttaggcaatttcgcttgagtatgtctgtcgcaggcagaagagagccgttgccgggttttaacgatgtcccgaaattgagattatttttttacttgcatacgcccgttctgaccgccctttttcagcgtggttcgggcagattgcgctgtcggggaacaaggtgtgcgtgactgcggtttcgaccgggaacaggaaacttcctcgcttccgtttttccgcttccgcaccggatgcctccgcgacagatgaaaactccgtcgtacgacggaattatacgatgattatgacatttaacgaattgaaaattaccgaccctattttgaaggcgatcggtgaaaaaggatacctggctcctacgcccattcaacaaaagggtattcccgtggcgctcgatgggcgcgatatgctgggcatcgcccagaccgggacgggtaagacggcggcgttcgccattccgatcctgcagcatttgagcagtgggatgcaggcagagccgaccgacgtgccgcgccgcaaccggcgggggcggaatcatggtcgggaatacggagtgcggccgatccgggccctgatcctgacccctacccgggagttggccgtgcagatcggcgacagtttttcggattacggaaaatatgtcggtctgaagcatctgacgattttcggcggtgtgaaacaaggcccgcaggtcgaggcgcttcgtggcggcgtggatattctgatagctacgccggggcgtctgcacgatctgatcggacagaggttcgtcgaactcgacgcgattacgcatttcgtgctggacgaagccgaccggatgctcgacatgggattcgtcgccgacatcaaacgtctgctgccgctgctgccgaagtcgcgccagaccctctttttttcggcgacgatgcctgcggacatagtggcgctctcgaaaagtatgctgaccgaccccgtgcgggtggaggtgactccggttgcgtcggcggtggatgcgatcgatcagcgggtctatttcgtggagaagccggagaagaagaaactgctcgtatctctgctccgcgaggaggataagtccgttctcgtcttctcccgcaccaaacacggagcggacaatatttcgcgtctgctctccaagtcgggtattcgaagcgaggcgattcatggcaacaagtcgcagaatcaccgccagcgcgtactcacggatttcaagtccggcaagatccgggtgatggtcgctacggacatcgctgcccgtggcatcgacatccgggaactggagatcgtcatcaattacgatctgccggatgtgccggaaacgtacgtacaccgtatcggccgcaccggtcgtgccggacattccggaaccgcccttacgttctgcaccccggacgagcggccgcttatgaaagacatacagcggctgacgggcaaaaaactcaatgcggaaacataccgtgcataataatctttaagttgaatttaatggcaaaatcgcaaacattcggaaaaagagagaacgaaaagaaaaagcaggccaagcgcctcgaaaaacagaaacgcagggaagaacgtcaggccggaggaagctcttcgctcgacgatatgatcgcctatgtggacgagaacgggaatattaccgacactccgccccagctgcggccgaaagtcgagatccagctcgaggatatcgtgatagccacgcctaaaaaggaagatattgcggccgaaccgctgaaagggcgtgtcgagtatttcaataccgagaaggggtacgggtttatcaaggacctggcttcgacggaaaaatattttttccatatatcttcggctcccgaagggatcggcgaggggcggatcgtccttttcgaactcatgcggggtacacgcggtatgaatgcggtgaaaatcgcatttgcgcaataaacatttatccacagtcaaaatagaaaaaaatgaacatttacgtatcgaatttgaacttccgcacccggggcgagagtttgcagactttattcggggagtacggagaagtatcttccgccaacatcatcaccgaccgcgaaaccggccgctcgcgcggcttcggtttcgtcgaaatgccggacgagtcggccgcacggaacgcgattaacgcgttgaacggtttcgagctcgacgagcgggctatcaacgtcaatgaggcccgtccgaagaccgagcgcagcgaccggggtggttacggctccaatcagggcggcagttacgggcgcaaccggtattgattcagatcggccggaaagagcggggaggagcgttgaacgcccctccccgctcttcgataaggccgtgctttttccggcgggggatggggcggaggtttccggaggaacgctcgatggccgtccggtcgggtggacgggcgtcggagcgcggaccgaaacttctgccggggcgtatcgttctgtcgttgcaggatgccggcgaaattttttggccgggttgtcttgccgaaaccgtaaattatgcttacctttgcccctgataacaccggaacccgatcaagccaatgtttagtttcataccgaacgcatttcaggaggcccagtacgtacggcgccgtcatttccggggtaatcattcggaaaatatttccaatttttattataatttttccaagttattagggtagctgtccaagttgccctatttttttgtgcacccgctgcggcgaggtgcgaaacggtacagcaaaatgaagacgattctcaaaggtgcgaagttctatcgggacggaaggttcgaaacgggcgatctggcgatcgaagacggtaaaatcgttgccataggcggtcgggtcgcgcttgaggcggacgaccgggcagtcgatttgacgggttgtcatgtattgccgggattggtcgatgtgcatgtccacctgcgcgaaccgggtttttcggagaaagagaccattgcgacgggtacggctgccgccgcgcacggaggttataccaccgtttgtccgatgccgaatctcaatccggctcccgattcgccggagcatctggaagcggagctggctctgatccgccgcgatgcggtcgttcgggtgctgccttacggttccattacgcggggacagaagggacgcggggagctggtcgatttcggggctctggccggagaggtcgtgggcttctcggacgacggacggggggtgcagggggaggagctgatggccgaagccatgcgtcgcgccgcagcggtcggcaagccgatcgtggcccattgcgaagtcgatgaattgctgaaaggagggtatatccacgacggtgtttattgccgcgagcacgggcacaagggtatttgctccgagagcgagtggcggcaggtggagcgcgatataaaattggcagccgaaaccggatgtcagtatcatgtctgccacgtttcgaccaaggagagcgtcgagctgattcgccgggcgaaggccgccgggttgaaagtcagcggcgaaacggctccgcactacctgctgctctgcgacgaggatttgcaggaggacggtcgtttcaagatgaatccgccgctgcggggacgtgaagaccgcgaagccctgcggcaggccgtcgccgacgggacgatcgaggtgatcgccacggatcatgcgcctcacaccgccgaacagaaatcgcgcggattggccggcagcgcgatgggtatcgtggggttggagtgtgctttcccgctgctctatacctatttggtgaagccggggctgcttacgctggagcagctcgtcgagcggatgtcgatggctccgcgccggattttcggcctcggcggaggcttgcaggcgggcgaaccggctgatttaacggtgttcgacctcgatgcggagtacgagatcgatcccgaaaccttcctgtcgaaaggccgcgctacgccttttgccggctggcgggttgcgggccgtacgctctggacgctggtcggaggacgtacggcatacgcgacggagcgtttccgatagacggggcgggagcgatgtgcgcggattgtcccggatcggaatacgaaatgcgattccgtttttcgacgggcggtgactgcggtcgtcgcggattctgccggatgcgggaaacagggccggaaattgaaaaatgaacgaagacaaattacgaaataaccgaatatgaaaccattcaccaaaaaaatcgtgcttgagtcgggccgcgagttctacggctacggtttcggcgcggaccgggaggcgacgggcgagatcgtgttcaatacctcgatggtcggctaccaggagattctctccgatccctcctataccgaccagatggtcgtgatgacctatccgctgatcggcaactacggcattacggacgaggattacgaaaccaagtatccgactatcggcggtatgatcgtgcgcgaatacaacgacctgccgagtaatttccgctataccaagacccttggcgaagtatgcgaggagtacggcataccctgcgtctgggggatcgatacccgtatgctgacgcgcattattcgtgacgagggtacccagcgggtgatcgtcgtcgatgcgtcgatgccgcaggaggaggccctgcgccgcctgaaggaggcgcccgtgcgccgcgacatggtcgagcgcgtgagctgccgcaagcgttggttctcccgcacggccaatcatcgtttcgacgtggtggcggtcgattgcggcatcaagcacaacatcatccgcaagctcaacgagaagggttgcaacgtgacggtagtgccctacgatattacggccgaggaggtgatggctttccgtcccgacggacttttcctctcgaacggtcccggcgatccgaccgacgtgcagccggtcatcgagatggtccgcacgcttcgggggcgcctgccgatcttcggtatctgcctgggacaccaggtgatttcgctggcttacggagcccgcaccttcaagatgaaattcggacatcgcggcggtaaccaccccgtgaagaacctcgaaacgggcaaggtcgagatcacgagccagaaccacagctttgcggtcgatacggagtcgctgaagggcaccggactgacccttacgcacctgaatctgctggacgataccgccgaaggcgtcgaatgccgcgccgatcggattttcagcgtccagtatcatccggagagtgcgcccggtccgcaggacagcacctatttgttcgataagtttatcaaaatgatggaggagagtcaaaatgcctaagagaacggatatcaagaaagtgatggtgatcggctccggcccgatcgtgatcggccaggctgcggagttcgactacgcgggtacgcaggcttgtctggccctcaaggaagaggggtacgaggtcgtgttggtcaattccaatccggcgacgatccagaccgacgtgcagattgccgataaagtctatatggagccgctgacgctcgagtacgtggccaagatcgtccgttacgagcgtcccgatgccatcgtgccgggactgggcgggcagacgggcctgaatctggccgtgcagctcgccaagaaaggcgtgcttcaggagtgtcaggtggagattctgggtacttcgttccagagcatcgagcaggccgaggaccgcgaactcttcaaggagctttgtcagtcgctgggcgagccggtgctgccgtcgctgattgctaacaatatcgacgaggcggtcgaggcggcgaagcggatcggttaccccgtcgtgttgcgtccggcctttacgctgggcggtacgggcggcggcttcgccgacgacgagacgcagttgcgcgagatgatgcgcaatgcgctttccctctccccggtgcatcaggtgctgatcgagaagagcatcaaggggtataaggagatcgaatacgaggtgatccgcgaccacaacgatacggccattgcgatctgcaatatggaaaacatcgatccggtcggcgtccatacgggcgactcgatcgtggtggctccgagccagacgctgaccaacaaggagtatcagttgctgcgcgacagcgccctgcggctgatccgtgccctgaagatcgaaggcggctgcaacgtgcagttcgcgctcgatcccctctcgttcaactactacctgatcgaggtcaatccccgcgtgtcgcggtcgtcggctctggcgtcgaaggccagcggctatccgatcgcccgcgtcagcgccaagatcgccgtgggccttacgctcgacgagatccgcatcgccaatacgccggccagcttcgaaccggctctcgactatgtggttaccaagatcgcccgcttcccgttcgacaagttcagcgacgcttcgaaccagctcggaacccagatgaaggcgacgggcgaggtgatgtccgtgggccgcacgatggaggagagcctcctgaaggcggtgcgctcgctcgaaacgggggtctgccatatctaccataagaaattcgacgactggacggtcgatcggatgctctcctatatcaaggagggaacggacgaccgtctttacgccatcgccgagctgatccgccggggcgtcgagctggcgctgatctacaacagcaccaaaatcgacatgttcttcctcgagaagtttaagaacatcgtcgagttcgaaaaggtcgtagcggccaatccccgcgacatcgaaacgttgcgcgacgccaaacgcatgggttttagcgacaagttcatcggtcagttgtggggcatgagccagaaggagatgttcctgctgcggcgcgagcacaatattttcccggtttataagatgatcgatacctgcgcgagcgagttctcctcctatgtgccgtatttctattccacttacgagcaggagaacgagtcgatcgtgagcgaacgcgagaagatcgtggtgctcgggtcgggaccgatccgcatcgggcagggcgtcgagttcgactattcgaccgtgcatgccatctggtcgatccgcgccgccgggtacgaggcgatcatcatcaataacaatcccgaaaccgtttcgacggactataccaccagcgacaagctctatttcgagccgctgaccgtagaggacgtgatgaacgttattacgctcgaaaaaccgaaagggatcgtcgtgtcgctcggcggccagacggcgatcaacctcgctgagccgctgcacgaactgggtgtgccgatcatcggtacgggtgtcgaggcgatacggaatgccgaagaccggggttgtttcgagaagatcatggaggagttgggaataccccagcctgaggccgaggccgtgaccgatatcgaagccggtgtgcgagccgccgaacggatcggctacccggtgctggtgcgcccgagctacgtgctgggcggccgggccatgcagatcgtttcgaacgaggagcgtttgcgccactatctccagacggcggtcgaagtcaatgaggacagccctgtgctggtcgatcgttatattatgggccgcgaactggaggtggacgccatctgtgatggcaaggatgtcttcattcccggtatcatggagcacgtcgagaagacgggcatccactccggcgactcgatcagcgtctatccgaccttcagcgtgagccagaaagccaaggacaagatcatcgattataccgtgcggctgggccgccggatcggtatcgtcggtctgtataatatccaatttatcctcgacggggaagaggacgtatatgtgatcgaggtgaatccccgttcgtcgcgcaccgtgccgttcctttcgaaagcgacgggtgtcccgatggctgacatcgccacacgggtcatcctgggtcattcgcttcgggagcagggcattaccgaagtatatggcagggagcgctcccgctggttcgtcaaggccccggccttctcgttcgccaagatccggggcatggagtcctacctctcgcccgagatgaaatccacgggcgaggcgatcggatacgacaacaagctcacccgggcgctctacaaggcgctccagtcgtcgggtatgaccgtcgccaactacggtacgatcttcctcacgatcgccgacaaggacaagcaggatgcgctgccgctggtacggcgcttttatgacctgggtttcaatatcgaggcgacgaagggcacggcggaattcctgcgtcagcatggtattcgcacccgtacgcgccgcaagttgagcgaaggcagtacggagatcatcgactcgctgcgccagggccatgtgagctatgtcatcaatacgatcgacatcaaccagcacaacacccggctggatggttacgagattcgccgcacggccgtcgagaacaacgtgacgatcttcacggcgctcgaaacggtaaaggtcctgctggatgtattggaggagataaccctgggtgtttcgaccattgatgccgaatagttttcgatttcatgcggcaactgcgtcacatccctctttgatccgaatggaaaagacggatagtgttccccatccgcttcaaagtcacgatgcaccgcatttgtcggcctgaaatcaaaagcgagtttcgttcagagggcacctttcgcaccttctcgcagtccgcgacagtcccataccagcgagtatgctcttgccgtgtcctgcttcggtcggcgcgaaaccggctcctttgaaattgagacgaaagcgaagcacatagtttggaaaagaaaaatgtataaaaaaggcatatatactgttacggccaacgaaccgctgacgccctccgtctggcggatgacgctcgagggggatacgcaatacctgacccgtcccgggcagttcgtcaatatcgaggtcgaagggctctacctgcgccgtccgatttcggtgtgcgactacgacgagcggacgctgacactgatctataaggtcgtcggcgaaggcacggcccggttgagtgaaatgaaggcgggcgtcaagctcgacctgctgaccggcctggggaacggcttcgatccggatgcggagtgccgcaggcctctgttggtcggaggcggagtgggcgttccgcccctctacaacctggccaaaaaactgattgacaagggtagaaaagtgactgtggtgttgggattcaataccgcttcggaggttttctacgaggaggagtttcgggcgctcagtgcggaggtcttcgtaacgacagcggacggcacgcacgggacaaagggtttcgtaacgacggcgatcgctgaaaagaagccggattttgattatttttacgcctgcggcccgctgccgatgctgcgtgcattgagcgatgcgacgggcgacatcccgggcgaattgagtttcgaggagcgcatgggctgcggcttcggcggctgcatgggttgttcctgtcagacgaaaaacggggccaaacgtatctgtaaggaggggccggtgttgaaaaaggaggagattatatggtaaacgaatccaagaaaaacttcgatacgtcggtgacgctgagcggccttcggctggataatccggtcgtgccggccagcggtacgttcggctacggcaacgagtacaaggatttttacgacatcaacattctcgggtctttctccttcaaggggacgacgcgcgaggctcgcttcggcaaccccacgccccgcatcgccgagtgtacggcggggatgataaatgccgtcgggttgcagaatcctggcatcgatgcggtgatcggcgaagagctgccccggctgaagacattcttccgcaagccggtgatcgccaatatcagcggcttttcggtcgaggagtatgcctattgctgcgagcggatcgacaaggaggaacaggtcggtttgatcgaggtcaatgtaagctgtcccaacgtgcggcacggcggcatgagcttcggcacgtcgcccgaagcggcggccgaggtgacgcgtgccgtgaaagccgtgaccaccaaaccggtctatatcaaactcagtcctaacgtgacggacatcgtggcgatcgcccgggcgtgcgaggaggccggtgccgacggcatctgcctgatcaatacgatgctgggcatgcggatcgacgtgaaatgccgcaagccgatcatcgccaacgtaatgggcggattttccggtgcggcgatcttccctgtggccgtgcggatggtttatcaggtagcccgggcctgccggattccggtgatggggtgcggcggcgtggagacggcccacgacgttatcgaaatgatgatggccggggcgacggccgtgcaggtgggggccgccaacctgcggaacccttatgcctgcaaggagatcgtcgaggcactgccctgtgaaatggagcggctggggatcgaacggctgtccgatattatcggcatcgtgaagtaattttgtgaaaattataaataagagatatgaccaacagagacgtaatcatcgcctgcgatttcagcagcgccgaagagactttccggttcctcgatctgtttaagaacgaggcccgcaaacctttcctgaagatcggcatggagcttttctatgccgaagggcccgaaatcgtgcgtgagatcaagcgccgggggcaccggattttccttgatctgaaactgcacgacattcccaatacggtcaagaaggcgatggccgtgctttcgcgcctcgacgtggacatgtgcaacgtgcatgcggccggcacgatcgagatgatgcgtgcggcggtcgaagggctgacccgtcccgacggcacgcgcccgttactgatcgccgtgacgcagcttacttcgacttcggaggagcgtatgcagcgcgagctgctcatttcggcttcgatcaacgatacgatcgtcaagtatgcgcagaatacccgcgaagcgggactggacggcgtggtctgctcgccgctggaggccggtatggtgaaggcggcctgcggaaaggagttcctgaccgttacgcccggcgtgcgttttgcggacggagaggtggccgatcaggtgcgggtcacgactccggcgcgtgcgcgggaaatcggctcggactatatcgtggttgggcgtcccatcacggcggcagccgatcccgtggcggcctatcgccggtgcgtggaggagttcgtgaaatagagtgtgcgacggtagggagtatttcgggcggtacggaaggaagggctgctttgcggcccggatcgagcgatacggacgggattcgtgtcgtgcggcagttgtctaaaatgggtttgggagcgtggagttcgcggaacttcggtcggcacgggtgttgccggatcgtgcgaacggaatgcgcgccgaattgcggcgaccgaagaggccgattgccgcgacaggcaagaaataagttttactctaaatcaagaaagttatgaaaccggttacacttttctatcagccccggtgccccttctgcaagaaggcgctgggttatctggaggaactgcagcggcaggaaccgtacagccgcatcgaaatcaggatgatcgacgaactggccgaacccgaagtggccgaccgttacgactactattacgtaccgacattttacgtcggggacaagaaagtgcacgagggcggtattatgcccgacgaggtggaggccgtactccgtatggccctcgacgagcgataggcggaaagccgtttttgcggaaaaaggaatgacaatctaaagaatgtagaaatagttatggaaagagaaattgccaaaggcctgctctcgatcggtgcggtattcctgcgccccgagcagccgtttacctgggcgagcggtatcaaaagcccgatttattgcgacaaccggttgattctgaccgcccccgaggtgcggaagaaggtcgaggccgcgattgcggaaacggtgaaggcgaaattccccgcgtgcgaggtgctgatgggaacatcgacggcaggcatcgctcatgcggccatcgccgcgacgatcctcgacctgccgatgggatatgtccgcagcggctcgaaggatcacggtcggggaaaccagatcgagggcaaactcgaaaagggccagaaagtcgtggtaatcgaagacttgatttcgacggcgggatcgtgcatcgaagtggtcgaggtgttgcgtgcggccggtgccgaggtgctgggcgtagtgagcatctttacgtacggcatgaagaaaggactggatcggcttgccgcagccgacgtaatcaaccatagcctttcgaatctcgacgcgctggtcgaagtggcggccgaggaggggtatatcaagccggaggatcggcagcgcctgatcgccttccgcgacaatccttcggacgaaagctggatcaataaataaaccgctatgcgccatttaatcgaccctacggatctgtcggtcgccgagatcgggcagatcatcgccttggcggaggacatcatcgccaaccgggccaaatacagcgaagtctgcaagggcaaaaaacttgcgacgctcttctacgagccttcgacccgcacgcggctgagtttcacttcggccatgctggagctcggcggcagcgtcatcggcttttcggacgccgcttcgtcgtcggtgtcgaagggcgaaacggtcgccgatacggtacgggtgattcgttgcttcgccgacatcatcgccatgcgccatttcaaggagggggcgccgctggtcggttcgcagtatgccggtatcccggtcatcaatgccggggacggcagccacagccatccgacgcagacacttaccgacctgctgacgatcaagcgcgagaaggggcggctggatcacctgacgatcggcttctgcggcgatctgaaattcggccgcacggtgcattcgcttatcaaggcgatgtcgcgctacgaagggattcgggtggtgctgatcgcccccgacgagctgcggctgcccgagtatatgcttcatgagatcgaaacccagaccgaaggggtggaattccgcgaggtatcgacgatggaggaggtgatgcccgagttggacattctctatatgacccgcgtgcagaaggagcgtttcctcgacgaggaggagttcaaccgcgtgaaggacagcttcgtgctggatccgtcgaaactccgcacggccaagccggatatgatcgtgctgcatccgctgccccgcgtgaacgaaatcacgcgtgcggtggacaacgatccccgggtagcctatttccggcaggtcgagaacggcaaattcgtgcgtatggccttgatctatacattgttgaagtgggccgaaggcgagaagctcgccgcagtccccgacctggccgaggggatgttcatagaccggagtatgaaatgtcccaactcccggtgtatttcggctacggaggatgtcgatccgcttttcgtcaaagcgggagacacctgccgttgcgcttattgcgaggcgaaaatccggtagcggattttgtcgatacaatgtcgaaataaaactgtcgggattgttaggttgtcgttgaaattattcgtacttttgtgcaagtaaaagacgatgggccgcaggtccgtcggcggctacggcttccgaaacgatggaaaggattcagatgcaccatacccggcgaaagcgacagcagatgctgtcggctcgatgtgcggtcggagcgtgcagtgtcgttcctgcatcggattttatcgacggaactatgcaggagggcacgaatcggcttcccgcagcaatataatcttgccgctatgacgaattctgtcgtagcggctcttttttggttgatttagtacgtttcttactatgaaagttggagtaatcatgggttcgaccagcgactgggacgttatgtccgacgctgcggcgacgctcgcgcaattcggtgtggagttcgagaagcgggtggtgagcgcccaccgcacccccgacctgctggtggagtatgccaaaacggccaagtcgcgcggactggaggtaatcatcgccggagccggaggcgctgcgcacctgcccggcatggtggccagtatgaccgcacttccggtgatcggtgtgccggtcaaatctcgagccctgaacgggctggattccttgctttcgatcgtgcagatgcccggcggcgtgccggttgcgaccgtagcgatcaacggggcgaagaatgcggccctgatcgccgtgtcgatcctggcgttgaaggacgaggcgctggcagcccgtctggagatgttccgtgcgaaacagactgaggatgtacttaaagcggaactttagaccgatgagtgcggtgaagacgatcggaattatcggtggcggccagttggggctgatgatcatcgagcaggcgcatctgctgggtgcgcggacgatctgcctcgatccggcggaggatgctccggcgtttaagatcagcgacgagcggatcgtgggccggttcgacgatccggcggcgctcgaagagctttgccgccgcagcgacgtggtgacctacgagttcgagaacgtgccgggcgatctgctggtggctctcgagcaaaaatacaatatcaaacaagggttcaggcctctgttcgactcgcaggatcgcctgcgggagaagagcaatgcctgcgatcatggattgaagacgcccgctttcatggctgtcgatgacgaggagtcgctgcatcgggccattgcgcgaatcggttatccgtgcgtgctcaagacccgtacgctgggctacgacggacacggtcaggcggtgcttcgcggcgaggccgaccttgcgaaagcccgcgaactgctcgcggtgccctgcattctggaggagttcgtcccgttcgatttcgaggccagcgtggtgctggtgtcggacggagagcgcgtgatctgcttcccggtagggcggaatatccacaaggacggtattctggatctgtgcatcgtgccggcggagatgccggaccaggtgcgggagcggatggtgtcccagagcaagcgtttcatgcgcgactgcggttaccgggggattctggctatcgaatatttcgtgaagggagacgaggtctatttcaacgaaatggcgccgcgcccgcacaacagcggacactggaccatcgagggttcgacgaccaatcagttccgggagctgtgccgttacctgctcgatatgcccctcgaagagccgcagctgaaggcccctaccgtgatgaaaaacatcctgggacaggatctggagcgggccgaggcgcttgcccgggagaatcgccccggtgtgtatgtccatatttacggcaagaccgtttccaagcccaagcgcaagatgggacacgtgactttcgtcggtgtgaccggcgaggagtatgccgccaagtgggccgacagatttgtgaaataaagtcaaaaataagataatgaagagttaccgtattttcgttgagaaataccccgaattccgggtcgaggccgagagcctgctccgcgacctgaatgccaacctgaatctttcgctcgacggcctgcggctgctgaacgtgtacgacctgttcggtttttcggacgaattgctggagaagagccgttacagggtcttcggcgaggtggttaccgatgccgtgacggattcgtgcgatctgggcggcaacagctttctggctgtggagtgcctgcccggacagttcgaccagcgagcggcttcggccgtggactgcgtgcggttgatcgatccttcggccgaggtgaagatcaagagttcgaagctgctgatcttcccttcgaaacttcccaaggagacgatggagcgtattcgtcgctattatatcaatgccgtggagtcgcgcgagaaggatttgcgggtcctggacgatttggaaagcgcccccgtgaaaccggtgccggtattggacgggttccgggagatggaagatgcggaactcgatgcctactgcaagaagaacggtctggcgatgaatgccgacgacctgcgcgaagtggtcgaatatttccggagagagggtcgcgatccgttcgaaaccgagctgcggattctcgatacgtactggagcgaccattgccgtcatacgaccttcacgaccgagctggagaacattacggtcgaggagtcgttcgtgaaagacgagatcgaaggcacgctggcgctttacctgaaaatccgccgcgaactggggcgcgagggcaagagcatctgcctgatggacctggcgacgatcggtgcccgttacctgcgcagcaagggactgctcgacgacctggaggtgagcgaggagaacaacgcatgcagcgttttcgtcgatgtggacgtcgatgaccggaccgagaaatggctcctgcaattcaagaacgaaacccataaccacccgaccgagatcgaacctttcggcggagcttcgacctgcctgggcggtgccatccgcgatccgttgtcgggtcgcagctacgtctatcaggcgatgcgtgtgacgggtgcgggaaatatctatcaacccgtaagcgaaacgctgcccggcaaattgccccagcgcgtcatcagcctcaaggccgctgccggttattcgagctacggcaatcagatcggactggccacgacccacgtccgcgaggtgtatcatcccgactatgtggccaaacgcctggaggtcggtgccgtggtcggtgccgtgaaagccgaaaacgtgcgccgggagtcccccgtgccgggcgatgtggtcctgctgctcggcggccgcacgggccgcgacggtgtcggcggtgcgacgggttcgtcgaaagagcataccgacaagtcgctcgaaatgtgcggcagtgaggtgcagaagggcaacgcccccgaagagcgcaagctggagcggttgttccgccgtccggaagtgacgcgcctgatcaagaagtcgaacgacttcggtgcgggcggtgtgagcgtagccatcggcgagctgaccgacggcctggatatttacctcgatcgcgtgccgaccaagtacagcggtctgaatgcgacggagctggcgatcagcgagtcgcaggagcgtatggccgttgtgatcgaagcgagtgccgaagaggagttcaagcgctactgcgccgaggagaatatcgaagtgacccatgtggcggacgtgacggactcgcgccgtatgcggatgtacaacaagggcaaattagtggtcgatctttcgcgcgagttcatcgacagcgcaggggccaagcactatgcccaggccgcgatcggtgcggtcgaggaacgcgatcctttccgccgcgaggtgaagggcggtacgctgcgcgaaaagatgcttgcgaacctggcggacgacaatgtcctctcgcagaaggggctgatcgagatgttcgattctacgatcggcgcttcgaccgtgctgctgcctttcggcggtcgtacgcaacgttcggaaacacaagtgtcggtgcagaagttgccgacggacggatataccgatacggccagcattatggccttcggctacaaccctttcctggcgtcgtggagtccctaccacggtgcggcctatgccgtcgtggacgctgcggccaaagtcgtggcggcgggtgcccgctacgataagatgcgctattcctatcaggagtatttcgagcgcatgaccaagtcgccccgtacgtggggcaagccgctcggggcgctgctcggtgccctgaagatgcaggtcgagctgggactgccctcgatcggcggcaaggactcgatgagcggtaccttcgagcagatcaacgtcccgcctatgctgatggccttcggtattacgactgtcgatgccggacgcgtcatctcgaccgatttcaagaaggcgggccattcgatttacctagtgcgtcataccccgctcgaaaaccatatgcccgataccggggcgttgaagcggaatttcgatttcgtaagttcggctatcgagtccggcaagatcgtttcgggctatgccgtcggcttcggcggtgtggcggaagcgctggccaagatgtctttcggcaacggcatcggtgccgatgtcgaggtggatgaagcgacgttgttcgacaactcttacggttcgatcgtggtggagagcaccgagccgctcgatttcccggccgccgagttgctgggacataccgaggcggaggaatcgctcacgatcaacggcgaaaaaatgccgctcgaagagctttaccgggccaataccgaacgctttgcgacggtttatcccgataagggaatcaaccatgcgccggtcatggaggcgatgccggctctccgcagcttcacctatccgggcgaggcggtcgagcgtccggtggttttcatccccgtattcccgggcagcaactgcgactacgacaccgcgaaggccttccgccgggcgggtgccgaagtgcgcagcgaggtgttctgcaacctgacggcggaggctattttcgactcgatccgccggatgaaggaggcgatcgctgcgtgccatatcttcgtgctctgcggcggcttctcggcgggcgacgagccggacggcagcggtaaattcattgccaatgtgctgaacaacaaggatatttcggaggaaatacatcgtctgctcgaccggggcggcctgattctgggcatctgcaacggcttccaggcgctggtcaagtcgggcctgctgccctacggacggctgggcctggtgaccaaagagtcgccgacgctcttccgcaacgacatcaaccgtcatgtgtcgcagattgtttcgacccgcgtggcgacgaccaactccccgtggctgtcgagtttctcggtgggcgatatccattcgatcgccgtgagccacggcgagggcaagttcgtcgtgaacgagcctctggcccgcgagctgttcgagaacgggcaggtggcgttccagtatgtcgatgccgaaggccgcgtgacggccgaagccccgtacaatcccaacggatcgtattatgcgatcgagggtatcgtgagccgcgacgggcagatactcggtaagatgggccatacggagcgttacggggagaacctctttaagaacatcgccggagagaaggtgcaggacatcttcacgaatgcggtgaactatttccggaaaacaaaataacaattataaaataccaaccactatgcaacaaggcgaaatgctttacgagggtaaggccaaacaggttttcctgacggacgatccggatatgatcctgattcactacaaggatgcggcgacggcgttcaacaacatcaaaaaggccacgattgagaacaagggcgtgctgaacaaccggatctcgaccctgatcttcgaatatctcaacaagcaggggatcaagactcactacgtgaagaccctgaacgaccgcgaccagttgtgccgccgtgtgcggatcattccgctggaggtgatcgtccgcaacgtcatcgccggctcgatggcccagcgtctgggtatcgaggagggaacgaagccttcgaacgtgattttcgacatctgttacaagaacgacgagctgggcgatccgctgatcaacgatcatcatgcggtggcgctgggtgtcgtaacctatgacgagttgaaacagatttatgccatgaccgcccggatcaacgaggtgctcaaggagcttttcgccaagatgaatatcaacctgatcgacttcaagatcgagttcggccgcacgtcggacggcgagatcgttctggcggacgaggtgtcgcccgatacctgccggctgtgggatatggctaccaacgagaagctcgacaaggatcgcttccgtcgtgacttgggtaaggtgcgcgaggcttacgaggagatcctggcccgtctggaaaaagtaatcaaataagttccgatgcacaaagagagcataatgcagccgatctgcgaccgggagctgcacgaggagtgcggcgttttcggcgtcgtgggagtgcccgacgcagctaacctgacctactacggccttcattccctgcaacatcgcgggcaggaagggtgcggtatcgtaagcgtttcgaaggaaggggcgatgcggcgtgttcggggcgaaggacttgttacggaggtgttcaacgaagccaagctggcaaaccttgcgggcgatatggccatcggtcatgtccgttattcgacggccggtggcggcgggacggagaatatacagccttttctgttccatcataacacgggtgatttcgcattggcccacaacgggaatatcgtcaatgcggatctgctgcgcaactacctggagaacaagggcagtcttttccagtccacttcggacagcgaagtgttcgcccatcttatcaaaaaggaggtacgcaaccacaaccggccccgtatctattcgatcatcgaggcgctcaatatgctcgaaggagcgttcgcgtttctggtgatgacggctaaccgcatctatgcctgccgtgacaaacacggtctgcggcccctttcgatcggcaagttgggagacggctatgtcgtcagcagcgaaacctgtgctttcgaggtggtgggtgccgaattcgtgcgtgacgtagagcccggcgagatcgttacgatcgatcggcacggcatccgcagcagcgactattcgatgttcaagcgccatatgatgtgtgcgatggagtatatctatttcgcccgcccggacagcgacatcgagggccgtaacgtgcacgccttccgcaaggagtcgggacgcttgctctacaaggaggcgccggcagacgcggacatcgtggtcggagtgcccgattcgagtttgagcgctgccatgggatacgccgaagcgagcggtcttccctacgagatgggacttatcaagaacaaatacatcggccgcaccttcatccagccgtcgcagtcgatgcgtgagaagggcgtgcggatgaaactttcgtcggtgagcggtatcgtttcggggcagcgtgtggtgctgattgacgattcgatcgtgcgcggtaccacctcccggcgcattgtgcgtctgttgcgtgaggcgggggccacggaagttcatgtccgcatcgccagccctccgttcaagaatccctgtttttacggtgttgatacttcgacgtacgaggagctgctgtgcgcccgcatgtcggttccggaggcgtgcgagtatatcggagccgattcgctggcttacctctcgcccgatgccttgctgaaggcgggcaatcgctgcgagttgtgcatggcctgcttcacgggcaattatccgacgtcgctttacgggacgatcgaggaggcgaacaaaaaagaaaaatgttaaacaaaccgcttcgttttcgatctgcggtgtcagggaagaacctgtcctgcatgcgtatttcgaaaacatcgggtggaaatattcaggaaacagctaaaaccaactattgttatggcggaaagttatgaaaaggccggtgtgaacctcgaggccggatacgaagtggtgcgccgcatcaagaaacacgtggcttcgacctcgcggttgggcgtgatgggtaacatcggcgccttcggcggaatgttcgatctctcggcgcttaatgtcaaggagccggtgctcgtgagcggtaccgacggcgtgggaaccaagctcaagctggctttcgagatggataagcacgacacgatcggcatcgacgccgtggctatgtgcgtgaacgacgtgctggcgcagggggccgagccgctcttcttcctggattatgtagccgtggggcacaacgagcctgcgaagatcgaagcgatcgtggcgggtgtggccgaaggctgccgtcaggccggctgtgcactcatcggcggcgaaacggccgagatgccgggcatgtatgccggcggcgagtacgatattgcgggcttcacgtgcggcgtggtcgagaagtcgcgcctgatcgacggtacgaaggtgcgtgtgggcgacgtgttggtgggtatcgcgtcgagcggtgtccattcgaacggtttcagccttgtgcgtaaggtggttgccgatgcaggactggatcttcgcaaggcttatcccgaattggacggccgtgtgttgggcgaggtgctcctgacgccgaccaaaatttacgtgaaacaggtgctcgaagtgatccgagcctgtaacgtgcacggcatcagtcatatcacgggcggcggtttcgacgagaatattccccgcatcctgagcgagggccagggtatcgagattcacgaggggacgtgggagatcctgcccgtgttccgcctgttggagaaatacggcaagatcgctcaccgcgagatgttcaatatcttcaacatgggtatcggtatggtgatcgcggtttcgcaggatgaggcttccgaagtgattgccattttggagaaacagggcgagaaagcttcggtgatcggccgggcgacggatcgtccgggcgtggaaatccgatagggcgatgaagacgatcgcagtattcgccagcggaaacggctccaacttcgaagcattggctgcggcttgtgccgatgggcgcattgcggcccgcatcgccctcatggtctgcgacaagccgggggctttcgtgaacgagcgggctgcccgttacggtattccgacttttacgttcaaccccaaagagtacccttcgaaagccgactacgaacgggagatcgtccgcaggcttcgggccgaaagggtcgagctgatctgtctggcggggtatatgcgcatcctttccgatgtggtgctggaggcgtaccgcgaccggatcgtcaatattcatccctcgctgttgcctgcgttcaagggggcgcatgccattgccgatgcctttgcttacggcgtcaaggtcttcggcgtgacgatccactatgtgaacggagagctcgacgggggccggatcatcgcccagcgggctttcgagtatctggggagcgatccggaagagctggaagcccgggtgcatgccgtcgaacatccgctgtatgtggaaacggtggcaaagttggttgcggagcaataggatcgcgggaacgtcgcggtttagtgcggattcggacctggaaacacatcgtcggataccgtgaataacggcgaccgcgagtcgaaaacgataaaactacgtatatattaacgcgatcatatcctttagtgtacctctttggaaatgcagcgacccgagtccctttcgagaaaggattaggggaaggcggagtggtaaatgcggtcattggaccgcgaataagcgactctcggattcggtgttgagatcgtcggaaatggtatattgaaagatatgattgcctatataaattagcaatatgagagcattaatcagtgtgagcgataagaccggcgtggtggagttcgcgcgcggacttcgagagctcggctggcaggtgatcgccaccggcggtacgatgaaactgttggctgaaagcggcgtggaggtgatcaacatcagcgatgtgacggggttcccggagatctgcgacggacgtgtcaagacgctccatcccaaggtgcacggcggcctgctggctcgccgcgacgatccgaaccacctgaaagcgttgcgggagaacggcatcgagttcatcgacatggtgtgtgtgaatctctatcccttccgtcagacgatcgcccgcgaaggggtgacgatggacgaggcgatcgagaatatcgacatcggcggaccttcgatgttgcgcagtgcggccaagaactacaaggacgtgaccgtagtgtgcgacccggcggattatgacacgatccttgcggagatcagaggatacggcaatacgactccccgattgcggttgcagctctcggccaaggcatatacccataccgccgagtacgatgcgatgatcgctacgtacatgcgtgaaaaagcggggctcgacgagaagttgttcctggagttcgatctggttcagtcgctccgctacggagagaatccgcaccagcaggccaagttctaccgcagcggcgaacgggtgccctattcgctggcctatgcccggcaacttaatggcaaggagatgtcctacaataacatacaggatgccaacgcagcccttgcgatcgtgcgggagttcgatgagccgttctgcgtgggactcaaacatatgaatccctgcggtgctgcggtggggcgggatgcggcggatgcctggacgaaggcttacgaggccgacaaggtgtcgattttcggcggtatcgtcgccctgaaccgacctgtgacccgtgaggcggccgaattgatgaagccgatttttctggagatcatcatggccccttcgtttacgcccgaagccctcgaagtgctctcgacgaagaagaatctgcgtctgctcgaagttccgatggagaagagcgatgcgaagcagcgccagttggtgagtgtgacgggaggattgctggtgcaggacctcgacctcgaaacacgtcccgtgacggcggatatgtgcgtgacggagaagcggccgacggaaaggcagctcgccgatctcgatttcggctggcgtattgtcaagcatgtgaagtcgaacgctatcgtagtggtgaaggacggtcgtacgctgggtgtcggagcgggtcagatgaatcgcatcggctcggcggaactcgcgctcaagcaggcccatgcccagggtgtgaccgaagggctggtactggcttcggacggctttttccccttcgacgactgcgtgagcctggcggctgcgagcggcgtcgaggcgatcgtgcagccgggaggcagcgtccgggacgaggattcgatccggaaggccaatgaatcgggtattccgatgttgtttaccgggatgcgtcatttcaaacattaaactgcggatttcgtgtccgtcggtcggattattttttatggacgatttccgagccgctctttgcggaaagtgcggtcgggaataaacgataggttatgaaagttttagtcgtaggcggcggtggccgcgaacatgccgtcgtcgatgcgttgtcgcgttcgccgcaggtttcgaagatatattgcgctcccggcaatgcgggtatcgctcgtcaggccgagtgtgtgccggtcaaggataccgatgtcgagggattgctttcccttgctcgtgaaaaagagatcgacctcacggtggtagggcccgaagcggcgctcgtggccggtatcgtcgatcgcttccgtgaggagggacttcgtattttcggcccgacgaaggcggcggcccgcatcgagtcgagcaaggagtttgcaaaagatctgatggggcggtacggtattccgacggccggttaccgggcgttcgacgattaccggaaggcttcggagtacgttcgttcgcgccctctgcccgccgtcctgaaatacgatggtctggctgcgggaaagggtgtcgttatcgcccggacgatggaggaggccgatgccgcgttgcgcgacatgttgctggacgacaagttcggcaagggacgtgtggtcgtggaggattttctgaccggacccgaattttcgttcatgtgtttcgtgtcggggcgcaaggtgctgccgatggtgctggcgcaggatcacaaacgggcgttcgacggcgatgaaggtcccaatacgggcggtatgggagcatactccccgctgccgttcattactccggaagacgaggctttcgcattggaaaaggtgatgcagcgcacggccgacgctctctgcgacgagggatgtcctttcacgggcgtgctttacggcggtttgatgaagaccccgcagggaatccgcgtgatcgagttcaacgcccgtttcggcgatcccgaaaccgaagtggtgctgccccgcctgaagagcgacatttacgatattttcagcgccgtagccgacggacgggatccgggcgaggccgagtggcacgactttgcgactctggggatcgtgctggcatcgaaaggatatcccggctcctatgagaaggggtatgaaattacgggaacggagcaggtggacggcgtagtgtaccatatgggcacggcgataaaagaggggcggctcgttacctcgggcggccgggtgatgatcgtcgtctgccggagtgccgacccggagcaggccaggtgccgggcgctcgaggaggtccggaaaatcggttgcgagaatcttttctatcgatccgatatcggtatgaaggctctttcgtttttagtgaaaaaatagttatatttgtccttcgaatccctggatgggacggataagcaatctttaaaatcaaaacagtatatggtaatcagcggaaaagaattagcggcggcttgcaaggccaagatggccgagcaggtgaagacattcccggagaaatacggccggctgccccatttggtagtggtgctggtcggtgaggatgcgggcagcgtatcctatgtgacgggtaagacgaaggctgccgacgaggtcggtatcctgaatacgacgattcgcaagccggcggacatttcggaggaggagttgctgaaaattatcgacgacctcaatgccgacgatacggtggacggaattttgatccagctgccgctgccgaaacatatcgattcggataaggtgatcgcacggattcgtcaagagaaggatgtggatggcttccaccccctcaatgtggcggctctctggcagaaacagccctgcgtgctgccctgtacgccgaagggtatcatgaagctcctgaaggattcgggcgtggagctggccggacgcaaagccgttgtgatcggccgcagtacgatcgtggggcttcccgttgccaagctgttgctcgatgagaatgctacggtgaccattactcacagccggacgaagaacctggcggatgtgacacgcgaagcggagattcttgtcgtggcgatcggccgtccgaagttcgttacggcggacatggtgggcgacggtgccgtggtgatcgacgtgggtgtcaatcgagatcccgaaacggggaaattgtgcggcgacgtcgatttcgaggcttgcgagccgaaggcttcgctgattacgaaagtgcccggcggggtaggtccgatgacgatcgcctgtctgatcgagaatacgatcgaggcattcctcaaaaaagttgcgaaatagattccgggtatctgtgcaatcgtgccgaatgaggacggattgccttgatgcggattatatctcgatatcaggagcagacgcaaggtttttccttgcgtctgcttttttatttgtttcacaagggccgaactgcctgttttttgtgaatatgtgggaggggagaggtccgggcggtcgggtttcagcggatttcgcaccggccataaaaaataagggaggattcattgcgaatcttcccttattttgaagagcaagtttccggacttactttttcatcgtcttcagtttctctgtcaggatcggaacgaccttgtgcacgtcgcatacgatacccacgtcggcgacgttgaagatcggagcgaatttatccttgttcacggcgatgatgaagtccgactcctccataccggccaggtgctggatcgcacccgagatacccatggcgaagtagagatccggacgaaccgttttaccggtctgtccgacctgtcgctcgtgtgcgagaatacctgcatcgaccatcgcacgcgaagccgatacttcggcaccgagcacgtcggcaagctcgcgcagggtctggaacccttctgccgtgccgacaccgcggccgcccgaaacgagtactttggcttccgtaatgtcgatcatattcttctgttccttgaccgtttccagaatccgtacgcggaactttgatttgtcgaaattgatttttacgtcctcgacctttcctttgcgggtcggatcggccgctttggcacgcatcacaccggggcgtaccgtggacatctggggacgatgttccttgcagatgatcgttgccatcaggttaccgccgaaggcaggacgcgtcatcagcaggtcgccgtcttccgaaatgtcgagtccggtacagtcggcggtaagtcccgtgccgatgcgtgccgaaagacgcggaccgaggtcgcggccgatgctggtggcaccgatcagcagaatgctgggcttgcgctcgtggattacctgggtgatggcctgtgcgtaaggctcggtggtgtattgggcgagttcgtcggcttcgatcgaaaggaccacgtcggctccggctgcgatcagctcgtcggccttgtctttgactcctttgccgagcagcagggcgattacctgctcatggagtgcgtcggccagttcgcgggcttttcccagaagttcgagagcgacgttctgaacgactccgtcacgctgttcgacgaacacgtaaacgtttttatattgagatttatccatcttggtaagtaactgtgttttttgtgaacgttttcggcgggctggaccgaaaggattcggcttttgccgggtgcagaaaacgactgttgtaaatgaacgatcggtaatttacagcttcgcagttgccggggccgatcagattatgaatttttcttgcaacttctcgacgatcagatcggctgcttcggccggctccagctcgaagaccttacctgcggatttcgcacccttcgtgaaggatttgaagacgcgggtcggcgaaccgttgaggccgagtttcgactcttcgacggagatgttgtcgaaaccccagacttccacctgcttgtcgtatgcctccacgatgccgcgtaccgacatataacggggccggttggccgaagagagtacggttaccacgcacggggtttccacctcgagcaactgatacccctcttccgtccatttcttgacgacgagccggtttcctccttcgtatttaatgccttcgaggtaggtcacctgcggcagaccgaggtgttcggcgatctgcgggcctacctgggccgtgtcgccgtcgatagcctgacgaccggtaattaccaggtcgaactccagcatgcggagagcaccggcgatagcgttcgaagtcgccagcgtatcggcaccggcgaatttgcggtcgctcagatgaatcgcacggtcggcacccattgcgaaggcttcgcgcaggatgtcgtcggcctgcggaggacccatcgtgataacggtgacgtgtgcgccgtactggtctttcagctccagagccatttcgagtccggccttgtcgtcggggttcatgatgctgggcacaccgtcgcggatcagcgttcccgtaacgggatcgaggcggatttccgtcgtatcgggaacctgttttatacaaactacaattttcattcgaatatctgttttttattgtttttactttatgtgtccttgcgaggggagtacgaccggcttcggggtttattccggaaccggatgcacggtcgcccgccgctatttcaacagtgccgacgaaatcaccatccgctgtacttcggaagtaccttcgtaaatctcggtgatcttggcatcgcgcatcatgcgctcaacggggtattcgcgcgtgtagccgtatccgccgtggaattgcacggccttggtcgtcacttccattgcggtttccgctgcaaagagcttggcccgggcggcatcgaccgagaatgggagcttctggtctttcttgaaggctgctgcacgtaccagcaggcgggcagcttcgattttggtatccaggtctgccagttggaactgggtgttctggaactgtccgatcgtccgtccgaactgtttgcgctccttgacgtatttcacggtttcgtccatcgccccctgcgcgatgccgagggcttgcgaagcgataccgacgcggccgccatcgagggtcttcatagcgatgctgaagcccttgccgaccttgccgagcagattctccttgggaacgatgcagttctcgaaaatcagctcgcaggtcgctgaaccgcggatacccatcttcttctctttcttgccgatcgagaaaccggggaagtcgcgctcgacaatgaatgccgagataccgcgcgtaccctgcgacttgtcggtcatcgccatcacgatataaacgtgtgcgtaagcggcgttggtgatgaagattttgttgccgttcaggatatagtggtcgcctgcatcgactgccgtggtctgctgtgccgcagcatccgtaccggcgttgggctccgtgaggccgaaagcgccgagccattcgcccgagcagagcttgggcaggtatttcattttctgttcttcggtaccgtgctcataaatcggagcggcgcagagcgacgtgtgtgccgatacgaccacgcccgtagtggcgcatacgcgcgacagctcttcgacggccatcgaataaaggatgttgttgccgcctgcaccgccgtagttgacggggaagggaataccgaagattcccagttttgccattttctctacggtttccacagggaaacgttcctcttcgtcgatttcggcagccagaggtttcacctcgttttcggcaaattcgcggatcatttgccggaacagctgctcggttttggtcaattcgaaattcattttataagtatggttttttaatgattttaaacagtcataccgccatctacgctcaaaacggcaccattgacgtaggccgcttcgtcggatgcgaggtagagataggcggcggcgatctcctcgggacgacccaggcgacctacgggaactttggcccgcatgccgtcgagtacattctcaggcatcttggcaaccatttcggtttcgatgaagcccggggctacggcattgaccgtgatacccttacgtcccagttcgcgggccatcgttttggtcataccgatcaggccggctttcgtggccacgtagttggtctggccgaagttgccgtaaagccctactaccgacgaggcattgacgatgcgtccgtagccggcttcgagcatgtagttcaacacggccttgcagcagtagaacgtgcccgaaagattgacgtcgatcacgttctgccactgttcgacggtcattttcttgagcgtgctgtcgttggtgatgccggcattgttgatcaggatgtcgatcttgccgaacttgtcggcgacgcgcttggccgcagcggttaccgcctcgaaatcgctcgtatcgaccttgtcgaaggtgatggcgagcccttcggctgcggcttttttctccatttccttaccgcgggcttcgttacgtgcccatacgactacctgtgcgccttcgcgtgcgaaacgcagtgccgttgcttcgccgataccggccgtgccgcccgtgacgatggcgactctgttctcaagtcttttcatggttatctctttttagatgaattctttgttgtgtttgagtttggcggtgcccgtgatgcactctttgccggcagcatcgagcagcaggcatttgatcgtaccgatgtgtttttcggtgtttacgtcgattacttcgaattcggccgtatatttctccccggcgaagacgggtgcacggaacgacatctcctgcgagagatagatggtgccctgtcccgggaagagcattccgaagaccttcgagaatacggaggccgaaaggaatccgtgcacgatgggacggccgaacggggttttggctgcgaattccggatcgaggtggatcgggtttttgtcgcccgtgatttcggcgaaagcgatcacgccttcctgcgtataggtcacttcgtgacggtatttatctcctgttttgatcatggcgggcctattttttcatgggtttaagatccttggacacgatcaggtgcgcttcggtagcggcctgaacctgttcgacggtgaattcgggattgatttccgtcagcacgatgccttccggggtaatctccatgacgcccatttcggttacgatcatgttcacggagcctttggccgtcagcggcagcgtacatttcttgaggattttgggtgcgcctttggccgtgtgttccatggccaggatcaccttgtcggcacccgtgagcaggtccatcgcaccgcccatgccgggggctttcttgcccgggatgatccagttggccaggtcgcctttttcatcgacctgcaaggctcccagtaccgaagcgttcacatgaccgccgcggatgatgccgaacgaggtggcgctgtcgaagcacgaggcgccctcgagggccgtgacgaatccgccgccggcattgataaattcggggtcttcctcgcccggtgcgggggtcgggcccataccgagcaggccgttttcgctctgcaggaagatttgaacgccttccggcaggtaatcggggacggccgtcggcagtccgataccgaggttcaccacgtcgccgtctttgagttccatcgccacgcgtttggcgatgatttctctgatctgttccttttccatagatttatgtcgtttttgtctgttcgtcgtactgtcttgaaacggggcggttctggaatccgggaccgtttcctatttgcggtgcattctgcgggccatctcctgggcgatgaacgacgccacgtcgtcggcgtaggtgttcatgccgaagccggcgtcatagcccagctctttggccagttcgtgcgagatgcgcgggccgccgcacgccagaatcactttgtcgcgcagcccttcggcttcgagcatttcgaccagctccgtgaggttcttgatatgaatgtccttctgggtcaccgtctgcgaaaccagcagggcgtcggccttgagttcgatcgctttggcgatgaactcttcgttggttacctggctgcccatgttgagggcttcgaacatctcgtagcgctccagtccgtagtgacctgcgaagcctttcatgttcataatggcgtcgatacctaccgtatgggcgtccgtgccggtgctggcgccgatcaccacgatcgggcggccgatctgctcgcggatgaagctgtccgtttcggccatgtcccatttggtcgattcgactttcgggacatggatattcgaataatcgaccgtatgggtacagcttccgtagcagttgaagaacgtgtatccggccgtcagctcccggtggaataccacctgcgggttctcgaagcccatctttttcatcaactgtttggccgcttcgatggcttcgtcgccggcgggcacgggcagtgtgaaactcaactgcgttttgccgtcgttcatcgtgtcgccgtagggctttatctttttcaggtcgagggtctggtcgaaatccctgccttcggttgaatataatcctccactcatagaatcaatatgctaatatagttaaaataaggcgtttggtcgtgcttgcagcatcggaatatcattttttcgctgcggcgcgactgccgtttttcataatctccacgaaggggttgtagtagttgcggcccttgctgctcacgccctccagacccttgccgccgttcatggggcgtttgatgtcggcgaagattcccttctcgagcgccgagaagagtccctctttttcgaggcgttcgagaagtgcggtagctttgtccaaaacctccttggcacgtttgcggatcagtccgccttccttgaactccacttcgtcgccgatgttcttcatgttgttgaagatgtagcgggcgttctcgatggaaaggtagcggtccgacatgaacggggtgtggatggcttcggtcggcatacctaacaactggatgccctgcgaagtccagatgcccaccatgttgaacagtgcgtcctggatatgtccccggaagatgttgccggtcatgaacttcgtcggcggcatgtatttcagcggagccttggggaagatctcgcgggtcatctgcgcctgcgccagctcgtagaggaagccgttttcgagcatcggatccatctcgaaggcgtgtcccagacccatttgctcctcgggcaggccggccagcagggccagttgttcgttgatcaggtcggaagccagcaccgtgtgggcttcctcgaccgcgtcggccgtggtgaggtagttgtcctcgcccgtgttgatgattacgccggcgaagccgttgattacgcgcgacatatattgatcgaccagcgtgcgctgcatgttgatgtcgcggaacagaatgccgtacagggcgtcgttgagcatcacatccagaccttcgagtgcacccattacggcgatctcgggcatgcagagtcccgagcagtagttgcaaaggcggatgtagcggccgacctcttcgcctacttcgtccagagccttgcgcatgatccggaagttctcctgcgtggcgaacgtgccgccgaatccctcggtcgtcgcgccgtagggcacgtagtcgagcagactttggcccgtagtgcggattacggcgatgatgtcggcgccctgtcgggctgcggcctgcgcctgtacgacatcttcgtagatgttacccgtcgctacgattacgtagaggtaggggcgcggcccttcgccgatggtggcgatgtagttttctcgacgctggcggttggctgcgattttggcgatgctggcgtcgatatacggtttcagcgccgcttcgcgctcggctgccgtacatacggccgagcgggtgatgtcgagtttgccggcagcgatctcttcggcgatttgctggggtgtgagtcccgtttcgacgatcgcgttgccgaggaagaacagggcgccttcgcccagtacgtttttctcccgcagctcttccaccaccacgttcggcagcggtaccgcgttggcatccacgccgtcgatgccgatcagacggcacagcgtccgctcgacggctaccgtcgtataaccttccacaaaatcctgcaccccgtcggcgatcttgcgcgctacgctccgggcgtgttccacctggttaaagtctattcctaatttgcttttcatatcgttcatgtaggctgtgccgtacggctgccgccattggttgtttttgagttcttcgttgcgttcgattcgccggaggatctccgggtcgatgcccagaatacgggcgatccggatcgcttcgtgcggaacttcgtccgtcgtgacctcctcgagcgagtagtctatgaaatcgttgatgtttttcagcgtgatcttctcctccgcgttcgtttccgagaagccttttaccttcagcttgcagcacggagccgcgatgccgttgtagtgggtggtcacgagcgaagggacttcgtagtcggccagaaattcgaggacaccgttcacgatcgcccttccttcgaccggattggtcgtgcgggccggttcgtcgatgagagccagcacccgcctgcctgcccggacgcttttggccagttcgtccatccgcatcatctcggccgcgaaggacgaaaggccgctcaattgatcctgtccgtcgccgacggagcagtgcacttcgtccacaagggctatttccgccctttcggccgcaatgtaaaatccgaattgcagcatgtactgggccagctcgacgctgtgcagcaacacggttttgcccgacatgttggcgccggtgattaccgtaggtcccgtcgtcaggcggatgttcacgggctggaatcgcttcccggccgcttcgagcgaaatccgcaactcggggttgaacaagcctcggaaggaggtcgtgtcctgcgttatcgcgggacgggtaaggccccagtcgcgggcctgcatcgccttggcgatcaccacatcgagccatcccatccggtcgagtgcctgttgcaacgcttcgtggtatttccgcaattcgacggagagtctctcccgaatgcggtcttcgatttccacgctgcggaaatagagctcctgcacttgagactcgtcggctccggcctgtttgcgtgctttgatctgtttgcgcagggtcgccagctcctccgagtaggcgtcatagacgaagaaatgggggagccggttgccttccggatcgagcagatcgacgaccccgttcagctcgggaagttccgcaagatgcccttgcgaagccagtggtcgaagctcttccgccagcagcgcgaaaaacttcaattcgaacagttcgatgtcgtcgaatacgcagttgccgcccgtgcgttcgatcgttgagcggatgtcgcgcagcagggccagtttgcggcgaatcgtttcggtgcggtcgcgtcccgcttcggtttcgagcaggcgcaacaccgaggcgatgcggtcgtgttccgccgtgatcgccgactcctcgccgagccatgtcatttcatggagcatacgccgcccgacggaggaacagatctccattccttcgacgacgcagcgcagtccgctggtatgttgtatggcctctttgagtcgcattcgttttctggttattcgatgcaattttacacgggttcgcgtatttatttcacggtctccggccgtatcagagcgtctgaccttcctctgactcccctcctcggaggggactttaagatccttgattttgttcgtgtgtagccgtattcgtttctattcgggcattttctttacgtcgtaaaccggtatttgcaacgcctcctgcatcgcttcgcacaaccgtcgggagtcgagtaccagccccgacggagccgtcggattgaccgtgacggccagcagccggctgcggtgcaccaccctgatccggtgtccccggcgcaggaaggcgtaaaacgcttcgggcgaggcgaacacccgcgtaaagtcgcggacgatcaactccacttcccgttgttgcgttcgcagcagttggaacagcttgtccgtgacgatgccggtggcgtaaatccgccggccgtgccggaacaggttctctccgctccgttcgagcatcagcaccgagggtaattcgaggtcgatcggttcgccgccgccgctgacggcccacaccccctgtgtcagaggatcgagccgggtacgcagcgcatcctcgatctcttcgattccgatcagttcgtaaacgtatttcgtcttgcggaccagttcgggaatatttcccgcgacggcagctcccgtggccaggatcatcgcttcggtgaccgccggcgaagccaggctcaaccgcgacagggcgccgtccacgatcgtcgtgcctacgccccgggctttgagccggtcgatcagggctttcaggcccgccgtgtccgaaggtccggagagcagcaatttgccgctcatcctcgcgcgggccgttatcagccgcccgagcgccgtccgctccagactcacgtcgaggacctcggccgcgagccgtttttcccggtagtgtttctccgaggtgacgaagatcattccctcgggaatctcgatctcgggcttcgccgtctggcacacctgatcccggctctcgccgtcgattccgaccgaagtcagggcgaaacgctccgcctggccgccgagttgtcccagaatgtagttcagacattcggttttacccgtgttcttctccaggccgacgatggccaggctgccgaaatccgatatgttcgttacgaatcccaatccggtgcgggctggtcttgcagcgttacgttctaaaggttgtggttacgggtcttgcggctcaattcggacggctcgagcgaaagacgtccgccgctcaacaactcggccacgccttccttccgacgtgctttctcgcactcttcgcagtggcattcgtccttgtagtcggttggttccgtataggtcgtgattacgccttcgtagttgcggagtaccacgcggttcggagcctgcgagatgacatagttcggcatgacgggaatcttgccgccgccgcccggagcgtccacgacgaatgtcggaacggcgtaacccgaggtatgtccccggaggttctcgatgatttcgatgcctttcgataccggggtacggaagtgtccgatgcccagcgacaggtcgcagatataaatatagtagggacgcacacgcatcttcaccagttcgtgtacgagctttttcatgatgtgcgtgcagtcgttcacaccgcgcagcaacaccgattggttgcccaggggaataccggcgtcggccagacgtgcgcaggcctgcttcgattcgggggtcacttcgttcggatgattgaagtgggtgttcagccagatcgggtggtatttcttgagcatgttcaccaattccggtgtgatgcgttgaggcagcacgaccggggtgcgcgagccgatgcggatgatctccacgtggggaatggcacgcagacggctgatgatatattcgagtttttcgtcgctcaccagcagggcgtcgccgcccgagagcagcacgtcgcgtacctgcggtgtacgggcgatgtagtcgatgcagtcgtcgatctgtttctcgggggttgcacagtcgtgctggccggcgaagcggcggcgcgtgcagtggcggcagtacatcgagcacatgtcggtaatcaggaacagtacccggtcggggtaacggtgcgtcagacccggtacgggcgaatcgctgtcctcatgcagaggatcttccaggtcggcgggcgaacgcttcagctcctcgacggtaggaatggcctgcttgcggatcgggcagtgcggattttccggatcgatcagcgtcaggtagtagggcgtgatggccatgcggagcgttttgagcgattcgcggatgccttcctcctcttcagcggtcagcttgatgtatttcttgagctcatctacggtctcaatcctgttttttacctgccagtgccagtcgttccattgctggtcggtcacttcgggaaagaattcttttctgcggctcattgcgggtgtgagaggtgtcatttgattttatttgtttcgttcgattgttacgttgttgcggtttgtgttttttcgccgatgtagcgagcgtttgttttcgccgtccgctcatcgaaaacggatgcggcggacggctattttcgatgagtgcctccctgcctcggtaagtcggatccgtcctgcttttttaatttgcgccgggcggggacgatgaggaaaggcggcaggtgtcgttcgtatcggttaggcgtacagctcggtgaatatttttctgagaggttcgcattcgcggaactcctgaagcgtgatctctgcatgtcccttcgtatagccgtttccgataatcatcgtcacgtcgctgccgacgccttcggcgccgagagcggctttcgtgaagctcgtggccatcgagaagaaatagacgatgcccgtattcttggtacagaggatgctggtcatttcggtgtcgggaacattcacgttgttgatggtgatgtcgcacatttcgccattggtcagctccgtaatcttttcgagtaccggaatcggctgacgagcgtccatgcagacgacctcgtggcagaagcccagcttgtccaggcgctccttctcctcgggactgtaacagagtccgatcactttgcccgttacgccgacccgcttgcgagcctcgtagcagcagagcatgccggatttgccggctgcgccgatgatcagcaccgtgttgccggggcgaaccagtttggctacctgtgccggagctccggccacgtcgagggccgacattaccagcttttcgggcaggtcggaaggtattttggcgtagatgccgctttcgaacaggatcgccttgccgtcgatatcgacctgatcgacatcggggcgaatctccttgatcttgtcgatccgcagcggagtcagcgacagcgaaaccagcgtggcgatcttgtcgcctaccttgaggtcggtcttgccgacgagcgcgtcgccgatcttctcgaccgtgcccagcagcatgccgcccgatccggttaccggattgcggtgtttgccttgtttttcgacgatgtcgagcatgatctcggcgattttggctttgtcgcctccggcctggttcgagatctgggtgaagctggccgagtcgatgttgagggtctgtacgtcgatcaggatctcgttgtcgtagatctcgtccatgttgttgtccagcttgtctgccggctggggaagcacgcccttcggggagattacccggtgtgtgccgtatttatgtccttttttcattatggtgttttgttgtgttgcagtgttgatattttttccgtgatcttatttcttgagtcccagaatgcggcgagcttcgtccggtgtggcgacctcgcgtccgaactctttggccatgcgaacgaccttctcgaccagttcgccgttggatttggccggaacgcctttggagagatagacgttgtcctcgaaacctacgcgcacgtggccgccgtcgatgatcgccagggccgccagcggaaattcgtagcgtcccacgccggctaccgtgtaggtcgcatcggccggaatgctgccccgcaggaagacgaaatcccggatgtcgcttccgatgccgccgttcacacccatcacgaagtcgaaatgcatgggggcggcgatatagcccttcttgtgcaggcggagcgccatttcgatcatactcttgtcgaagacctccagctcgggtttgatgccccgctcgatcatcttctggccgaagtacttgatcgtgttctccgtgttctcgaagatttcatcgccgccgaaattgagcgtgccgcagtcgagggtcgccatttcggggagcagctccgtaggttgcagccgttcgtcgttggtcatgccgacggcacctcccgtcgaaggctggatgattacgtccgggcaaaccgcacggatagcgtccataacctgtttgaagcggtttttatcctgcgtgggttggccgtcgtcgttgcgcacgtgcaggtggatgatgctcgcgccggcatcgtaggccgacttggcctcccgggcgcactcttccaccgtgtaggggactgcggggttgtgttccttgagtacttccgctccgcagatcgcggccgttatgatcagtttttccatggggtctttggttgaaaagtttgaaaatggttgaattccgttgctttgtccgatgtggcggctaaacctgttcggacctgttcgccgagaatttccggccgcatcggccgttttctctctccggcgctcctgcctgcggtcttcgcatcgcgggacgctttcgtgtccggaacgggccgaaaactccgttagcggctttcagggatgcgctggtcctctttttttacgacgcacgtaccgctggcacggcagaccacgacgggctctttgagtacgtcggccgcagagggcgagatgtcggggcgtgcagcgaccactttgcgggcttcgaagaccatcttgcgcgaggtgttgcccaccttcacgatttcgcccaccgcttcgatataatcgccggcatagaccggggcgagaaattcgacgttgtcgtaggccacgaacagtccttcgtcgccgtcgtgcatgatcaacagttcggtggccacgtcgccgaacagatgcaccatatgggcgccgtccaccagattgcctccgtaatgagcgtctttggcactcatccgaagccgtatcattgatttttccataacctgatatttttaattcgattgagatgcggatttgttctttcggccgttcggttatttggccggagcgaccatgtaatctacgaagatacccggcgtgcggaccgcttcgggggctatcgctccggtttctaccagctcccgcacctcggcgatcaccaggtcggctgcggtggccatcaacgggttgaaattctgtgacgtgcctttatagaccaggttgcccgatcggtcggccaggctcgcgccgagcagggctacgtcggcccgcagcggtttttcgagcaggtaatccttgccatcgacgttgatgatttgtttgccttcggctacgatcgttccgagtccgaccggagtgagcacaccgcccagacctgccccgcccgaacgaacccgttcggccagcgttccctgcgggcagaattcgatctccagttcgccgctgttcatctgctcgctggtgcaggggttggtgccgatgtgcgatacgatcactttgcggacctgcttcccggcgatcagccgtccgcagcctttgtccggataagccgtatcgttcacgatgagggtgaggtcctttacgcccgattcaaccagtgcgtcgatgatcgcgtgggggcttccgttgcccagaaagccgccgatcatgaccgtcattccgtcttttaccattcccgccgcttcggcagcagatataagcttcttcatatggtgattgattttacttaaaattaacaatatcagtctttaatctaacaaaattaaacatttgacgaatgatttgcaatgatttcgacgtttttttgtcgattttgtcgataatcggtcacttcttctccgaaagagtggaatcttcggatccgatcgcgcggaagcgggtgttcggaaggacctgagaaagtacggccggacgcctcgaggcgtccggccgtactttctgcggaacggttctttgcgggatcagagaagccggcagtgcaaacgttcgggcagcggtgcgctgttgttgcggcgccagaccatagcccgatcctgttcctgattgcccgagccgaagtcgaagtcgtccggcgcttcgaaaacgaccggaagcgaccggtcttcgaagccgaacggggcgtaaaagtccttgaggctttcctggcttgggataaggatcgcggcgtcggccccttcttctgcgatccgccgcatcgcctcgcgcatcaatccggaggccaggccccggccccggtagtcggggtcggtcgccacgccgtagatgtaggtcgtgcgccccagctcgctttcgaacgggatcaggtgcagcatggccgccagacggccgtcctcttcggctgcgagcatccgcttgcggctgtaatggccgatcaggaaggagtcgatgaaggtttcttcgtctccgaagcactttatccagagccgtttgcaggctatttcgtcggggtagaggcagagggccgtatatttcttctcgaggaatgccggatggtaggagagcttggcctgccgtagtcccggaatacccaggtcctcttcgcggtcgatgagcgtgtattgctcgggcaggtgcgccacgaactcccggttgatgatggtgaaagccccgtcgtattcggtgtcggccttttcgacatgaacacagaacgtatggtcgttgatcggtgagccgtaagtgaaagcgacgagtttatcaccgacgtagatgcagccaccgataagtcccagccggtcgaaatgggcgaaagcccgctgcatggcccgctgttcggccgacagctcgcccgtatgtccgctgcgggtcttgcgccattcggcttccagacgcatgcactccgcagcatggtcgcgggtcataggctcgtagcggtattcgtattccgcctcgaagcggttgatgtggttgcgtttggattggtatttccggccaggaaggtcgcgcaggtccgaagcgttgtatacatagtcttccagattgcggtcggaggcgaaagcgaactggcagtggcctacactgcggagtttttcgagcccttcaggtgtcatgtcgatgatccgaagccgttgtccggcagcgagtatatcctcctccagatgccgcaggacgggggtgaaatctcctgcgccgacaggctgcatgtagccgatccggtcgctgcccccgatctggaagcggatgaccagaaagccgtccactacgctccaggcggttttgaactggaattgccagcaaaacatgttggcgaacgccaggtcgcagttcgccggggcgtaaggcaatgtgaaggattcgatttcggccttgtcttcgatcgtaatgggtttgaaggtaatcataaattgtcttctacggtgtaatttttggcttccacatgcccgtaatactgttgaatcagggccttgagccgattttcgaccgacgcggtctgttcccggtccgaagtctcgtttcggaacgtcgcgccggtcatccattcctcgtcgaacgagaagagcgcttcgtccgttacgacccggaattccgaatcgtacatcacggcccacggttcgcggtcgggttcgttcagaatgtcgcgtccgaatgcgaaatagggttcccggtttcccaacagtcccagcagggtcggcatgatgtcgatctgctgcacggtctgtgccagaaattgcggtgcgagtgcgccgtcgggggtgtggatgaatccgacgatgtggtagttgccgggataggagcgggtttcctctgccattttctccgaggaaacgtggtccgcgacgaagacgaagattgtcctgcggaaccactcttcgtccttgaaacggcggtagaagttgcggaaggcgagatcttcgtaggctacgggtttgtgtattttggtcgttcccgccggcagcttgtcggcgtattgctcgggcacgacgaagggatggtgcgacgagagggtaaacagcgtggcgaagaaaggttcctgcattttcgagagctcttcgcccgtgaattgcaggaacggttcgtcccagataccccagtaaccgtcgaaatcctccgtgccgtgtgccgcttcgtaatcctcgcggctcaggagccgatcgatgccggcgctgcgggcgtaggctccgaaacccatcgaaccgcgctccgaaccgcagaagaaggcggttcggtagcctttgtcgcggagtatctgcggcagttggcggcttttgcccagcgactggggcatcagcacgaaaggctgtttgaaggaggggatgctgcccagtacggcgggcatggcctggatcgagcgggtgccgttggcgtacatctgtccgaaacagaggctttgccgcatgagcgagtcgaggaacggcgtatagcccggttgcgtgccgttgccgtacaattcgggtttgaggtaggccgaatgttcggccgacatgctttccagaatgaaaaccatcacgttgcgcccttcgaggttcacggccgaagagtcggggcggtgggtcggggtgaaatattcgtccagtttttcgggcgaaaagtagcgggtgtatttgaccgatccgccgctgccgatggtccgcagaatgcagaaggggttgctcaggatcaggttggccttttcgctggtcgaggcgtagagcgtggcgttcgagagggtgatcgggcgggtcatgcgcgttacgccgccccgcatgccggcgatgccgagcagaatggcgatcaccagcagtcccgtattgaccgagtaataaacccagccctcgcgcaggggcgatcggggtgtgatcttgcgtccgtaaccccaaacgagcagccagatgaggactgcgccgacgaggagcaggtaccagttttcggcggcgaatttcagcacgagctgcaccgaattggagttgtcggcgaagaagatttcgtcggcggtgaaacgcttctgcgtatagcggaaatagacgcaatcggccaggtttacggccacgatcagcagcgaattgatcaccgcatagtaccagaagagaatacgccgataccagctccgctcccggaaatggaacggcagcagcgagaggacgatgaaaagcagattggcgtagagaaccgatacggtgtcgaacttcagacccccccccgccaatgtcaggacctcctgccaacccagggggccgatcagggcgtagttgtagcagtaaaagacgattcggcagagcagcaggacgatgtagagcaggacgatgcgccgcaggagcatgctcggattactatgtagccagcgttccaccttagcaggcttttaacgacatgtcgagcgatttgatctggtgcgtcagggcgccgaccgatatgaagtccacgcctgtttcggcgtattcgcgcagcgtgtcgagcgtgatgccgccgctcgactccgtttcgcagcgtccggcgaccttcgcgacggcctgccgcgtcagctccggggtgaaattgtcgaacatgatgcggtccacgcctcctgcggcgaacacttcgtcgatgtcttcgagcgaacgcacttcgcattcgatcggaatgttcttgccttttgccttgagataggctttggctccttcgatggccgggcggatgccgcctgcaaagtctatgtggttgtccttcagcagaatcatgtcgaacagtcccatgcggtgattctcaccgccgccgatcttgacggccatcttgtccaatacgcgcatgcccggggtggttttgcgcgtgtcgagaactttggtatgcaggtctttgatcttgtcggcatagacggctgtctgggtcgccacgccgctcatgcgctgcatgatgttcagcaggatgcgttcggcttgcagcagggactggagccgtcccgaaacgtagaaggccacgtcgcccggcttcacgcggtcgccgtcgcggaggatctgttcgaattgcatctcggggtccaggcgtcgaagtaccagttgtgcgatttcgatgcccgcgagaataccctcctgtttgcagagcaggcgcatgcggcctttttccgtcgcggggatgcagcagagcgaagtgtggtcgccgtcgccgatgtcttcgcggatggccagttcgatgagcgcatcgacgaaaggtttgtattcgggtttcatattttttcggtttttatgggtgaaacgaatcgtttcgttcggcagggccggacgaatgtctgaagagagaacggtaaccgtgcgtttggcccgcaaagattaccgctccgctccggcacccacaaaaatacgaaaaataattgccatttttcaggaaaaatattaattatatgtcggttttgtgatccggacaaatggtaattcttgtatttataagtgttttttcaaaaaaatacaccattattcgacgttcgtaatatcaaatccacggcttccaatgctttgttgacggtgcgcttcagatttcgatcggtatgcggattggcataaattcgtcgagaatctgatttcttccgatggagggggactccttgccgtatatgtcggtgatgaagaattttcaacgacatgtactccgggtacggaatacgtgatttatggatttgcgtatgatgatctggaggttcggtcggatatatcgtttttccgtgcttcttcgttgtccttctcgtccgtgtcgtcgccttcccagtcgaacggcgggaaatcgcgtcgttcacccagcgagaagcgggtgtaggtgatcggcagcttccgttcgaggaacatctgttcgtaggcggtcttgaccgagagtatttcgtccgcgaaccccgagccgtagatgtcgttgttggccacgtcgcagggcagaccgaaccgttcgatcacggcttgcgtgtaggcgtagaggtgttgcgagtcggtcttgaggttgattcgtccgccgggaacctgcatctgtgcgtactggcccaggaagaggggtgaggtgagccgtttcttggcccggcgcgatttgagctgcggatcggggaaggtgatccagatctcatcgacctctccttcggcgaagaaggaggcgatcatttcgatgcgggtacgcagaaaaccgacgttgcgcatttgccgttccgtggcggttttggctccgcgccacatgcgggcacccttgatgtcgataccgatgaagttgcggttggggtcgcgctccgcgagtgcgacggtgtattcgcccttgccgcagcccagttcgagtacgatcggacggtcgttatggaaaaagtcgctgtgccaatgtcctttgagcggatggtcgcggcggaaggcctcctcgaaggcgggttgtacgaaacattcgaacgtgaggttctccgcaaagcgtctgagtttgtctttgcccatctgtttttattcgcttttttgctggttgatgccgatggcttccacgccccggaccggcatcgccggggtgaaagccatcctgtaaatgccgctgtcgggaaaaattacgtgccgacgatagggaaccgacgcttcctccgcgagggctgccgggtgcctgcggggaggaaggcccagcgtgtaggattcctcgaaaaccagggagtcgggcgaaatggtccgtatcgtcagccgcagcgtgtcgtcccgaaaggagtcgttgtaacgcacgacgatgtataggtcgcgcggggtcacggtatccgcgttcggaatttcgatttcggcactttcgctccacgtgccgcccccggtatcggttacgaccgtctgatgcggcgaaaggcagctcgtaacgagcattccggcgatcgctatgatactccgcaggtacattacgagtcgttattgctcttttttcggcggttcgggttgtgctgtctctccgtttccgccttcccgacggttgccttcacgacggttgcgtcctccgcgtccccgaggacggcggcgggcaccgttctgtccctcttcgcccggagattgggagtgtgtcggagtcggatcggtttcggagccgttttgtcccggacggttttcggaacgagaacgctccgaacgacgttccccgcgctgttcgctgcgagagccctgaccgttgccgcgttcaccgttctgttcgccggaggtgttcccgcgttcggtgcgctgttcgtttttctgggtgctctgtccgttgcgcgacccgttccggtcgctgttgcgtgggttgcgcggttcgccctgaccgttattcctttctccgcgcgattcgcggctttcgccttgtccgtttcgattattccgttcacggcggtcgcgtttttcgcggcgttcactccggttggcagcgggttcctgtttttcgtccttgcgggattccgaaacggcggccgcttctgcggcgcttccgctgcgggcaccgttgttccggttctcgcgttcctctgcccggtcgctgcggcgtcggttgcggcccttgcgtttggagccgttgccgtcgaagcgtgtgatgctgtcctcctccgagcgataggtcggttcttcgaacttctcccgttgtggttgctccgccgacagctgatcgaccttcttgccggcgcggttcagcgctatgatctccttgacgcgggcgacgggaagcgtcaccacgttggtcatcgtatccttgctgctgctgaaggacatggtaccggccaggatgtcggttttgaccaggtaatattcgccgtcgagagcctggagcggttcccgcagacgggggaactccttgcgggcgtccacgtaggtgtcgtattcgtaggcgaggcagcacttgagtttcgagcactgtccggccagtttttgggggttgagggagatctcctgcatacgggccgagttggtcgtcacactcgagaaattcgagatccacgatgcgcaacacagttcgcggccgcaggctccgatgccgccgatgcgtcccgcttcctggcgggcgccgatctgtttcatttcgatgcggatgtgaaaccgttcggcgaagaccttgattagctcgcggaaatccacgcgctcgtcggcgatgtagtagaagatcgccttgatcttgtcgccttggtactccacgtcgccgattttcatattgagtcccatttcggcggcgatctggcgtgcggtgatcatcgtttcgtgctccagagcgatggcctcctgccagcgttcgatgtcgtagggtttggccttgcggtaaatcttcttgaattcgccgttgtaggggttgaaacccacgcggcgcatttggcgggctaccatgtcgcccgtcagggagacgatgccgatgtcgtgtcccggcgaagcttccacagcgacgatgtcgccccgttccagcggcagattattgacgttttggtagtaggagcgccgggtgttcttgaagcgcacttcgaaaatatcggtcggcgtgtgttgcgggtattgctccagccaggctgtttcgtgcagtttgtagcaaccctcgcaaggcttggctgcgaccccttcgggggcgtagtagaacgtgcagccgcgaccgatttcgggcttgggcgctttcgtatatggtttggtgttatccattggagtcataaatttcggtaaagatagtgaaatccgggagcaatgccaaatttattcggctgagactccggcatattcccgccgggcggatgtgcgtcgctgccgggaagcggagatcccggattatcggatgccggccttccagcgccggatatcgcggcggtagcggacgatcagcagtacggcggccgtcgtaagaccgacggtgaagcccagaatcagcccctgtgcgcccattcccaatgtaaagcccaacaggtaacccaccggcaggttgaagacgatgtacgagaggaaagcgatcggcatgatgatcttcacgtcctgaataccccgcagaatgcctaccgaaacgttctggatgccgtccgccaactggtaaacggcgatcagcaggatcagcttcgaggccaggtcgatcacttcggcgttggtggtgaagaaagtcgggatgacgttgcagagcgagatgaacgtgatggcggcgaagaggttccaggcgatgaccaggtggtaggaggcctttgccgccagagtcagctccttcaagctgcgggcgccgtagcagtgggagatgcggatggtcgtggcggcaccgatcgaagtcacgatcatgaaggcgcagttgcccaaggtcatggcgatctggttggcgctgatggccgttttgctcagccagcccatcatgatactggtgccgacgaaggccgaggcttcgagaaacatctgcagggagatcggaaggcccatacgcagcaatgtgcggatcgttttgaccgaatagttgcggggcgagaatccctgaagataggcgcggtatttctgttttttgtagaaatagccgataatcatgatcggcatggcgatgcgcgatccgagggtgccgagccccgcacctgtggcgcccagttcttcgaatccgaggtggccgtagatgaaaatccagttcaagccgacgttcatcaggttgcagagaatcaccacgaccatttcgacccgggtgtttccgacgccttcgaggaattgcttgaaggtgaagaagagcatgatgaacggcatgctgtaagccagcaacttgtaatacggtatggccatatcgaccacttcgacgggctgtcccatgtggtacatcaaagggatgacggccagttggagcccgcagaccagaaatcccaacagagtatagaacatcaggccgttttgcaggtattgcgacgatttgcaacggtcgccctgggcgtagagttcgccgatcaggggcgtgaggcccagtgcgatgccgacgccggcgatgaagaggatgaagaagaccgagccgccgaacgaagtggcggccagcggcgtggggtcgtcgcctccgtaacggccgaccatgacgttgtcggcgacctgtacgaggatctgccccaactgggtcatcacgacgggcagggccagtttcagattggctttgtattgtcgtttgtaggttgaaaaacggtacatatatttcttgaatcagacgacaaaggtacgaaaataatcgattatccctctttcgcatccgtttcgaagggggaacggagtctgatgtccggacctttcgaccgggtgtcggggccgattttgcaggcagatgtcgaaagcatgcgggacggacatatatggagctgttcccggtttcgatgcaaatgcctcgttgccgggaggactgttcggggttattccgtatgtcgggccggggttgttgtcggttctggaaaaccgcttagtcgaaggagtgggtgaggcgtgaaaatcccggccgatacttgcttcggccgggattcgaaaaccgtccgccactggtgcggatttatgttaggcgacccggagaatcacctccttttcgccgtcgggttccacgatcacccgctccccgctgtgcagtttgccgtcgataatcagtcccgagagaggttcctcgatgcgttcgagcagcgtgcggcgcagggcgcggacgccgtatttgcgctggtagccgatggcggcaagggtccgcttcgcctcgtcggtgatttcgaccttgtagccgagtcggtcggtacgggagagcagccccttgagttccaggtcgatgatccgctccacgtccgagaggtcgagcgtgcggaagatgacgatgtcgtcgatgcggttcaggaactccggtgcgaaggtttcttccagcgcccggcggtattccgactgcggggctttctgctgggtgtccgatttcgaacaggtgctgtacccgacctgcgtggagcgtattgccgcggcccgcgatccgacgttggaggtgagaatgattaccgtatttcggaaatcgaccttgcgccccgaaccgtcggtgaggtgtccctcgtcgaagatctgcaacagggtgttgaagacttcggggtgggctttctcgatttcgtcgaacaggacgaccgaatagggatggcggcgtaccgcttcggtgagctgtccgccttcgccgtagccgacatatcccggcggggagccgatcaaccgtgcgacgttgtgtttttcgctgtattcgctcatgtcgatacggatgagtcccttgttctcgtcgaagagccatttggagagctctttcgccagcagggttttgcccacgcccgtcggtccgacgaacatgaagacgccgatcggacgcccttcgtccttgagtcccgcccgggagcgttggatcgaccgcgaaatcttttcgacggcttcgcattggccgatgacgcgggccgaaagatagtccgcaaggccgcgcagacgttcgctttcgctgcccgagagccgttcggctgggattcccgtcatggaggtaataacctgctcgatatgctcggcccggatttcgggcgggccgggatcggacggaagagtccatacggcgccaccgacagtcgtcgtgtccgctgccgccgttttgcgggagcggtttttgggcgttttggctcctgctgcggcgccgaccggttcgcgggatgcggtttttcgggacggtttttcggttttgcctttgtcctgcaggtgaatacgtgccccggcttcgtccagcacgtcgatcgccttgtccggaaagttgcggtcggtaatgtagcgcccggtcagggcgacgcaggcccgcaatgcttcgtccgagtagcgcactccgtggtgccgttcgtaatggggtgcgatgttgtgcaggatttgcagggtttcctcttccgaagcgggttcgacgaggattttctgaaagcggcgttccagcgcgggatcgctctcgatatcttcgcgatattcgtccagcgtcgtggctccgatgacctgcaattcgccccgcgccagggcgggtttgagaatgttggccgtgtcgaggcttccctgggtcgaacctgcgcccgcgatggtgtgtatttcgtcgatgaagaggatcgagtcctgcttcctgcgcaattcttcgagaagtcgctgcatccgttcttcgaactcacctctgtatttggtcccggccaggagcgacgatacgtcgagcgaatagagccgtttgccgcggatggtggcgggaacttcgtccgctgccatccgcagggccagcccttcgacgatggcgctcttgcccacgccggcttcgccgatcaggatcgggttgttcttcttgcggcgcgagaggatctgcacgatgcgttccatctcccgctcgcgtcctacgacgggatcgatgcggcctctgcgagcttcgtacgtaaggtcggtgccgaatttgtccaacaaggcaggttccgcaggaggagtgtcccggacaggttcgcgcaggccgatgaaccgtagttcgggtgtcggccgaaaattggtatccggaggcgtcgtttgatcggcctccagggtcatcttttgcagttcggtcgctatcgcctgtgcatcgaaatggtacatggccagcacctgcgaagtgatcgtgtgcgggtcgctcacgatgtgcagcagtgcgtgtgccgtcgaaacatggtgcatcggggcgaacaatcgttgtaattctctggtgtataaagggaaaaattcttcgggattctgcctcgatgaatcgggtgccgataccgaccgaatctcgctttcgatgcgaaggcatatttggtgaatctcccagtccttgaggcgggaggtgagtatctgatgcgctaaggacccttcttcccgcagaatctcaagggtgagaaaatccttgagtgagtgggtaatagcgcgtttcgaggtttcgaatgccgtacgggcgatgatggcctcgagcgtttttgagattttagcttgcatcttggattccttttttagttttccgtgttcggaaaagcgaacgcggtcgctctctcctcgcttgtcgaaaatgtacgttttgtcctgttgaaattacagacttataacgaagaaatcccaggtaatattatgttaaataaaaatattgcatattgaacgatttcgtccctttatcaagcgccgggacgaggccattcgccgatttccatgtcgcggatgtcggtgccgtcgatggtgaagcgcagggcgctgcgcaccttgtggaaaccgtagcagccggcagcgccggggttgaggtgaagcaggtcgtaaacggggtcgtagatgaccttgagaatgtgggagtgccccgcgatgaagattttcgggcgcagcgattggatccgcgctacggcctgcggggtgtagtggcggggatagccgccgatgtgggtcatcaggacgctcaccccttcgcactcgaaggagagaaattcgcggtaggtgcgtcgcatgatacctccgtcgatattgccatagacggcccgcaggggtttgaacgccgcgatctggtcggcgacctccggagagccgatgtccccggcgtgccagatttcgtccacgtccttgaggaatgttttgagcgtttggtcgaacgtgccgtgggtgtcggatatgagtcctatgcgtttcatgctattttgttgttctctgtattcttcggtaaactgccggcgaagtttgtgtttcattcggattcctgcctgccgaatttacgccgcccgcccagcaggtagagcgtgccgacgacggcggcagcaaaggctgccgtactgtccgcaagaagagcgcagcccgtcacggccatttccgcaacgcccgcgacggcccgcagcaggaagagggtggcaatggtgtaaatacctgtttcgagcagcggcagccggcggatgatcccggcgcccgaaagtccgtagaggccgaatacggcgaagatgaacgcaatggcgacggtcagcagataaggaatggcggccccgtagcggagggccagcgtttccatgattccgtcgatgcgatagatcgacagtacgggatagagccaaggtaggcaggcgaggtgtcccgccgcgaccaggaaattcaatatagcgcctgttttcaacatgtcggcagtctttatgtttccggggatagattccgtcccggtttcgggatttatgattcagggattgcccgctgtgctcttttgccgtttgtcggtatattttggtcgcttgtgtcgctgccgttcgccggggtgaaatacgggatgtcgtccgatcgtattttcggggctgtccggcagtcggcttcaggaatgccggaaggcgttgtgtctccggctgttatttatatttgtccttccacagctcccggatgcatgcggcgatcttcgcttcggcggcgttgcgggtgttcggctcgtagaatttcttgcctttgagcgtttcgggcatgaactccagcccggcgaatccgccgtagtcgtgggcgtatttatagcctttgccgtaccccgcctgatccatcagcttggtcggggcgttgcgcaggtgcaggggtacgggccggttggtcgtatcgtgttcgacgaaggagagcgcctggttgatggccatgtaggccgagttgctcttgggcgaggtggccaggtagatcgtggtttcggccagcgtgatgcgggcttcgggcatgccgatcttgtgcaccgtgtcgaaacaggcgttggccagcagcagggcgttgggattggccaggccgatgtcttccgaggccaggatcaccagccggcgggcgatgaagcgcggctcttcgcctccggccagcatgcgggccaggtagtagatcgctgcgttgggatcgctgccccgcaccgatttgataaaggccgagatcacgtcgtagtgctgttcgccgttcttgtcgtagagggcgatgttctgctgcaaacagtcggtgacgtattggttggtgatcgttactttgccgtctgcggcgcccgtgatgatgtccagaatgttgagcagcttgcgggcgtcgccgcccgaaaagcggaacagcgcttcggtttcctgtacctcgatctcccgggttttgagctccggatcggtggccagagcccggtctaaaagggtttgcagttccccgtcggtcatcggctggaggatatagacctggcagcggctcaacagcggtgagatcacctcgaacgagggattttcggtcgtagctccgatcagcgtcaccacgccctgctcgacagcacccagcagcgagtcctgctgcgacttgttgaagcggtggatttcgtcgatgaacaggatcggcggtttggagtcgaagaatttctgcttgcgggccgattccaacacctcgcgcacctccttgacgcccgacgtgacggccgacagggtgtagaacgggcgtttgagagtcgtggcaacgatcttggccagcgtagtttttcccacgcccggcggaccccagaggatgaacgaggggacattgcccgtttcgaggaacttgcggaatacgccgttctgcccgaccaagtgggcctgtccgatatattcatcgagcgtacggggacgcagtcgttcggcgaggggaatggacatggaaagcattttttgtcgctcaaatgtactgaaaatttttgttttcggcaacggccggactgaatgcggtccgaaagagcggatgcgtagaaccgctgccgtccggttcggggattcgcagcggggagatcgtgtcctggccggattccgtttttacgtcgtgcttcacgcttgttctgcggtcgcagttcccgaagcgacgcgcactattgtatatttcgaaaagccgctatatgtactgtacatattgatacacacggaaaagtgtaagtctgttcccgaatcgtgagcgtaggaaattcattttggcggagaataggcagacatcttctcgcgtcgtatccgtattctgcgggtataggcgcggggctgtcgcttatttcacgccaaaaggtactcctacgacctgcgattctgaaatgggcttcggtgccacgcttttctttttattaccagtcgtcggggtacggacgatacaatcttacttaaattttatggataatattacgaagcagaatggaaatgaagtcggcaaacgtcaggtcgaagggcagacgatcattatcaatcagcaggagcggagaagcacgaacggactgggaaccgccggttttattctggccttgttgggtttgattttcagctgggtcccggggctcggctgggtattgtaggccttgggtttgattttttcattcgtggggattttcagaactccccgcagcttggcggtcgccgggctcgtcatatcgtgtatcgcgttgatcgttttgattatcttggtgagtgcgatcgtttccttggtgtaatcattatcagttggtatgaagaaagagtatcctgcacagaaggatactctttcttgtattggcgatacttgaagctttaatatctccggtttttcaattccggtacagtttgtcggacggcgaaagatcgctctaatccggtgcatcggacattatgttgcagccatcgtagttctccggagaaaccttgaattccgcaccgctgtccggctaaggggctatttgcgcggtttgtcctgccgttcgcgctccttgcggcgcatcgaacgatagctgttcgccatcaccgtcaggagcagcagcaccgtgatccaggcgcggattttgtcgcccgtggacgcggtaccgcaggcatagacggtgataagcattgccaaactgcatgctaaaaggatcatgcagaacccgagcagtcgccgaagcgatcttacagaggccatacgaggtcttttttcggtttattcttccggcttaaccaactgcaggtacagctcgtcgagctgcgcctggtcgatatagcccggtgcgtcgagcatcatgtcgcggccgttgttgtttttcgggaaggcgatgtagtcgcggatcgactccgaaccgccgaagagcgagcagagccggtcgaaaccgaaggccagtccgccgtgagggggtgcgccgtacttgaaggcgttcatcaggaagccgaaacgctcctgcgcttgttccgccgtgaagcccagcaactcgaacatcttggcctgcagtttcgagtcgtggatacggatcgagccgccgccgatctcggtgccgttgcagacgaagtcgtaggcgttggcccgcacgcgaccggggtcgctgtccaggtattgtacgtcttcgagcttgggcgaggtgaacggatggtgtacggcgtagtagcgctgggtttcgtcgtcccactcgaacagcgggaagtcgatgacccacagcggagcgaatttcttcgggtcgcgcaggcccagttgctgagcgacctccagacgcagggcgcagagctgcgtgagggtcttgaatttcttgccgcagaggatcagcaccaggtcgccggcttttgcgcccgcgcgttcggccatcgcccgcacctgctcgggcgagtagaacttatcgacggacgacttgacgttgccgtccgcttcgacgcggatccagacgagtcccttggcaccgatctgctggcgtttgacgaactccgtgagggcgtcgatctgtttgcgggtgtagccggcgcagcccgtcgcggcgaagccggtgacgtactccgcgtcgtcgaaaaccgcgaagccgtgaccttgggccaggtccgtcaggtcggcgaactccatgccgaagcgcaggtcgggtttgtccgagccgtatttctccatcgcttcgatccagggcatgcggcgcagcggctccgtaagttcgatgcccatcacttcgcggaacatgtgcttggcccagcgctcgaagatttcgagcacgtcctcctgctcgacgaacgacatttcgcagtcgatctgcgtgaattcgggctggcggtcggcccgcaggtcttcgtcgcggaaacagcgcacgatctggaagtatttgtcgtagccggcgaccatcagcagctgcttgagggtctggggcgactggggcagggcgtagaattggttggggctcatgcggctcggcacgacgaagtcccgggcgccttcgggcgtggaattgaccaggtagggggtttcgatctccaggaaaccttcgtcgctcaggaagcggcggatctcctgggccatcttgtgacgcaggatcatgttgcgctgcaggggaggacggcgcaggtcgaggtagcggtatttcatacgcaggtcgtcgccgccgtccgagttctcctcgatggtgaatgggggcacttcggcctcgtgcagcaccacgagcttcgaggcgacgacttcgatgtcgcccgtaggcatctttgggttcttggacgaacgctccaccacgcggccttcgacctgaaggacgtattcgcggcccagtccgtcggccacggtcttgacatcggccggagagtgctcttcgacgacgatctgggtgatgccgtaacggtcccgcaggtcgatgaaggtcatcgcgccgaggttgcggactttctgtacccagccggccagcgtgaccgtttcgtttacatttgcggcacgcaactggccgcaggtatgggttctgtacatggtcgtatctgtatttttcgttattgtcgttttgcgattcacaaaggtagtgaaaacggggtggaatccaacaatcccgcctggcgggtttcaccgggtgtcatctactgtctgcaaaggtaggaaaatgagtgcagaatggaacaaactcgtccgtttttttataagggcctcatctcttttgtaaaaaaggtcggaaacggaaacgaaattccggctgtaaaacgggataaaaaacgcagggacgccgaattctccgctaaattattaattttgccgaaaaaccgaaacgatggaacagcagcaacccgatgaaaaattcatgcgcctggcactaaacgaggcggaaaaagcgttagaagagcaggaagtacccatcggtgccgtggtggtcgcggacggacgtatcgtcggccgggggcacaacctggtcgaaaccttggcggacgctacggctcatgcggaaatgcaggccctgacagccgcagcctcgaccgttggaggcaaatacttgtccgaatgtacgttgtatgtgacggtcgagccttgcatcatgtgtgcgggggcgattgcgtggagccaggtggggcgggtggtctatggcgccgacgatccgaagcgtggctatcgccgctattcggagcaggtgtttccgccccgaacgacggtgacgcggggggtattggccgaggagtgcgagaggctcgtccgttcgttcttcgccgcgttgagaaggtgatttttggaaagtgccgaaaaaaaactaaatttgcattccctgctttccggcaggagtttcgacggatggttgcgacctacagaacggggcgatatttccgatgggtttgcagggaatggtgataaaaatggacggaacctattttaacctataatttatacaatatttatgaaaaaacttttgatttccgcgcttgccctgttcgttgtggggtctgtggctgcgcaggaaggattgggcgaaacttacaataaggctgtcgccgcttacaattcgaaggattttgcatccgcagctacggctttcgaaacgcttatcgatcaggggctcgattccgaggatctcgatgtccagagttgggttgcaacggccaagaagagtgtgccggtgtgctatttccaaatgggtcttacggctgctaagggaaatgatttcaacacggcggtcgagaatcttaccaagtcggccaataaggcggctctttacggtgagttgcagcaggagcgtatgtcgaatatgttgatggcgaagatatatctgatgtggggcggaaagcctttcaacgaaaagaactacgccgaggctgctgaaattttcgccaaaggttatgccgccgatccgaaaaatatggagatggccaacttcttgggcatttgctattgcgagctgggcgacttccagaaaggtttggttattttcaacgaaatcgcttctcaggacaaccccaaatatgcggaggatgtcgtgaaggcaaaggagaacatcaagctctataccaataaccgtattgccaagttgcagggcgagaatgatttcgacggtattatcgccgttgccgacgagatgctggccgtgaatccgcaggatgcgctggcccagaagattcgtttgcaggcactcttcgacaagaaggattatgccggcgtgatcgcttcggccgaggaggctgctgccgtgcagaccgacgaagaggagcgcagcgacgtttatttcattttgggtgcagcttacaatgcccgcacgatgccccagcaggcgatcgacgccctttcgaaagtaacggccggtgcgaatgtggctgcggcacagaaaacggtggcacagcttaaggagaacgcagccaaagcgaacagttagcggggtattcctgtttttgaaatgcggggcagactttttcggaagtctgccccgttttattcgaaagggctttgacttccgggatacacgcgggggcggttcagcggatggttttgcgctttatcgcggcgggtcggctgtcgggccgattcaggaggagcgggagcctttgtgccgcaagtcggggcgatggcggtggtgagccggccggtcgggttccggttttcctgtcttttcgtacggaaggtttcccgaacagcctgcggacaatatccggagaggtttcgtgtcggtttgctgtctgcctctccgtccaatggcgggccctactcttcgttcttttcctggtttatccgcacgttttgctggatgcgccgcagtccgctgcgtgcgagaggtgtattgccgaaccgcaggagaaactcctcttcgctcattgcgagccactcccgatccgaaatcgtcagcgggtcgaacaggggatcgaaatgcggcgagcggtgcatgggggctttttggttgtggggacagcagctctggcagcgatcgcagccgaagatccatccgtcgaggtcgggcagggcgctgtcggactccttttcgatcgtacgacaggagatgcaacggttcgtgtcgatcaccttgggcgcgacgatggctcccgtcggacaactgtccaggcagttccggcagcggccgcaacgggctcctgcgaacggggcatcgtactggtcggacggcagggtaagtaccaactcgcccagcaggacataggagccgtattggggcgtgagcagcagggattgccgcccgatccagcccagacccgcttcgacggccagttgtttttccagcagcggagccgtatcgacgaacgtgcggcccgtgagcccggggtattgccggcgcagggcttcgagcatcgtgcccagcatcctcttgaggacggggtggtagtcgcggctgcgggcgtaggaggcgatttttgtgcggcacccgggcggatagccttcgcccagcgggttcttgtagctcacggcgcagaccacgaccgtctgcgccccttcgaccaagtgtcggacgtcgaaacgtttgtcgaggttgcgttcgaggtattccagcgaggaaccgtagcctttggcgagccattcgcggaagtaggattcgttctccgcaagatgcttgcagggcgtgattccgcagaggtcgaagcctgcattctcggcaagttttttgatgtattgaccagagatcatggcgataattcggctcaaaaatagtgtatttacggcaaataatagtaaatttgccccgagtatattctcattttaattcgaaagaaaatgactatccatacactttacgaactggttcagcacagtgtaaagagttttgcatcgaaagtcgcttttgccatgtacggcggggaggagctctcctatgccgaggtgggaacccgcgtcaaacacgtgcaggaccttttgatcggagccggtttgaaagcgggcgacaaggtggcgctgttgagcagcaacatgcccaactggtgcgtttcgtacctggccgtcacctctgccggcatggtcgccgtgccgatcctgcccgatttctcgaccgaagagctggagatgattatcgcccactccgaggccaaggcgctgatggtttccgacaagctcttcgctaaattggcgaagtccacgatcgaatccctccatatcgtgattcgtaccaagaatctgggcgtgatcgcctcccgtcctgcggcggagaaaggggcggtcggaattccgaatcccgaagacctcgcggtcatcatctatacctcgggtacgacgtcgcgtcccaagggcgtgatgctctcccacgcgaatctctgtgcgcagatttccatgagcgccgccattttcccgatctttcccgacgatacgtttctctcggtgctgccgttggcgcacacctacgagtgctcgataggtatgatctatcctttctcgatgggggcccgggtcgtttacctggatcgtccgcctacggcctcggttctgatgccgacgcttgccgaggtacggccttcggtgatgctcatcgtgccgctgattatcgaaaagatttatcgtcatcagattctcgccaagtttacctccagcggattctggcgtgcgctctacaagatcgatttcatgcgccgttatctgcatcgtgtcgcgggtaagaagttgatgaaggtcttcggcgggcggctgcgcttcctcggtatcgggggtgcgaagctggacggcggcgccgagaagttcctgctcgaagcccgttttccgtacgctatcggctatggtttgacggagacggcacccctgttggccggtgcggctccctcgcaggtgcgcctgggttcgaccgggcctgccgcgccgggcgtcgagctgcggttggagaacgtcaatcccgaaacccgccagggcgagatcgttgccaagacgccgagcgccatgatcggttactataagaaccccgacgctacgaaggaggtcttcaccgaggacggatggttccgtaccggagatttgggcgaattttcggccgacgggtggctttacatcaagggtcggctgaagaatatgatcgtcggtcccagtggtgagaatatctatcccgaggatatcgagagcgtcctcaattcgcacgtctgcgtcgccgattcggtggttaccgagcacgaaggccgcctggtggcgctcgtgcatttcaataccgacgctctcgaagccaagttcgacggctggaaggaggatttcgagaattggaaggagaatctcaagaaggaggtcgtcgattatgtgaattccaaggtcaatcgtttctcgcgtatctccgaggtcgtggaggagaagcaggagttcgtcaagactccgacgcagaagatccgacgtttcctctataccaagcgcaaccctcaccagaaacacgaaatgtccaaacgataggggtgtgtatgcagttatgattcaggcgcagatttcggtttgcgcctgaatcttttttcggacggtcgggttgcttcccgattgtttcctttggtcggagctcgtcccgactttccgatagagctgagctgtgtctgtgtcggggcagtgcggaccggatgccgctgtttcggttccgtatgctcgtccgtgtctgttgcctccggcggaatgtgcagcggtcgaggttttaccggagcgtctgtttttcggatcccgatttgtacggcacaccgccgcttcgcgttgtccggtttttcgggaggagggatttcttgcggtgtggacttcgcaaattataatttgagggttgcggggacgcagagagcgttgttaaaataaaatcggaaaagacgcacgggtcttttccgatttcgttgtatggattgttcgcagtcggcaggacggattttttcccggatcattcgggaatttgcaccgagtccgacggtgtggacagatcgggatggatcaactcgttttcataaatgcccagcgtgcggtagtagtcgttgagctgggccagcacgtcttggcgtcccatgtaggccgccagatagtagagccggtcgagcgattgcatcttgtcgatgagtgtctgcgtgaccatatcgccctgaatgccttggaaatcgaggtagtagtcgatatactgcatcaggttgcgggcatagctcatcagcaggccgtcgcccttgtccggggcaccggccatgtagtagccttcgatgaaggggagggtgttggcgtcggtgtagcggatctgttggggcggcagtttttcgagtcccatgtcgagcagccggatcgcctgtgtcgaatccccacggaaaacatactccttggctgcacgggcgaaggattcgcgggctttcgaggcgctcagggtatgttggatggtgtggtcggcgtaggttcggggatcgctcaggtttccgtaacggaatgtttcggtcagcaacggcgttacgtagtccggatcgacacgcccgatctcctgcacgttcctgcatggcgtgtagatcggtaccagccggtaagtgtaaccgtcgaactggaggtaatcgagcagcccgagcgattgcaacgtgtaaacctgtgtgaaatggatcggacgcttccagtcgaaatgggccagcatgtcgagcagcatcatctcgctcttgttgatcgcccgtttgggcagttccatgtagatcgtatccaccatcaggtcacgatcggcttccttgacgatgcccgaggcgatcgcgttgtccttgtttacgggcagggcgaaacggttgctcggcaggtagtcgattttgcttccgttgctcagaacaagtttggtgcgcggatcttcgttgcggataaaatcgatggcctctttcagctccaacgggcggtccacgatgttttctatgggcagcatgtcgttggtgtaggtgtatttgctgcgtggcagcgtgaaggggatgcccggcgcatcgttggctttggttttcagttcgtcgatgtaccattcggcgcccaggtaactcgtgttcatgatccgcacgtccgggcgcacgccgtccacctcctgattgaaccacaggggaaaggtgtcgttgtcgccgtagttgatgatgatggcattgggcagtaccgattgcaagtagttccagccgatgtcgcgggccatcgtgcggtgcgaacggtcgtgatcgtcccagttctgggccgcgagaatgcccggtacgaccatgcagacgaccgtagcggctatgggagccatgaggcccttgcgtcgggtggcccagacgatcaggtcgcacacggcgagtacgcccaggccgatccagatgcagaaggcgtagaacgaacccgcataaacatagtcgcgttcgcgcggttcgttgggcgaggtgttgaagtaaaccaccagcgcgatacccatcatcacgaagagccacatgacgatcgagaagttgcgcggatcgcggttgagctgatagatcaggccgataagacccaacaggaaggggaggaaatagtaggtgttgcgccccttgttattcgctatttcgtccggcaggttgtcctgcggcccgaggtaaagctcgtcgatccacttgatgcccgagagccagttgccgtcggtgatgatcgcgtcggtaggctggatgtcgctctggcgccccacgaaattccagaggaaatagcgccagtacatgtggttgagctggtaggtgaagaaatagttgaggttctcgcggaacgtcggctccacgattaccagcggttcgtagcccgaaccgtcgtcccaaagcgtccggcgtccgaaatcgagcacttcgatcttgttcgggcgtccctgcgcgtcgcggacgatttcgccgttttcatcccgttcgtaatcggtccgggtgcggtaggcgctccatgatttgtaactctccttgctggcagcgtagttccacatacgggggaacagatgcatgaactcgtcggggtgttcgtacccggagatgatcgaaaccgttttgtacttgccgtcgtcgtccaggtagcggacatccttgtatttgtaaccggaggtcggggccgagaactggggaccgtagagcagcggtttgtctccgtactgatcgcggttgagcagcgaatagagggcgaacggattgctcgggttgttgctgttcatcgggggattggccgcggcgcggatcgtaaccgatgcgtaggacgagtagccgatgaggatcatcagcgtcgagagcagcacgagattgagcaccgtgcgcccttttttatgggtgaaatatacgcccatgccgagcgctcccaacagggctactacgaagaacacgaggccggaattgacgggcaatcccagtgaattgacgaagaagaggtcgaacaaggcgccgatatagaccgtatgggggatgatgatactgttgatgaaaaccagaatcgcgcccgaaatgagggtgctgaccgcaatacctttgaacgtgatgcgctgcgttttgcggaaatagtagatgaataccagcgcgggaacggtcagcaggttgaggatgtgcacgccgatcgaaagccccatcaggtaggcgatcagcacgatccagcgcatcgagtggggctggtcggcctgttcctcccatttgagcatgagccacaccaccagggcggtgaacatcgacgagagggcatatacttcgccttcgatggccgagaaccagaaggtgtcggtgaaggtataggcgagtgctccgaccgcacctgtacccaatacggccacgatgttggctttcgtaagctccgcgccctgacgggtgaggatgcggcgtgccaggtgggtgatcgtccagaaaaggaacaggatgcagaacgcgctggccaggcagttcatggcgttcaccatgtggggtacatagtacgtcgagggtgccagtatcgtggccaggcgggccagcagcatgaagagcggtgctccgggcgggtgccctacttcgagtttatacgaggtagcgatgaattcggagcagtcccacaggctcgaagagggctccatggtcagcagataggtcatggccgcgatggcgaagacgatccagccgacgatgttgttccagcgtttgtagctattcatttgagtttcggtttgtccgcaaaacggcatgtcccctgcgtgcgaagtcgaacgttcggttttttagggcagtccgtcggatttaagtctgttgttgtgtacaaatacgatgaaagccgggtgcaaaatcgattttgccggattttgccgcaacgggtttcccgtgctgtgcaaagatagtgaaagccgggagaaaacgggaacttgttcccggttttccgaggcggatcctatcttctgcaaagatattaagataacgcttaaatcgggtgtttatttttgttttttgttcggattctttattatcgtcggtaaagtatggggtgccgcaggccggaatccgggtatatgaggtgcgagattcgttcgattttcgggggatgcgggattccggttgtctgccggattctgaaatttcaacagagaggagtatgtgttggcaaagggagagtatatgcggatctgaatcgtgttgtggaatgaattcggaaaaatttttataaggaatgccgacctgtgaaaaaccggtccgattcataatcggaccggtttttttgtcttcggagcaactcctgaaagatcaataggagtaatcctcgcagggaagttttccggtgtattcgatttcgagctcggtatttttgtcgtcctcgtcgatggctttgaatgagcccgtaatggtatagtcgtcattgccgttggcgacgattttgagagttccctccgtgattctgttcttgatgattccgtaggtgggatcgttgtagttccagaaggatttcgccagatcgaaagtcatgttctcaccggcggcaccgcccgtgtagtcgccgctggcgagttgcagaggatctgtgggcgcgagcgtaatgtagaacgtgatgccgtattcttttatcggagagccatctttcaggccgaggaagaatacattgtccccattgtagtagaggtcgccgacggtcatggttgctttcggtgcttccggagccggaggagtcgaatagttgttgaaaggtactgtgccggtaaaatcgatcttaatggctgtttcctgtccggtgtcgctcgctccccggagagtgccggttacggtgtagttgtggttcccgttgtttgtcacggtgagtgaaccttctttgatcgtatttttgatccggtcgttgaaattctccttgtcgatgaatgtccaagaggatttggctgcgtcgagggtcatctctccgctgccggtcgatacggggtagtcgccgctgacgagctgcagggtctccgaagcgggtagtttgaacgaaagcgacgcttcgtaagtatctgtcgggttggcgtccttgagggtcagagtatagatattgccgtcgtagtagtccaggttgccgatggtcatggtcacctccgcaacagtcggttccacgggttccggatcggcgtagtcctcgaaaggaagagtgccggaaaagttgattttcagagctgtgtttttaccggttttatcggatgtaccttccagtgtgccggtgatcgtgtagttgtggtcgccgttgctgacgatgtgaattttggttccctccttgagccggtttttgatcttgtcgttgtggttgtccttgtcggtaaagttccagaatgacttgctcgcatcgatggtcatctcttcgcctgtcgttgctgccatatagtcgccgctggccaacaacggtgaatccgaagcgggcagcttcaagtaaaaggttgtctcgtagagatcggcgggattggcatccttgagctggagataatagatgttgtcgttgtaacgatacagggagccggtggacatggttacctcaggcacttcgggtgcgggatcatccggagtatccggatcatccgggtcttcatagtcttccgagtaatcggaaatcagcaaccgacctgtgaatgcgaacgctacgcccgcttcgttttccataatggaacccccgtcctgaatggagccgcctttcatgtggcctctgatcgtgtaggtcatgttgtcgccgatggcgacttcgaattctccggcttcggcaacgtattgtgtccatttgggggcgaccacattccagttggaacggtatctagtcgtatttttattgttgaacgtatttatttcccaagtggaggaggcggtgtatttcccggccggaagggtgaagctacccttttcctgtcgtgggacattgacataaaagcatacgctacatccgcgggcagagttgttcaggtctttcaggtagaggaaataaacggctccgccttctttgctgtattcactgtcatgcccgtagtacatcagttcgccttcggtcatcgtatgggcgatgtacccggtcatgggcggattgggatcgtccggaatttggggtccctgtgggtcgtccgggtcgttcggctccgtctgctccataccgttgtctttgtcgctgcatgaaggcaggcatcccaaaatccccccccc

SEQ ID NO: 10410 - DNA, 12811 bp, Unknown
  gut microbiota DNA sequence
agaaacgaggccggtcttaaaaaaaagcgctttctgcttaagtgttttctttcatgtaatagagatgttgtttttctttgttggaaaaaaatagataaaatattcggtatttgcaaatgtttttgtcttttttaatttattgtgtgtttttattggttgaaaaattgggactatctcgttcgacgaagtttgaaacgatatttttaagtgaggagacggtcgagatagtcgtctgtcggttgttaagaagatcagtccggactgaatgtccggactgatcgggaatttttcgtatggagccggtctgatgcttttctcctgaatggtagttttcaggagaggcgtagcgatcggtgtaatttcgacggttgccgtcgtcaatgttgtatggatgtgtcgtttgtcgtaatagggatgaatacgatgtccgaacagcgcagggcttcgtcatcgacggcaaaggcataaatgtagtatttggagttcggttcgagcgtttcctggatttctctggattgttgaaaggtatattggctcaggatcatttcggccgtgtagcccatccatccgtagatctgtacgttgtcgatccaactttccgatattttctccaaaacggtcgcatccgtatcggccgcatcgacgctgccgtagatctttgcgacaaaatggccgtcgtaatcgttcgctttgacaagaacgtcgatgttgagaccttcggtcgaaacgatctgtatgtcgaattttgtgtcgattgtttggggtgccagggttgtgagcgtcttttttgagatcggggtcagcctttcgatcgtgatgggatccacgccgtatgcgtaaacgaggtattcggtattgggttccatgttttcgatcagcctgtctgcaatagtcccctgttcgaggtattcttgtgcccagctttgccagccgctgcccgttgcgtccatgtctgtatagaagtcgatgtcgtattggtagagctcgtcatccgtcttgaaatcggcggcagcccgggaggggatgatgttcaacagataatacatttcctggtctccgggacggactgtagttcggaatgtttttgtggtgatgtccgaaatcgttatcgtaaatgcctcctccggacgggccgcctgttttgctgtaaaggaaggcgccggctggatatccgcgtacgaaacttcgatgattgcttctctcttttccgctgtttcgtttttggttacgttgaaagagatgacccctgcggttttggtatcgatgtccgttatccaactgtcgttgcatttggcagacagggtcgcatttgcgacggggttttcgatcgtgtattcgatttggaaaggtcctccttcggccggaacatcgaggctctctttggcgaatacgatttcaggctgtgcatccggtgtgacgggatcgtcgttgttacacccggcaaagagcgaggaacccaaaatccccccccccgaagatcatcaacaaccatacgaatctaaaatatttcatagtataaaaggttttagtgccgggcctacggcgggtttttattttcggcagaaacgaggccggtcttaaaaaagcgattctgtccgggagttttttgtgtgtgaagagaaatgtgtttttatctatctgaaaaatagataaaatattttgtatttgcaaatgatttttatttttgatttgcagggtgcttcatattttattcggggtttatgcggtatcaggtcgggagcgtgttgctccgaacgatggcggaactgcaaactttgtcttcgtttttactgtttttgtgggaaaaatgttaattttgtggctcggaagatattgcttgttatggaatcgaaattgaccctttacaacacgctcgaccgccgcaaggaaaccttcgagccgatcaatcccccgcatgtgggaatgtatgtctgcggacctaccgtatatggcgatccgcatctgggacacgcccggccggcggtgaccttcgacctgttgttccgttatctccggtcgctcggctacaaagtgcgctacgtgcgcaacgtgaccgacgtgggacatctggagcacgatgccgatgacggtgaggacaagatttcgaagaaggcgcggctggagcagctcgaaccgatggaagtggcgcactattacacggagcgttaccaccgggcgatggacgagctgaacgtgctgtccccctcgatcgaaccctgcgccagcggccatatcatcgagcagatcgccatggtgaaggagattctcgacaacggtttcgcctacgaatcgaacgggtcggtctatttcgatgtggagaaatacaaccggaaatacagctacggccgtctttcgggccgcaacctcgacgatattctgacgaacacgcgcgagctggacgggcagggcgataagcgccattcgtgcgatttcgccctctggaagaaggcttcgccggagcatatcatgcgctggccttcgccctggagcgacggcttccccggctggcacatggagtgttcggccatgagcaccaaatacctgggccagcggttcgacatccacggcggcggtatggacctgatgtttccgcatcacgaatgcgagatcgcgcaatcgacggcggcgctcggccacgactcggctaagtattggattcacaacaacatgattacgatcaacggtcagaagatgggcaagtcgctcggcaacttcatcacgctcgaggagcttttcacgggcaatcataagttgctgacgcaggcttattcgccgatgacgatccgtttcttcgtattacaggcccactaccgttcgacgctcgacttttcgaacgaggcgttgcaagccgccgaaaagggactcgaccgcctgatgaaggctgtcgaggcgctcgacaagatcaagccgtcggagcaatccacggtggatcctgcggagctcgaaacccgctgccgcgaagcgttggacgatgacctgaactcgccgatggcgatttccgcactgttcgattgggtgcgcatcatcaatcagttggtcgaggggcagcagcggatcacggcggccgacctggagaagctccgggagatcgtccgtcgttatgtgttcgatattctgggtttgcgcgacgaaaaggcggcttcggccggcggcaaggatctggtcacgccgttggtgaatatgcttctcgacctgcggcaggcggccaagaccgagaagaattgggcgctgtcggataagatccgggacgagcttacggccatcggtatccgggtcaaggaccgcaaggacggctgcgactgggagatcgaatagcgtttcgtcgttttaattaaagtattgataaatcgatcgttcctgttcggtgtattccggacgggaacggtgtgtttggatcgtgcgggcggttgccggggcggaaagtccgtcgcagccgtttcgtgcgtcgaatgattattgaagggaggacttgtgtatgagtgaagtaaaaggagcggcgatggagctgggaaccgagcgtatccgcaagctgctcgttcaatatgccgtgccggccattatcgcgatgaccgcctcgtcgctgtacaacatggtggacagcatctttatcgggcacggcgtgggggcgctggccatttcggggctggccctgacgttcccgctgatgaacctcgcggcggcgttcggttcgttggtgggtgtgggcgccgcgacgctggtgtcgatgcgcctggggcagcgggattacgaaacggcccagcggattctggggaatgtcgtggtgctcaacctgattatcggaatctctttcgggttgctgacgctggtttttctcgatccgattctctactttttcggagccagcgatgcgacgatcggctatgcccgggagtatatgtccgtcattctgtggggtaacgtcgttacacacatgtatttgggtctgaacgccgtgttgcgtgccgccgggcacccgcgcaaggcgatgtacgccacgatcctgacggtgacgatcaatgcgattctcgacccgctgttcatcttcggcttcggctggggcattcgcggcgcggccattgcgaccgtgctggcgcagatactcgcgctcgtctggcagttccgcatcttttcggacaggaacgagctgttgcatttccggcgcggcatctaccggctgaaaggcaagatcgtgcgtaatgtgctggctatcggcatgtcgcccttcttgatgaaccttgcggcttgtttcatcgtgattctgatcaacaaggggctcaaggagtacggcggcgatctcaatatcggtgcttacggtatcgtcaatcggttgggattcttcttcgtgatgatcgtcatgggcatcaatcagggtatgcagcccattgctgggtataattacggtgcccggcagttcgaccgggtggatcgggtgctgaaattgacgatcatcggcgctacctgcgtcaccacgctcggattcctgatcggcgaattggcgccgcgcctggcggtgtcggttttcacggacgatccggagttggtccgtctttcggccgaaggtatgcgcatcgtcttcttctgcttcccgatcatcggtttccagatggtgacgaccaactttttccagagtatcggcatggcgggcaaggcgatcttcctttcgttgtcgcggcagttgcttttcctgatgccgggtctgattttcctgccccgcatcttcgacgagctgacgccctgggacggcagttggggcgtatggtgttcgatgccgctgtcggatttcctggcttcgctggttgccggtgtcatgctgttctgccaattccggaagttcaaggccaaggccgctgcggggagaggcgaggtttcgggagccgaagtcgaaaacgatcgcagagtgaatgaataaaaaccgttgcactatggaacaggataagttcgttatcaatataggccgtcagctcggcagcggcggcaaagccgtcggcgaggcgctggggcgtcgtctgggcgtgcacgtctatgacaagcagttgatcaatctggcggccgagcagagcggcctctgcacggaacttttcgagcaggccgacgagaagaagtcgaggagcctcttttcctcgctgatcggttacctgcgcatgcctttcgggggcgacgagtgcgggatgaccgacgtgttgagcagcgaggcgctgttcaagatacagagcgacgtgatccgcgacatcgcctcgcgggagtcgtgtattttcgtgggccgttgtgccgactatatcctgcgggatcatccccgcgcggtgaatgttttcgttacgggggctccggaagatcgggtgcgtcgcctttgcgagcaggagaacgtaacgcccgaagaggccgaagcgcagatggagcgtacggatgcccgcagggcttcctattacgactatttcagcagcggcaagtggggcgaagccgcaacctaccatctctgcatcgattcctcggtgctggggatcgaaggtacggccgactttatccgggagttcgcggagcgtaaactgaagatgaacctgtccgggcggtagtcggcggcttcgagcgtgttcggcataatccaaggatgcgtcggacggttttgggaagggatgaaggaaacggttttcggacggtcagtgccggtgtgatggagcctgttttcgatcggtgggttgtgataacgttcggtagcccgttgcccgaggcgatcttttcggtagaagggtttgggcgtccgacttttttcggccaggagctgccagggcgggatcgtttttattggcaacgagcccggttcctatttccgaaaaccggaaattttgtttacatttgttggaagaaagacaggagaggcggctatccttgcgggagagtctgtacggattgcctcgcctgtaaaaatcaatcggaaaatatggtacttgcagaacagattaaagaggctataagacgtcaggatacgttggggaggtgtctttgacatcgatcagcgaagaatagaactccagaacgaggaggagaagacgcaggttccgggcttttgggataatcccgacaaggcccgcgaacagttgcgccgcgtggcgggaatcaaggcgtgggtcgaggagtacgatgctgtggtcaaggaggtcgaggacctgcggctgatgccggaattcgtcaaggagggcgtggtgaccgagcaggagctcgacgagcagtatgcgcgtgcgatgcaccgcatcgaagaactcgaattgcgcaacatgctgcgccgtgacgaggaccgtatgggcgctatcatggatatcaattccggtgcgggcggtaccgaggcgctcgactgggcggggatgctgctgcgcatgtacacccgctggggcgaggcgcacggatacaaggtcaaggtgctcgactatcaggctggcgaggaggtaggtgtaaagtcctgcacgctcgaattcgagggcgaatacgcctacggctacctcaagagcgaaaacggcgtgcaccgcatggtgcgcctgtcgccgttcaacgccaataacaagcggcagacgactttcgcgtcggtgttcgtgtcgccggcgatcgacgatacgatcgaaatcacggtcaatcctgcggacatcgagtgggataccttccggtcgagcggtgcgggcggccagaacgtcaataaggtcgaaacggcggtccggttgcgctatcacggcaaggatgccgatacgggcgagccgatcgagtatctgatcgagaatatggagactcgctcgcagttgatgaaccgcgaaaatgccatgcgcatcctcaagtcgaaactctaccagcgggagctggacaagcgcatggctacgcagcaggcactcgaagctacgaaaaaacgcatcgaatggggttcgcagatccgctcctacgtcttcgacgaccgacgggtgaaggatcatcgtacgggagtccagacctcggatgtcgagggggtgatggacggcgacctggacgaattcatcaaggcctacctgatggagttcggcggacaggcgtaagcgtggggatgtgagaatattgcagggggggcgaaaattttattttcgccctccctcttgttttaagtttgttttattcgatcgaatggatcgaaatcgtattttctgctgcgggtccccattttccattctttttttgcagggcgtccgtttcaccccagaatccgtagtcgcattggatgatagcttccgtgagtgaagtgtttattacgatatagctgaagtagggtgatgatcgtggattcggataatgtaaaaaggatgaatagcacacgggaaatttacttgtataaaagttgagagcatgttgtgaataaataaagcttttcgactttttgacttcggagtcgataaaactgtcaatggcttttttgtaagatggaatgagttttaagaaccgaatttgttgaggcgcattgcagggacggtaccctttgatgattcgttgcggtgtataatccatttgggaaaaccattgatgcgacgataagtcttcaggacggaaacaatcgagatattcttcgtcacttaaaatatagacgggaacttctcccggaaaaaccaagttgccgttgacgatccgcccctgtttgtccggagagagttctttgttattgaaataatatttttccattaggtagtccaaaagttgataaacagttgttgttagcttatcgtttgtgtcgtatatcgccgcggttcggctttcctgctcccatttttcgatgaatttttcgattttttccgaagactgctcggagcatgccgtagtgagttcagagagtagtcgctccgcatctggagtgtctgcgcaagggttacggttttgggcttgaacgattccgagtgtagcaaaagaaacaaaagcgataagcaataccggcaaaaattggatcagacggtttttcatttttatatggtataagttcaattaatcaaagatagtaaattttctgtttttgattgactgatatttttaggtttatccgttttttcgtatctgttgcttccggacaggcggcagatgtcgtcgcagcgcggaatttactgtcggatgcgatcagcccggttccgacggagtccgtacgggtcggtacgaccgatacggcgatgtattatccccggcttgcagggaagcgtgtggccttgcttgcgaatcatacttcgaggatcggcgaacggcatttggtcgatattcttcacgcgaggggattcgatgtgactgcaatcttcgctccggagcacggattccggggaacggccgattccggagagcacatgggaggttccgtcgatgcggcgacaggtattccgatccggtcgctctgcgacgggaacacgcggaggccttccgacgaggcgatgcactcgttcgaggtggcgtgaacaggttggatgcgggcgtgttatacctaaattatatagagcgattggatgcctgcgtaggtttcgagcgggaagccattggcccggagcggcccaatctcaacggaatgctcatcgacggaccgattctcgaagaacgatacgaggcggggtggaatatgtgtgccggatggttgtcgagggatatgctgcggaggagatccgcaaccggtggcgggaggatatcgggttgtcccgtattcaaagaaagccatctcttttatacgaagagcgacctttattccgttctattcgtgaataaagtctgcgagtatgccggaatcgctcgcaaagcggaggaaatgttgtttttattatccgatttttcaggccgattcgaaataaatttctatatttgcaacgatgccctttgaataaatgaggagcaggaacgaagaaatttgcataaataaacccaataattttttaatacgtatgaaaatcaaaatgtttatgttggctgctttggcagcatttgcgaccttgttcgctggttgtagcgacgacgaaaacaaaaccaacggtgacggtggcaatgacggaacgggaggagatcctgtcgagagcgaatataaggtgacgttctccgacacgtcttattacagttcggttgctacgttcgaggcgattacagagaatgccaagtcccagtcttttatggctgtggtgtttgagacggcgttcctggagcagcaaattcccggaattacggataatgatattgcgaaaggtgtcatcaactattataaggcggaatatatgtcgcagggagccactgttgctgatatttacaatgtgcttactcagcagggacggttgcatggtagtgtaactcctttggaattggatgtccccggtttgtcggcgggtacatcctactcggttgtcgttgccggtgtcaatgagaaccttgaaattgtcgctaacggaatcgttgccgagtttacgacgaaaacgttgcccggcctggaggaggagaattgtactttcgaatggacggttgagcctaaatcgacgtccgtaacaatgagttttactccttccgataagaaggtgccctatttcttctatgcgctgacagctgaagagtatagttcggaatgtcaaaacgaccccgcgatactgaaagagctgctcccttcttttatcgctaacttggccaaggcttaccagatgtctgtttccgagtttatgaagaaacagcggatgacgggtgatttggaggagttcacttttactggtttgctgcctaaaacggggtatgtcgtattcgtgtgcggtatggatgagtacggtcgtccgacgacggatgtcagcgtgaaggactttgaaacgttggaatatgtcgcttcggatgctacggtggagagcgtggatgtccgtctgtatgacggtgaggaggcttcgtcaattgatccgactacgtataagcccgatgattacggaggtgcctatttcttgcgatacgtaccccagttctccgaagagtgtgccgaggtttggaatatgttggtgaccgatgtggatttttcgggtgagtctgacgacgtggttttgtcttacattatgagtatgggctttgatgcaaatacttctatgatggatatagtcaagcttcctgagggccttatggtttacgcttatatcgtagcacagaacgaggccggagagtatggtaatatttaccgatgtgaaccgttcgaggtgagcaaggctaacctcagtccggtggaggaacttttccccgagtctaattcgaagagcggaatctcttccgtagctttcagttcggtgggcaagatgtgtccgaagaccgtaaattcgatgaaaatcgttagcgtgttgtaattcggccgctgaccgaaaccgaagattcccgaagtaatttcgggaatctttttttgcgtctttcggaaccggggaggagcagctggaggaaattccgggaattgagtccgaaatatttggcactttgtggaaaagtatttaatttagtaaaaaatatcgcaatgatatattttggtggatctctttgggaatgtagcgccaagttcctccgaggaggggatgtaggggagaattgcattacagacgcagccacaagctgcgaataggcgacccttgcgatgctgcgatctcggatgatggtacactgaaatatataattgcccaaaatgtttattgcaatgagtgtatctgtgaacaagacatattcggcggccgatttgaaattcctcaatttgctttcggagaaattcccgaccattgccgacgctacgactgaaatcatcaacctggaggctattctgaaccttcccaaaggtaccgagcatttccttacggaccttcacggtgaatacgaggctttccgccacgtgctgaagaacgcttcaggcgtgatccggcaaaaggtgcacgaggttttcaacaatactttgcgcgaatccgaaatgacggagctttgtacgctgatctactatcccgccgagaagctgcaactcatcaagcagaaggaatcgaatctggacgactggtataaggttacgctcaaccagctgacagaggtctgccgggccgtttcggtcaaatacacccgctcgaaggtgcgcaagatgctgcctccggatttttcctatgtcattcaggagcttctccacgaatccgattcgccgggatcgcccaaacagagttatttcaacgggattcttaattcgatcatctcgatcggacgggcggatgctttcattatcgccatgagcaatgtgatccagtgcctgacgatcgaccgtctgcatatcatcggcgatattttcgatcgggggcccggtccgcacttcattttcgatacgctggcccagtacaagatgtacgatatccagtggggtaatcacgacattctttggatgggcgctgcggcgggaaatttagcttcgatcgccaatgtgatccgtgtgtcggcccgctatgacaatctcgatgtgttggaggacggctacggcatcaatctgctgccgctggcccgcttcgccatggaagtttatgagaactcaccctgcaagccctaccagcccaaagtgatgcagaattcgggtgttacggagcgcgatgtactgctgatggcccagatgcacaaggcgatttcggtgatccagttcaagatcgagggacagatgatcaagcgccatcccgaatacaagatggaggggcgggctttgttggagaaaatcgactacgagaagggaaccatcgagatcgacggcaaggattatcccttgaaggacgccgactttccgacggtcgatccccgggatccttataagctgactccgggcgaagatcagcttattcgtacgttgcaagcctcgttcctgaacagcgacaaactacagaaacatatccggctgctcttttcgaagggcagtatgtatctgatcgtcaattcgaacctgatgtaccacgcttcgattccgatgaccgacgaaggggagttcaaaacagtcatcgtggacggaaaaccctatgccggacggagcctgctggacaaactggaccgcctgacccgggaggcctatttcggtggcaatggggccaagagtcagcagatggcgctcgattacatgtggtacttgtggtgcggccccgaatccccgttcttcgacaaggccaagatggcaacgctggagcgttacctgatcgaggacaagaagacgcaccacgaggagaagggagcttattacaagcatttggatgatacgaagatgtgcagtatgattctttcggctttcggactcgatccagagaaatcccatatcatttcgggacacgtgcccgtgaagacctgcaagggcgaaagtcccatcaaggccggcggcaagctgctgatgatcgacggcggattttccaaggcgtaccattccgaaacgggcatcgccggttatacgttgatttacaattcgcacgggctgcaactggtgcagcacgagcctttcgagtcggcggtcaaggccgtcgaggagggaaaggacatcatctctacgaaggtgatcgtcgaggcgacgaccgaccgcatcacggtgcgcgatacgactatcggcaaggagttgcaggtgcagatcgacgacctgaagaacctgctggcggcctatcgcagcggccagatcaaggaacgtaagtaaccgaaggcagcattgctgcgaaatatccgtgtccgggggactccttttatccggtcggaattctgcgaaagacgactttcgaaggagcgaatcggtcttttcggttcggcagtaagggagtggtaatactgttaagcgggccgcagtagcgatactgcggcc

SEQ ID NO: 10411 - DNA, 33852 bp, Unknown
  gut microbiota DNA sequence
gtttaactcgtcccattttaacgggacactaatgatgttttatatataaagattgattctatgagaaaatatatgtatttgatatctattttgatattatcatcatgtcaagttgcagatgtccaaaatggtacagaaaagaaagataattttttgcaggaggttggtcgcttaagtgattttgtattgtctcaatcaaaagttggagggtatctgtctgaagaagatgctgtaattttagataattggttaaaagagttgtctactcgatatgattttcaaaataattttgattattgtggagatatttatactcgttctgattatgaaccagatttttatgattatttgaattggattgaagaaaatgctacttctggtttttaccaaattatttatcgttggctggttgatgaagaatttgatgatgatttaaatcaaattcttgcaaacactattttgttgccgaatgaacaggttgcaatagctgttgtttatccattggtacaaaattctttggtggaatttgaaagccgagggggagttgatcaatgttacgatcaatataatagtgatataaaacgctgtaaaagggattatcatataactatggctgtggtgactgccgtttcggtcttatccggaggaagcgctgcgccggctgctgcggtatccctcgttggaaataccgttgctttgaagagttgcatggatggtgctgcccgaacttttgatatttgtgtgaagtatgcaaaatagagattcgaattggagacattttctgggagaccgctgtcggatcgtgcgatgcgatccggttcccgggcggatattcacttccgagaggctgctgtgggctttggcggttgtgatcggaatcgagctgcttgtttcccaggtcatctcttgggaagtatcggtttgggtagcgatgtgtggtgacggtttgcttgcactcgggaccttggggttgttcctggcccgaatataccgcaaccgggaggtggactggttgttgcttttcgttgccgtgatgatggtgctgttggccgctaatcattgggagatagcgcagagccatccgatcgcggggtgatacgccccgttgtttctctaacgccgagtcgccggaacctgcaaaaggcccggcgattcggcgtcagaggtgaatcgctgttttttatttttcggtgtccgtaccgaaaatgttgaaacgccggagcagcgggttgcggcggtcgagcagcaggaactccagcaagagcaggacgagggccgctccgatcaggtattggaactgttcgttgaactcctcgaagcggagggccgccaggtcgcctttttccatattgttgatcgtgcgtacgatttcgtccagcccgatcgactggttggtcgagcggatgtaggctccgtcggtcgcctgtgcgatcttttcgagcaggggttcgcccagtttcgatacgaccatctctcccttgtcgtccttgatgaactcgccgccgatctggatcggagcgccttccggcgtgccgatgccgatggtgaagatgcggatgccctgttcggcggcccgttcggccgcttcgatggcgccggagtcgtgcccttcgccgtcggtgatgagcacgatgacgcgtcctgcggggttatctcccttttccgaaaaggacatggtggccagcgagagggcctgaccgatgtcggtgccctgcaccgaaaccatcgaaggggatattctgcgggcaaaggctttggccatgcggtagtccgaggtgatcggcagttgcactacggcgtcgcccgcgaagacgaccagtcccacgcgatcctgcttgagtccgtcgaagagcttgtcgatggcgtatttggtgcgttcgaggcggttgggctggaaatcctcggcgagcatcgagttcgaaacatcgaccacgagcatcatctcgataccccggctctccacctcgcggagtttcgaacccagctgcggccgtgcgagcgccagggtgagcagggcgaatgccgtgaggtacaggatgaatttcagacgccggcgccccgtagaagcgtcgggcatgagcggacggatggtttcgagccggccgaaacggctgaggcgccggcgtgcgagctgtccggcggccgtccatacggcgacgagcaacgggaggagccacagcagccagaggtattcgggatatgcgaatctgaacattacggcagggattttaaccagagggtacgcaacagaaattccacgagcagcagggccagagccgccgctgcccagcggaggtactcctcggtgtaggtggtgtattgcgatatttcgaccttgctcttttcgagctggttgatttcgtcgtagatggactgtagtttggcgttgtccgtggcgcggaagtaacggccgcccgtgagatcggcgatctcgccgagtatcttttcgtcgatctgcaccttggcctgcacgacggtcgggttcccgaagaagtccaccgtcggatagggggccgtgccgcgtgtgccgacaccgatcgtatagacgcggatgccctggtcacgggcgatctccgcagccgtgaggggagcgatttcgccccggttgttctctccgtcggtcagcaggatgatgaccttgctcttggcgttgctctcgcgcaggcggttgattgccgtcgccagtccgttgccgatggccgtgccgtcctccaccacgccgctgcgcaggcgtcccagcagggtttgcagcgttccctgatcggtcgtcagcgggctttgggtgaaggcttcgcccgcgaaggccaccagtccgatgcggtctccggggcggtcggtgatgaagttgccggcgacctgcttggctgcctggatgcggtcgggctggaggtcctgggccagcatcgaggtcgaaatatcgatcgccagcacgatgtcgatgccttcggtgttgctcgtcgagccttcatcgaccgattgggggcgggccagcgctacgatgaggagcgcgacggccgcgcagcgcagcgcgaaaggcagatgccgcaggtaataacgtacggtgcgcggtgcttcggcgacaccgtcgatggtcgatacttggatcgaagcgccgccctgacgggtccgccagacgtaatagaccaccatgagcggaatgaccgcgagcagccacaaaaagtatggagaggcgaattgcatagccgtttcagaattgattcgttaccagtttttattgccgcgtaccacgaccccggctttctccttgagtttctcctgggtcttgtcctcctgggtctggatcgcatccagcatccgttcctgttcttccggggagatgccgttttcgcggggttggccgggctgccggtcgtcgctgtccggcttgtcggaatcctgcggctgttcgtcgggattttgtccgttcttgtcgggatcattctgaccgttctgccggtcttgttgatcctgttgctcgccgcccttgtcctgctgccggtctttgtccgaattattatccttgtttttgtcttgattctgatcctgaccgccgctgttctgctggtccttgttctgatctttgttttgatcctcgttctgctgtttttgcagcagtcgcttggtgtaggcgtagttgtacttggcctcctggtcggcaggattcatccgcagggagttcttgtagctttcgagcgcttccgggtatttttcctgtttgaattgggcgttgccgaggttgtagaaagcctcggcccgttcctggtcggtgcgggtggagtctgcggcgatgcgttcgagcatcttggccgcctcctcgtatttttcggtacggtagagggcgccccccaggttgtaggcggcctcgaagttttcgggggccgcttcgagcgcctgcgtgtagcgttcgatgctgcggtcgtaccgctccttcgcgaaatcccggttgcccttgcgcacgaggctgcgctcggggtatttctgggccgaggcgctgccgattccgagcaacagggtgatgaatatcagtaggattctgtttggcatggcgtgtcggatgctattgggtgtcgtcctgttcggtgccctcctccgcgatttccgcaggcttggtctcctcgacgaaatagtaggcgttcaggtagttgtcttcgttggtcgtcccttcggactgggctttggcgaatttcgccaggtcggcgtcccggaggatcgcctgcaggtccatgacgcatttctgcggcaggtcgtaacggcggactgccgcgagaatttcgtcagaggtcatctccatcgcgccgaagccgtatcgtccggccagataagtgcgcaggatgtccgtcaggcccgagtaatactgtttgtggcgtccgctctgccagagtttctggttgtggagcgtttcgagcgcttggatggccgcgatgtggggcggcaggggcggtgcgggacggaagatgtcgcgtaccttgcgggcgtagcgggccatcaggcggcggcctgcgtagatcgcgccgcccaggacgatcaaacccagcaggctccagaggacgtagccgctgatttcgccgtagcggaagggcagcgtgcgctgggctttgatgtcgtagatcgtgtgcgacgtggagtcgatctgaaaggttcccacctgcagccgcagggtgtcggcggtatagagcgtgtcggtgatgttcttgtccagatagagcacttgtgcgcgtcccaggccgaggttgccctcctcgaacgccgccagcgtgtagcgtttgcgcaggctcaggtggcgtccgtcgcgccggagggtgtccaccggatgcgattcgacgacctccagtccgctctgcggaggcgggttgaaggtgggaaattccacgacctgcaccaaatcacgatcgacgtcgatcaccacgtcgaagcggtcgccgattccgatgctgtcgggttcgacgcgggcggtgatcgtcggcggtgcggcgtacagaacggtcgtcagccccgtcagaagagctgtcgccagagctgtttttactcttttcgtgatggatgtccgaccggctttcggacgacccgaagaccgcaggccgacgggcaccgcttccgaaggaggtgtttgcgcggcattttgccgctctgcggtggcggacggttgaataccgccgttgcgtgcgaacggggagcaggttgatgccgggttgtttgggatcgacttcatcgctgtttgaatagtttgatgagttccacgacgtaatccccgtcggtcgatacctcggccgtgtcgatgcggtggtgtttgagcgccgagaggatggcggcgctccgctcctgccagatacgggcgtagtgctcccgcacccgggccgaggaggtgtccacccacgcttttcggcccgtttcggcgtctttcatttcgacgatccctacgtcgggcagttcggcttcacgggggtcgctgacgcggattcccaccaggtcgtgttttccggaagcgatcttgagcgcgtcctcgagcgccgcacggtccttgccgggatcgagaaagtccgagagcaggaaggccgtgcagtgttttttggtgacgttggtcaggaaacgcagcgcttccgaaatacgggtcccccgcgattgcggctcgaagccgaccagttcgcggatgatggccaggatatggctgcgcccctttttcggggggatgaatttctcgatccggtcggagaagaagatgcagcccaccttgtcgttgttctccgaggccgagaaggccagcacggcggcgatttcggtttgcaggtttttcttcaggcggtccgtggtgccgaacatccgggagccgctgacatccaccaggagcatcatcgtcagctcgcgctcctcttcgtagaccttgatgtggggcgtgcgcgagcgggccgtgacgttccagtcgatgtcgcgcacgtcgtcgccggcgcggtattcgcgcacttcggaaaacgacatgccgcgtccccggaaggccgtgtgatactttccggcgaagatttcgttggaaagcccccgggttttgatctcgatcttgcggactcgtttcaggatatcgttttcggtctcctgcattattgcattttcaattagggtacgattacgttgttcaggatgtcggtgatgatctgctctgtggtgatgttctcggcctcggcttcgtaggtgagtccgatgcggtgacacagtacgtcgtggcagacggcccgcacgtcctccggaatcacgtaaccccggcggcggatgaaggcgtaggcccgggcagccttggccagcgagatcgacgcacggggcgagccgccgtaagcgatcaggggctgcagtttttcgaggttgtattcggccggttcgcgggtagcgaagatgatgtcgatgatgtatttttcgatcttttcgtccatatagacctcttcgactacgcggcgggccttgacgatgtcttcgggcgaagtcactttattgaccttcgggagtccttccccggccagattcatacgcataatgtcgcgctcctcctgtttctgggggtaggagatcttggctttcagcatgaaacgatcgacctgcgcctcgggcagcgggtaagtaccttcttgctccagcgggttctgcgtcgccagcaccaggaagggctcgggcagcggataggtttcgtcgccgatggtcacctgccgctcctgcatggcttcgagcagagccgactgcaccttggccggcgagcggttgatctcgtccgcgaggacgaagttggcgaatacggggcctttgcggacgaggaactcctccttcttctgcgagtagatcagcgtaccgatcaggtcggccggcagcaggtcgggggtgaactgaatgcgcgagaaatcggcatcgaccgccttggccagcgtggtgatggccagcgttttggccagccccggcacgccttccaacaggatgtgcccgttggagagcaggccgatcagcagggtgtcgatcaggtgattctgtccgataatcaccttgcccatttcgctgcgcagcgtatcgacgaagacgctttcgcgttcgatccgttcgttgagttccttgatgttgatgacttcactcatttttcggtgtgtattttcgatttttcgttgttttcggtatttatgcaacgcataccctacaaaattattgcaaaatatgtatttttttcgaaaatcgaaaatcccgaccgctcttttcgccctgatgcggggcggtgccccggttgaaaaaccgtacccgggcgccgcttcggggcgaagatcgggcggagggggtcccgcaggttcgccttcggttgcggcgctccgtcgtattattcggctgcggacgctccgtcgttgccgggaaatcgctatatttgcacgttatggaatctcaaatattgaaaggcctgaatcaggcccagcgggatgcggtggtgaactacgattcgccgtcgctcatcattgcgggcgccgggtcgggcaagacgcgcgttcttacttcgcgcatcgcctatatgatcgagcagggggtggctccgtacaacattctcgccctcaccttcaccaacaaggccgccgagcagatgcgcgaacgcatcgcccagatgctgccggacggacggcaccgctatatccgcatgggaaccttccactcggttttttcgcgcattctgcgcgacaacgccgaacggatcggcttccctcagagttttacgatttacgagccgtcggactgcaagaaccttctgaaaaccatcgtcaaggagttgaacctggacgataccaagtataaacctgcgatgctcgcctcgcgcatctcctacgccaagaactgcctggtgacgccgggcgcttacctggccaatgcgggtgccgcagccgaagaccggcggatgcagattcccgagttcggcaacatctacaacatctattgcgcccgctgcaagcggaacggggcgatggatttcgacgacctgctgttgcagaccaacatcctgctgcgggactgtcccgacgtgacggcccgttaccaggagcagttcaaatacatcctggtcgatgagtaccaggataccaactatgcccagtacgtcatcatccggcgcctgtcgcagctccattcgaaggtctgcgtggtgggcgacgacgcccagtcgatctattcgttccggggggccaagatcgagaacatcctttcgttcaagaaggatttccccaacgcgatgatcttcaagctggagcagaattaccgctcgacgcgcacgatcgtcgaggcggccaattcggtgatcgaacgcaattcgaaacgcatggagaagaagtgcttttcggaaggggatatgggcgaaaagatccgcgtgctccgagcctataccgaccgcgaggaggccgaaatggtggtcagcgatctgcgcgacaaggtgcgggctgcgggcgatgagtgggccgaggcagcgattctgtaccgcaccaacaaccagtcccaggcgctcgaagacgcgctgcgccgcaaaggaataccttatcgtatttacaagggcaattcgttctacgaccacaaggagatcaaggatctgctggcctatatccggctggttatcaacccccgcgacgacgaggccttcaagcggatcgtcaattaccctgcccggggtatcggcgatacgaccgtagagcggatcgctttgctggccaaagctcgtaatctgtcgatgtgggaagcggtggatgcgctgacggccgagccggtgacggatcccgtgcagaagaccatcgtccgcaaagtggccgagttcgtggccctcgtccgggggctgtcgttggcccgggccgaaaaggggctgtacgacctgggactcgaaattgcgacccgttcgggtatcatcggcgcttaccgggccgagaacacccctgaggcgaccagtgcgctggacaatatcgaggagctgctcaactcgatgcagctcttcaacgagcagcgcgaggccgagatccgggccggggaacgtcagcaagaggagcgggctacgatcgaggagtggctgcagggggtgatgctgatgaccgatatggacaaggatgatccccaggaccgcaacaaggtgacgttgatgaccgtacattcggccaaagggctggaatacaaattcgtgtatatcgtcggattggaagagaacctcttcccgtcgcagcgggccgtggagtcgcccgacggtttcgaggaggagcggcggctcttttacgtggcgctgacccgggccaaggagttggctacgctctcctatgccgagatgcgtttcaagtggggcaatatggagttctcgcgtccgagctgctttctgcgcgagatcgacagccgttacctggaaacggatgcgatgcaggaggagcgggaacccgtccgccgctcggccgggcggggagagggctcctcggcgctcgacgagctgcgccgccgtttcgactaccgctaccagcagaagcctgcggcgggtggttcgcaggccggggcgcgtttcggcggaggttcgtccgccggggtaaaatcggaggcgcagcgtcccgttgttgtccagccgacccgttcgacggccgggatgcgcagcgtgggtgtccgtcagggcgagtcgtcgctggtcgagggagctgcgcccgtatcgtgcggcgattatgcggtcggcgaccgggtgtcgcacctgaagttcggcgcgggggtcatccgccgcatcgaaaccctggcgtcggatcacaagctggtggtcgaattttccggatacggggagaaaaccctgctggccaaattcgccaaactgaccaaattataggaaatccgccggaaggattccggcttaaaacaggaagacaatgactttgaaggagcgttatgcgggggtgatcgcgtggttcgaggagcacatgcccgtcgccgagagcgagcttgcgtacggctcgccgtatgagttgctggtggccgtgatcctgtcggcccagtgcacggacaagcgggtcaatatgactacgccggccctgttcgaggctttccctacaccgcaggctatggctgccgcgactcccgagcagatctatccctacatcaagagcatctcctatcccaacaacaaggcgaaaaacctggcgggcatggcccgcatgctctgcgaggagttcggcggcgaagtaccgagcgatctgaaggagctgcaacgtctgcccggcgtgggacgcaagacggccaatgtcgtgggcgccgtgatctggcagaaggaggtgatgcccgtcgatacccacgtatttcgggtttcgaaccgtatcggactcacgaaccggtcgaaaacgcccctgcagaccgagctgaccctcgaaaaatacatcccttcccacctgctgccgacggctcaccactggctgattctgcacggacgctatgtctgcacggcccgggcgccgaaatgcgccgagtgcggggtttcgacctggtgccgcaaatatgccgaagacaataaacgatctaaaaccgaatgattatgaagagattttaccatgcgattctcgcttgcggagtgtttgccgcagtagttgcggccgtctcgtgtaccaaggatgcgaccggcggcggaggcggcggttacaacggggagccggaggtgaatcacgatatggacgggatcctgcggcgcaactacttgtggaacgaggagtatgcgactctttcgcccgatttcggcctgccttacgacgagtttctcggcgacgtgctcatgcgtatgaaaaccaacgacctggacaagaaattccgtaacggaaggtggcagctctattccaacatccagcgcctctctccggtgagccgggtagccttgtctgcggatatcgacagtcagttcccgaaggagcccgtttacgggttcggcatcgtttctctggcgattatctcatataccgataatggcggtgcggaaacggggcagtacggttttgccgttatggccgtgtaccccgactctccgatggcgagggcgggtctcgggcgcggaacgatcatcaaccaggtcgatggacagtggatcactgccgggaacttgaatacggtctattccaaactgctcgcaccgaacggcgccgcgacgctctccgtggcggataatcagggcggtttcggcgtgtcggagcataagctgacggcggagttgatatacgaaaatccggtgctgtaccgcgacgtgctcgaatacggggagcacaagatcggctacttggtgtacgccagtttcgatgcggctttcgacggcgaattgctggatgcgctacaagcgttcaaggatgcgggcatcaacgacttgatcctcgacctgcgcctgaacggtggaggatatgtgatgtcttcccggatgctcgcctcctgcatcgccggtgctcggtgcgaagggcaggtgttccagtattaccgttataacgatgcgcgaatggaataccctgaaatgacggcggcggagaccgggcaggcttacgacgagtcgaaagagcgtttttacgaggagttcatctacggcgattaccggggagccgacctgcgtgggtatgcgctggatcttcctcggctgtatgtcatcgtctcttccggtacggcttcggcgagcgaagccgttgtcaatgctttgcggggaatcggactcgaagtggtgctggtcgggcagaagaccaacggcaaaaatgtggggatggagggtgtctatctggaggatggagcgtacgaatacctcttcatgccggtctctttccagggatataacgcccggctcgaaacggtggacccgaacggtcttgcgccggatgctttgaagggagattggaacaacggatacgaggagttcggcagtttggacgacccctgtctcgagtatgcggtgacgagcatcaccgggcaatccgtccgctcttccgagtccgcagcgcagaggagaccgggcgtgcggttggtcgaaggcctctctttgcccgaaatatcctgccggccggagggtatgatcctgctgccgccggacgctgtccggaaagattgaacatccgctccacgatcggtttcggaacggagaaacgccccggaacgggtgcggatttgatatttaacggataaaatcgtatctttgcatcaataatggtttctcaagaagatatagaacggctgcgcgaattgcttgcccggcctgcgcagaatatcgtgatcgtgtcgcacacgaatcccgacggggatgccgtgggctcttcgctggcgtggcgcgaggcgttgctggagatggggcatcgcgtcacttgtatcgtgcccaacaaatacccctattttttggactggatgacgggtatcgagaacctggtgcttttcaagacggacgaagcgggagtcgcccgccgtgcggtggaggagtcggacctgatctttttcctggacttcaacgccgtatcccgtctggaggggttgagcgaggtgatcgaatccaatacgacggccaggcgaatcctgatcgaccaccatctgtcgccgggacccggtttcgatctgatgttttcctgtaccggttcgtcgagcacctctttcctgatctatcggatcctcgaaaagatgctgggcacgcaggcgattacgcggagtatggccgagtcgttatacgtgggtatgatgaccgatacggggaacttctcgttttcgttccttacgccggagttgtaccgggccgttgcggtgctggtcgaaacgggcatcgacattcccacgatccacaacaatgtctataacgccttcaccgagggccgtgcccggctgttcggctatgcgatcaaccgcaagatggaggtgatccacaacggtacggtcgcttatatgtcgcttctggagagcgagatgcgccggtttcagttccagcccggcgacagcgaggggttcgtgaattatcccctgacgatcaagtcgatgaagctgtcggcgatcttcgttgccacgcataagtttatccgggtgtcgcttcgttcgcggggcggggtggacgtggatcttttcgcccgcaagtatttcaacggcggcggccatcgcaatgcggccggaggcaagtcttttatgacgatgcgggaaaccatcgagcatttcaaacgatccgtagccgagtttgccgcccagggcggtttggattaggtcgctatggacgatttccgcttgcgggttttcattacggcggccaaaaccctcaatttcaccaaatgcgccgagcagctttacatttcgcagcccgctgtgagcaagcatatcggcgaactcgaatcccgctataaggtacagcttttcgagcgcagcggcagccgtctggcgctgaccgaagccgggcgtgtcatgctggagcatgccgaacgcattgccgacggctaccgccgtctgcagtacgagatggatcttttcaccgaccggctgggcggcgaactgaaggtgggagccagtacgaccatcgcccagtatgttctgccgcaggtgctggcccgttttacggcccggtttcccgaggtgaaggtttcgctcgtgtcgggcaacagcgagcaggtcgaggcggccctcgcacgtcacgataccgatttggggctggtcgaaagcagcgcccggcatccggggttccattacgaaccgtttattcccgacgaactggtgctgatcgcttccacgaaaggctggtacggccgctgcgaccaggttacgctcgcggagttgcagacggtgcccctggtgttgcgcgaaagcggttcgggaaccctcgaagtgatttcgaaatacctcgcggcggcggatgtacgactcgcttcgttgcgtgtagtgatgcaactgggcagtaccgagagcatcaagagtttcgtgcgcaacagcgacgccatggccatcgtgtcggtggcgtcgatcgtcgatgagctgcgcagcggcgagctccgcatcatcgacatcgagggctgtacgatccggcgggagttttcgttctgctggcccgaaggacgcagcgatgccttggccgcacgtttcgtggagttcgcccgccatacggcctgatccttcgcggcgcttctgcgatattttgcaggccgttttcggctgtgggatcgccgccggatccgttcgggtactcgagaatgcggtggcctgtcatcggaaaccattggtcgtttatccgtggtctgtgtctgtaatgttgctccgccctaaattccttactcggaggggattcggaacactgcatctccgaggaggtatgctaaagtatgtaatcacgttttatctatggaaaccgatttgaaattcagacctttccgatcgcctgccgacccgggttgggacgaggcgtgggcgatctatcagaactctttcccccagaaggagatccgttcgctggaagaccatctgcaagctctttccgatccgcactatacggccgacggcatctggtcggacggccggttgataggcattctttattactggacggctccggaatatgtctatatcgagcatttggccatttcgcccgacctgcgcggtgccaatatgggcagccgggtattggaggctttttgccggaaggccggacgcatcgtgctggaaatcgatccgccggagacggaaatcgccgttcgccgccttcgattttacgagcggctggggttcgtgcgcaacgattatcattatgtacatccgtcgttccagcgtccctatgagccgcaccagttggtgctgatgagctatccgaaggctatgactgacgaggagtgccgcagtttcgaacgcttcgtccgcgatccggtccttcgttattcctgtcatggaaagaaggagtaatacctttagaatataatcaggtaataatggaaacagcccgaagatcgaaagtcttcgggctgttttatggtgatcggatgctgcctacaagagcaagatcacggcgagcgatgcgaccgagatgacggcccagaggatgatgcccagcaccagcggcttgaggcctaccttgcggattacctctatggagagccctccgccgatcaggaacagcgtggccgaaagtccgcagcgtgcggcgaccgaaatgccgtgcgtgagctgggtcggcaggttgcagtaggtgtttacgagcatggcaacgacgaaccagaagatgaaccaggggatctggatcttcttgcctttctgacggaagatcagggccgacaccagcgacagggggatgatccacagggcgcgggtgagtttgacggtcgtggctaccttgagcgcctcctcgccgtaggcggcaccggcgccgacgaccgaactggtgtcgtggatggcgatcgcggcccaggttccgaactgggtctgccccatgccgagccaatgcccgatgacggggaatacgaagagggcgacggcgttgaggatgaagatcgtggccagtgacagcgaagtttggttctcgtcggcatcgataacgggtgcgaccgccgcgatggcgctgccgccgcagatcgccgtgcccgacgagatcaggtagctgtttttgcggtcgatgcgcagcaggcgtcccagcactacgccgacgatcattaccgtgactaccgaaaccaccgtgaaggtcatgccttcgcgcccggcggccagcgattcgtggaagttcatgccgaatcccagtccgacgacgcagtattgcagcaattttttcgaagccttcttgctccagaccggaaacggattgccgagggtcagggcgaagagaatgcccgcgaagagcgtgacgacgggcgaacagaagagcgaacctatgagcagtccggcaaaaaggatttggcgccagttgagctttgcggattgcatggatttcgtgagttgcagcggtttcatacggtgctaataactttttgtaaacgatgctgcaaatatacaggctttatccccttgaaacaacggggaaaaagttatgtcgtataactaaaagttattgttgctgtcgctgcgatgacggatccgctcccgttaccggtaatttcggatcaggtcgcggaaataggcgatcattcgtccgtagttctcgagcgagatcgattcgttttcgttgtggatcgtaccctgttcctgttcggtaaggaggaccggcatgaaacgatatacgttcggactcaccgcctcgtatttgtaggcgtccgtgccgccgagcgtcaggtagggcgttacgatcgtacccgggtagagtccggcgagcgaggtgcggatcatttcgaaggcgtggacatcgtccggggagatttgcgacggttcgcgggtcgagagttcctcgatccggacgtcgtatccgttgcagatattttcgacatgccgcttcacctgggccgtcgtgttgcccggcagcaggcggaaattgaccgtgacttcggcttccgaagccagtacgttggccgcgtcgctgccccgggccatggtgatggcggtggtggtgcgtaccagggcattggtggccgggttgctttcgaacgagcggagcagcggactctccagcagccagcggttagcgatcgcggtgcgctgggcgactcccatcgagccgccgatccgatcgaggaaagctatgaccggagctgtcaggaaggcgggcattcgttcttggttgagcatctcgatgatctcggccgccagtacgagcgatcccttctccggcggcatcgaggagtgacctccggtgccccggaccgtgattcggatcgtgctgaatcccttttcggccgttcctacgagggcagccgtacgttggattcctcccagcccgggggcgatgatgatgccgccttcgtcatagacggcgtcgaaagcgatgccctgttcttcgaaatagcgggcgatcttcagggcaccctgcgtgccgccggtttcctcgtcgaatccgagggcgatccacacgtcccgctccgggcggaatccctccgcaagcagcgagtcggtcgcttcgaggatcgagaacagcatgcctttcatgtcgagcgtgccgcgcccgtagatccgtccgtcggctacggcgccggagaagggtgggtagtcccagcccggaaggggtgcatcgggagccgacgggtcgtaattgagcacgggaaccacgtcgtagtgggaacagagcaggatcgggggcagggccgggttcttgccgggccagcggaatacaagcccgtattcgttgatcgtcagagtatccaactgactgtaaatcgcgggatatgcctgcggcagataggctttgaaggcttggaacggattgtcgtccgtccggtcgatcgcatcgcttacggtcggaatccggattccgccggccaatcgttcgacggcctgggcggacggttcgacgctccggggaggcccgtccggaccggtggtgcggatgaagggataggtcgcggtgcggactatcactacggtgcagagtacgaggagcgacacggcggcgatgcccgtcaggagccagattattttcttttcttttttcatggaagcggtaggttaatataggtccgatcgtccggtttacgtgcaattaatctgccatacggaaattttttcgaatttattttcgcccttacagggccttccggaggcgtttttcgggggggggattttgtcgggaaaaagcggttgggaaagcgaaattttttccatatccttatatcgttgagcttcggtggagaagttctggccggaatgctatcgggttgcggtgagtttgtaagagtcttttgggcgggatcggaatcaacttattaaattaaataaattcgattatgaaagtacgtgtctatttatcagtaggagccttgctcctgttcttggctccgctgggctgttccgacaaggcagaaagtccggcaccggaaactccgccggaagaacagcccacgccggagccggaaccagaaaagccggagttcgtggatgcgaatatgtcgatggaagaattgatgaaaacagaagatccagaccgtaattatcgtttagttagttatagagatgacacgtgtgctatgtattctttcttcgaccctatgaccgaattgcaacgcggtacgccgcgcgaccaattgcagtgggtatccgaaaaggtggacggaaacagcgtttgctggacttatcgtatcaccaacggagaccacgacgaagccgtgcgtcagatactcgaacgctgggccgaaaaagaagacgaggaagaataaccggattacgatcagggaaaaggatgttttcctctaaatgtcgttgcgagacagatcgaatccgacggtcgcttattcgcggcctgcggctacgtttataattctgcactttccctgcgttctcttctcggaggggggcttggggtgcatagcgtcccaagcggtcatgaagtatgcaatcacgatcaggaaaaataaaaccggtttagaaattattctaaaccggtttgttgtgcccaggacgagactcgaactcacacgggctaatgcccaccaccccctcaaagtggcgtgtctaccaattccaccacctgggcctcgattcccgccgcagcgggttttcaggtgtgcaaatatagtgactattttgtttttcccaaaatatacggcaaaaaaattgccgggtcacgaaactgacccggcaattcgacgttgttttcgaagcgtgcggcggtcccggcagcgtgcggcacggttgcttcggaaaacggtttattcggcgaagtccatctcttcgaagaggtaggaagcgtctccgatgcggtcgattacgaaaagcacgtagcggatgtcgagcgcgatgttgcggcagaaagccgggtcgaaggcgatgtcgctcatggtcgagagccacgtgcggtcgaaattcacgccgatcagctcgccccggccgttgagtaccggcgagccggagttgccgcctgtggtatggttgtccgcaaggaagcagacgggaacggtcgtgcggccgtcgatctccacgccccagcgtccgtagtccttggcggcgatgatgtcgcggagccgctgcgggatgttgtagtcgtaaatttccggattgtccttttccaaaataccttcgacagtggtgtagggcttgtgatatactccgtcggcataccggtagccgcctaccttaccgtaagccacgcgcagcgtgaggttggcatcgggatagaaggcacgctccgtatcccattcgcgcagacccttgatataggtcgtgtagagttcgttcaggcgctcgctgttcaggttgcgggtcgagcacttgcccagttcatcgaaaatgcgggtgaccgtcgtccgaatatcggcccgcagagcttccagttcgggagcctcggtcgattcgtcctccttgtgcgtggcttcgaacatcagctcggcgtatgcttcgggcgatcccagacgctctacttcggcggcgaagagcggtaccatgtactcttgcgggcagttgtcgtaatattcgcggtacagcacgcggaaaaggtcgcggttgagcgccttcacctggggatagatttcgtcgccgaacgagggccggttgtaaatccggttgagctcgccggtccggatggtttcgctcatcagttcgagtgcgaagtaggcgtcgaagatgcgggcgtactccgccttgagctctttgagcacgtcgcggtattcgggcttgtcctgggcccaggcttggaaggcctgttcgtactcctgtttgctcgccacggtgttcagacgcgtcagacccagcgcttcgccctgccattttttccaggcgttcgagatgccggcgttgatcgccgcgtacatgatgcgcatggcgggatctttctcctgcgccgcattgatccgatcgagccgttcggtgcggatacggattttcatcgggtcgctgcggtgcacgatgtaatcgaccgcgtcggagaggatgtactcctgggtgttgcccgggaagccgtagatcatcgtgaagtcgccttcctgaataccttcggtggagatcttgaaatgttttttcgagcggtagggtacgttgtcgggcgagtaggccgcaggccggttgtctttatccgcatagatgcggaacatcgagaagtcgcccgtgtgccggggccatgcccagttgtcggtgtcgccgccgaacttgccgatcgacgagggcggagtgcctaccaggcggacatcgtcgaactgttcatagacgaacaggaactgttggttgccgtagtacatctgctcgatcgaggctttgtagcggccgttctcgcgggctttttcgaggatttcctcgcggctctcgccggcggccagacgctcggtgatgtcctccatgcgtttgaggaacttgacgttgaggttttcgttgggaagctcctcttcgcgcgactgtgcccagaagccgtcggttagatagtcatgctcgacggacgaaaggcgctggatcgctccgtagccgcagtggtggttggtaatcagcaatccttccgcagagattagctcggccgtgcagccgtcgtcgaagagcatgacggcatctttgagcgaagccttgttgatactgtaaatgtcttccgcagtcagttggaatcctttggcgcgcatatcgtcgatgcgcgacgagatcaggctcggcagccacatgccctcatcggcgagtgccgtgagcgaaagcagcgcgaggcagagagtcgaaaagatacgtttcatgaattgttttttattgaatgaattgattgagttcggtatagacgcgttggatcggcagccccatgacgttgaagaacgagccgtcgatgcgctcgatggcggcatagccgatccactcctgaatgccgtagctgccggccttgtctagcggatggaagttgtccacgtaatagacgatctcctcgcgggtcagagcccggaaccagacgttgctgcgtacggagaagctccggcgccggcgggccgtgcggagcgtgacgcccgtgaccaccgtgtgacgatggcccgagagccgttcgagcatccggatcgcatcttcgcggtcttcgggcttgcccaacacctcgccgttcaggataacgacggtgtctgccgtcagcaggatttcgttttccgcgagcggccggggataagcacggctcttgagttgcgaaaggtagcggggcacctgcgtcgcggccagcgtcgcgggatagacctcctgacagtcgtaccggggggccggttcgtacggcagcccgctctcggcgagcagttgctgtcgtcgcggtgattgcgaggccaggatcagacggtagggtttgagtttgtcgtgcagcagcatggcgttacggattttgggttcgggaccgggtttccgccgccgttggttcggatttccgggttccggcgagttttttcatagcccggcggtattggctttcgactttgcccggccggatgcggcggtcgaacagccggcggagaaagccgtcgaaggactctccgttccgcaggtcgggcagatagcggtaaacgattggcgccaatacgtgcgtgccgtcgcaataaacgagaaattcgtccaatacctgcttgtcgtcgatgcgccccaggcggcgggatacataccgttcggccgctacgacgaatgcctcgttgccgccttcgccgtaggcgcgtgcccggtcttcgtgcgtgcggtagaagtcgtcgttgtcgtagagcgtctgcaacatgtcgagcagttcgcccgaaagcgagagccggtgcaggttttcgtgaatatagacctgcatgaagtcgatacggtattggcgggccgtttcgggatcgagcagcagaggcgtacagcagaatgtttcgtccagcagggcgaaagcgttgtctatgttgccgaggatgtagattcgggaacccgtagcgtccagaggctgcccgccggccagacgggtgatttcctgatggatggcgcccagttgttccggggcgatccggtactgttcgatcgcgttgttcaggcagggccgcacctgctcctgccaatattgtgcgtaacccgcttgtgcgagccgttgcaggcagtaagagagttcgtcgcggacgctgcatatttcgtcgatccaagcaccccgcaccttttgcgggagcgattcggggtcgaacgaggcgaagaattcgacgacttgttccggatcgtctttgctgcctccgctcaaactgtaaaggttgcagagttgcgaaggacggacgaccgaatcgatccggtgcgcccggtcgaggaacagcgtgtccgctcccagtgtgccggtgaaaaacgggtcttcggcgagtttgtccgcctgcggaaaaacggcgagtatgtcgtatgccgccgaggtgttgaaaagatcgggaaattctccctctccgctttgggcggaggcggtcatcggcaggagagctgccagcagaaggggaagtagtaattgcggtttcatggcgtgaaaaacggttagcgaatatcgaaatcgagcagcatgtgtccttcgagcgaggctttcaggttgtcgcccggatgcacgggacctacgccggcgggggtgcccgtgtagatcaggtcgccgattttcagcgtgatgtattgcgaaatgtggtggatgatccggtcgatgccgaaaagcattcgggcggtgtcgccccgctgccggacttggccgtctatggtcagttcgaagtgaagccgctgcacgtcgccgcccagctccgcgagcgggatgaattcgggcgacagggccgccgagtggtcgaagcccttggcacgctcccaggggagccctcgggcgatcgcctcgcgttggaggtcgcgggccgtgaagtcgatgcccagtcccacttcgtcgtagtaacgatgcgcgaaacgctcttcgatgcacttgcctacccggttgatccgcacgaccaattcgcattcgtagtgcacctcctgcgagaacgaggggatgtaaaatgggtcgttattgcgcagcagcgccgtatcgggcttcagaaaaaataccggttccgtcggaagtccgtcgggtccgcctgccgtattatgcagctccttcacatgttcggcgtaattacgtcctatgcaaattatcttcatctcttttcgattttagggggcatctttcgccccttctcgctcatcccgactgggaaatacataaagtatgtcccatccggtcctcgcctcgtcgtgtcaaaacctgcacccctaaaatcaaaaagggttgcagggtgtggggcatctttcgcccctccttgcttatcccgaatgggaaatactcaagtatgtcccatccggtcctcgcctcgtcgtgtcaaaacctgcacccctaaaatcaaaaagggttgcaggtggggcgtctttcgtcccttctcgctcatcccgaatgggaaatacataaagtatgtcccgtccggtcctcgtctcgtcgtgtcaaaacctgcacccctaaaatcaaaaagggttgcaggtagggcgtctttcgccccttcttgttctcctcgaaagggaggttcgaatatgtcctgtccgtccggtgtgcccggtttatttgttgcggtcgtatttttgcgctttgaccaagaggaaaacacatccggcgggcagccaaagaaaatccaccgccaaaacccatttttcgccgcccagatttccggccagcatacccaatgcgatccagcctatgccgatcgccgccaggctcaagcacatgaaacgcgataatcctttgacatccacgtttttcttctgctcggcggacatcgtgttgtagccggcgatcaggttcgggaaaaaccgaaccaaaatgccgagcaggaccaacaaccctccgccgaggagttgcgtcgggtatgtcgtgaacagttcgcgcatcttaccgcacctgttttttcagcagctccaccatccgggccgcgaagcggtcgctggcgccgggagccccgattacggcttgcagttcggcgaagtcccggagcatccgctcccgtttttctccgcccgtaaggatggcccgcaactcccgttcggcccgtgtgatgtccaggtcggactggatgatctccacgaccgattcgcggcccaggttgaggttcaccagcgacacgtagggaactttcagcacgtagggctgcaatttcacctggaaccagagcgtgcgatagactaccacttccggtacattcagcagggccgtttcgagcgtcgccgtgccggaggtcacgacggcggcttcggccgccgcgagtgtttcgtaggtttggtcgcagacgtagcggatgccgctgtccgcgatatattgttcgtaaatcgagcggtcgagccacgaaacccccgtgaccacgaattgccggtcggggaatttccgggccaggtcggccatcagcggcaggttggccttgatctcgctgcggcggctgccggccagcagagccacgatcggccgctcgtcgagcgcatggcgacggcggaattcgtccggggagggcagcgatgcccgacgtgcttcgatggcgtccacgagcgggttgccctcgaaaatcggccggatgccgtgcttggggaagtagtcccgttcgaaggggaagatgatgaacagctcgtccacgtatttgcggatcgccttcacccgccattcgcgccaggcccagactttcggggcgatgtagtagaagacgcggatgccgtgctccttggcccagcgagccatcttcatattgaagcccggataatccaccaggatcagcacgtcgggggcgaacgcctcgacgtcctgccggcactctttcatctggcggcggatcgtccgcaggtttttgattacttcgacgatgccgaaaaacgaggtttccttgtaatgtttggccagattcccgctgcctccgaccccggccatcttgtccccgccccagaagcggaacttcgcctcggggtcgtgggctttcagccctttcatcaggttggcgccgtgcaggtcgcccgaaggctcgccggctatcaggtagtaacgcatatcgtaagtcttattcttctttcagtaaatcgggccgcagccgtttggtgcgctcccaggcctgctcctccttccagcggtcgattcgggcgaaattgcccgagaggagcacgtcgggcactttccagccgttgaactcggcgggtcgggtgtaaaccggtggtgccagcaggttgtcctggaagcagtccgtgagcgccgaggcttcgtccccgatggctccggggatgatccggatcaccgaatcggcgatgatgcaggcggccagctcgccgcccgtgagcacgtagtcgccgatcgagatctcgcgcgtgaccaggtgttcgcggatgcggtagtcgatgcccttgtagtggccgcagaggataatcaggttgtcgagcgtcgagaggcggttggcttcgtgctggtcgtagcggatgccgtcgggcgaggtgtagatcacctcgtcgtattcccgttccgctttgagggcttcgatgcagcggtagatcggttcgatcttcattaccatacccgcctctccgccgaaggggtagtcgtccgtggtgcggtgcttgtcttctgtgtagtcccggatgttgtggatatggatttcgaccagccccttctcctgcgcacgcttgaggatcgattcgttcagcggcgaggcgagcagttcgggtacgacggtcaggatgtctattctcatggcgttagcgtgcttggcggaagatgatgtctttttcggtgtcgggggcgagcggaatttcccgcccgttctcgagcgtgtaacccttgtaatccagttcggtgaagagttcgatgatctgcgggcggttttcgccgcccgtttcgatcagtactgtcgggcggaaacgctccagcagagggcgcagctcgtgcatgacgatcaactcatacccttcgacgtcgcacttgacgaaatcgagccgctccagcccggcgaaaagctcgctgccgcgccgcatccgggcggtgaaagtgacggcgccctctccggcggcatcgcccacgaagtttcgtcccgtgccgagataacccgtttcgcgggcggagtcgttgctcatggtgatctctttattctcggctcccagcgcgcagtcgaagatttcgacgttgcggcagccccgcaggttgcggcgcagcacccggcaaacgaccgggacgggttcgacggcatggaccctgcctgcggtgccgacgatttccgagagaggacgggcgtaatagcccagattggctccgatgtcgatcgccgtgtcgccggctttcgccagccggggcaggtgatagacgtattcggtcgccgcgctgcgccgtccaagccccagccggtagctgatgaaaaagaggcggctcaccgcccgcagataaccttcgagcggaagcgtccggtagaggattttgtggagcagcgctttcataacggacccggacggaattagttcttgtagttcacctcctggttgaggacttcggtgacgaagggattgtagagcacttcgtggccgatggtggtttcagggccgtgtccgggatagacgcgcacttcgtcgcccagcgggagcaggttgtccaggatcgaacgcatgatccacgaatagtcgccgcccggcagatccgtgcgtccgatgctttcgcggaagagggtatcgcccgtgaagaggctcttcgattcgggttcgtagagcgatacgtggcccggcgtgtggcccggcgtgcggatgacgcgcaggacggtgtggccgaatttcacttcttctaccttgtccagatcgatgtcgatggtcggcatggcgttgattttgaccccgtaaacggtcgatcccaccgcatcggtgtccagcatgaaggcgtccttgcccgagagggcgaagggaatgccgtaggtcttgcgcagatgttcgacgcccagcacgtggtcgaaatgaccgtgcgtattgaccgccagcaccggtttgagcccgtgttcggcgaggaaaccgtcgagtgcggcatcttctttgggggtggaatttccggcgtcgatgaccgcgcactccttcgtgtcgtcccaaacgacgtaggtgttctcctgtatcggattgaaagtcaggcaggcgattttcatgatatgtgaaatttatttaaggtacaaatatagcgatatttcgcggataatcgctatttttggaaccggagcgccggaaagaaacggcgctgccggagcgggcgcagaggtcctggaacagtaatttgttgaaagtcaaaacagagagaagaatgaagatacgtttactgaaaatttttgcggcggtcgccgtgctgctgtcgttcggaagctgttcgttgctcaaggtgtcggtcgatacgggcaacccgccgcttccggcttcggaggccaatacccggatgatgacccggggattttattacgacttggcggacgagatcgcccgcacggccgattcggtcgcggccgcatcgtcggagattccggtgcggatccgggcgatccggtggaagatgcaggcgacgcgggccgccgttaccgccgtcatgcagtccaaccccgacgtggcgctcatcgacacctggctgctctgcgtccgcatggacagcgctttccgccgcctgcccgattcgctgcttttcgccgggcagacgccgctcgtgcgcaaggtcgtggcgcgtctggacaagaaagccgaacacctggcttcgaccctgcttgcgccggagaagttcgcgttgatgcaggagttcgtggggaattatatgcaggcgaatcccgtcacggggtcgcagttcactccggtcaatacgaccctgccctggatcgaatttctccagtcgaaaggcgtggaaacgcagtataacgtaggctccatctccgatgtgatcgccgatctgggcgaccgtttcggcggccagtccgagcagatggtcaatagcatcggctggtcgaaggatattttcgagttgcagatgcagcaggacagcgtccgcaaccggctgacgcggcagctcgacagcctggagcgtaatttcgaccgcatcgtgacggtcatggagcacctgccgcagatcgccgattatatgggcaaaagtctgaataccgaagtcgcagcgctcatcgaaacgttgaacggtgccgtggacaacgcatttgccgacctcgaccgccagcgtgcggagttgcagggttatatttcggccgagcgcaaagcgctggtcgatcaggcgcagcaggcggtcgatgcggcggtacaaaatgcgatggaccgggtaccggctctggtggccaagctcctcgcctggatcgtgcttttcgccgtcatcatgctgggcgtgccgttcggcatcggtttctggctgggacgggtgcgcgaacgtgccaaaaccaggaaaacgggcggcgcatagcggaaaattcgtacctttgcgttctaaatccgaatgcgatatggctcgaaagaaagcgaattatcccctgattgaggggcttgagataacgacgctggccgccgaaggcaaggcgatggggcgttacaatgacgtggtggtctttgtgccgatgaccgtgccgggcgacgtggtcgatgtgcagatccgctccaagcgccgccggtatatggaaggtttcgtcgtcaattatgtgaagcgctcgccgctgcgcgaagagccgttctgcgcccatttcggggtctgcggcggctgcaagtggcagaatctgccctacgccgaacaactgcgtttcaagaccgagcaggtgcgcgaccagcttgcccgcatcggtaaggtcgagctgcccgaaatcgcgccctgcctgccctcggccgaaacccgtttttaccgcaacaagctggagttcaccttcgccgagcggcgctggctcacctacgaggagatcgccgaaaagggcgagatcgccgatgccccggcgctgggattccacatccccggtatgttcgacaaagtgctggacatcgaaaaatgctggttgcagcccgatccgtcgaatgcgatccgggaagaaacccggcgtttctgcctcgaacacggctatacgttccacaatccgcgcgagcaccgggggctgatgcgcaacatggtcgtccgcaccgcctcgacgggcgaggtgatggtgatcgtggttttccatgccgacgagcgggagaagatcgcggccctgctggaccatctggcggccgctttccccgaaatcacgtcgctgttctatgtaatcaacgagaagttcaacgactccaccggcgacctggaacccgtctgctaccggggcaaggatcacatcatcgagcggatggaggggctgcagttcaaggtcggacccaagtcgttctatcagaccaattcggcgcaggcgtacgaactttacaaggtcgcgcgcgacttcgccgccctgacgggaaaagagattttatacgacctttacaccggcacgggtacgatcgccaacttctgtgcggcgcggtgcgcgaaggtcgtgggcgtggagtacgtgcccgaggccatcgaggacgcccgcgtcaattcgacgttgaacggtatcgggaatacggtgttctatgccggcgatatgaaagccgtgctgagcgacgagttcatacggcgcaacggccgtcccgacgtcatcatcctcgacccgccgcgtgccggagtcgatgagccggtgatcgacgtgatcctgcgggcggcgcccgagcggatcgtctatgtgagctgcaacccggctacgcaggcccgcgacctggccctgatggacggcgcgtatcgcgtcgaggcggtgcagccggtcgatatgttcccccatacgcaccacgtggagaacgtggtgaagctcgtccgccggtaggcggctcctgttccggagcggtttttatactatcggcccctgttcgggcgttatatttgcagtactatttcaaaaacgaatgaaacgtatgaaaaaatggatgattttagcggcggcggtcgtattggctgcgccggtgttcgctcaaacccaggaggctttcccgagttatattcaggtgaacggacgttcccagatggaggttacgccggatgaattctatctgtcgattgtaatcaacgagcgcgagtcgaaaggaaaaattacggtcgaaactcagcagcggcagatgatcgacgccctgaagaagttgggcgtcgatgtcgagaaacagctcaaggtggccaatatgtcgagcgatttctacaagaaggccagctcgctgaccaccgccaaataccagttgctgctccattccgctgccgaagtaggtgacgtgaccgccgccctgggcgatctgggcatctcgaacgtcggtatcgtacgcgtgacccgttcggacatcgactccctgaaggagcaggtgcgcctggatgccatccgcaacgccaagtcgtcggccgaagcgctggccggggcgatcgggcagaagatcggaaaatgtttctatatctacgattctaattacgacgtagctccgcagtattacgacaatatgatgatggtacgttcgaaggcgatgatggccgacagcgccgaagcgggtgcgcccgaagagccttcgctcgatttcaaaacgatcaagctggagtataacgtccagaccaagttcgtcctcgaataatcggggttatcgtcggaaatgaattggcaggccgaatttttggataacccggaaattcggcttacctttgaccactttcccttttttcaaaagcaaggaattatggagaacagattcagtttcgattaccagcactacgactctccggaggggatgcccgccggggaccgggagttggtggaggaggctcgccgggccgtcgcccgggcgtacgctccctattccaaattccgggtaggcgctgcggcccgtctgcgcagcgggaagattctctgcggcagcaaccaggagagcgaggtgtttcctgcgggcatgtgcgccgaacggtcgttgctgttccatgccggagcgtgccatgccgacgatccgatcgaggcgctggccatcgcttcggagccgtccgagcgggagtgctatccctgcggacagtgccgccaggtgctgctcgatgcggagcgtcgccagaggtcgccgatccgtatcatcatgtccggtgcgggcggagccacggtggtggattcggccgtgcggctgcttcctttcacgttccagttataatccgcttcgcaattacgctccgtttccgatgttcgctcccgaagatattctgtacgaggacaaccaccttttgatcgtcaataaacggtgcggcgacctggtgcagcccgatccgtcgggcggcgatgcgctcgaacggcagatcaaggagttcatccggcggcgcgatgccaagcccggcgaggtgttcctcggcgtggtgcaccgtatcgaccgtcccgtgagcggagccgtcattttcgccaaaacgtcgaaagccctcgcccgcctgaacgagatgatccgccggggcgagatcaaaaagacctattgggcgcttacggagagccgtcccgatcccgaagagggagagttgtgccactatatcctgcgtaacgagaaaaccaaccgttcgcgggcgctcgatgcgccccggggcgatgcaaaactggcgaaattgcgttaccgcaccctgggggcgagtactcgttatacgctggtggaggtcgatttgctgacggggcgccaccatcagatccgggcgcagctctcgaagatcggctgtccgattaagggcgacttgaaatacggggcccgccgttcgaatcccgacggaggcatttcgctccattcgtaccgtgtcgatttcatccatcccgtgcggcgcgagcggatcgtcgtgacggcgcccgtgccgaaagaagataatctctgggcgttcttcgctcgacaattttcattgttgccatgcgaattttgattcaacgggtgcgccgtgcgtcggtttccatcggcggaaccctcaaatcggccatcggaccggggctgttggttttcgtcggtatcgaagccgaggacggcgaggaggatatcgagtggcttgcgggtaaactcacccggctgcggattttcgacgacgaaaacggggtgatgaatctcgacgtgcggcaggtcggcggcgaaatattggtggtgagccagttcacgctgcatgcctcgacccgtaagggcaaccgcccgtcctatatcaaggcggcccccgaagcgatttcccgacctttgtacgagcggttcgccgccggtgtaggccgtgcgctcgggcgcgaagtcgccaccggggagttcggagccgatatgcaggtagagctggtgaacgacgggccggtgacgatctggatcgactcccgacaacgcgaatgacttcagttatttcaaagatagtgaaagatgagcgcaatcgtgcgggcttgcacgcagagattgccgaatcggatcctatccgaggctatgtcaaagatataaaaagtttgttatgaagaagtattttttgtgtatggtcgctttgctgtcgctggcgatcgtagcctgcgaaaatgacgatacggcgcctgcgccggccgtgcgtccgactttcgatctgatcgacgcgcagcccgatgtgacgagtgcggtcgtggcggccaacatcgaatcgaagggcgaagtgcccatctccgaagtcggcttctcctatcaggaagcgggcggggagtacgtcgatgtggtttgtacgaatttcaaggacggtctggcccggcagactctgaccggcctgaagcccgacatcgaatatcgttggtactgttatgccgtcttgggcggcgagcggttcaatgcgtcgctgtcgaaaacgttcaggaccctcaaggagggggaggtgcctccggctccgacgccccagttcggcaagccttcggcttccgaggtgcaggctacgagcgcattgctcgcgtgcgcttatctatataccggtgatgcggccgatattgccgaagccggtttcggatacaagcctgcggcatcggcccaaacgggatatactatggtagagattacgccggacgactcttcgttgtcggcccgtctggaggagctgacgcctgaaacggcttacgagttctatgcctatctggtaatcgacggaaagaattacaccagcgaacgggtcgttttcaccacgttgaaggagggcgagcaaccgggagctccgcagttcgaaacgccttcgtcgtccggggtttctccgaccggagcgacgcttgcctgcgtttatgagtacgaaggcgacggcgatgttgcggaagccggcttcgggtataaggccggtgcgcaggaggaatataccgaggtgaaggctgcttcgacggcttcgcccctgacttatgagctgaacggactcgaacccgaaacgaaatacgatttttatgcgtatgtcgttatcggcgacgagcgttatacgagcgccgtcgcgcagttcacgacccttaaagcgggtgaaaatcccgagccggagttcggtcccgtcgctgcgacggatgtgaccgcttcgtcggccaccctgacgggcagcttcacctatgaaggcgaagaaacggtcggcatcgaagtaggatttgcttacaaagcctccggtgaaacggattacgccacgaaaacggtgacggcttcgtcgggagataagagtgcggccatcaccggattgagcgccgcgaccacctatacgttccacctgtacgcctcgatcggcggcaagcagtatcggagccaggagggtactttcaccaccgagagcggaacagtccccccccc

SEQ ID NO: 10412 - DNA, 145648 bp, Unknown
  gut microbiota DNA sequence
ttttcggtaaacggacatcgggcacgtaatatctcgatttgttacagtgcagagcaccattgccctgtttgggtttcggggccggtgcacagttgttacaagggatccaacggaaataggaattacggtccggatccggtcatcccttcgagtattcagcctaaaaataaaacggttgaaggttcctacaacaaagggcatatgattgggaacaatgaacgttccaaaacaagcggcatgaataagcaggtttcctactatacgaatatggctccgcagcacagcagtacattcaatacgggtggtggcgcatggaataatttggaggatcagatcgatggttattggtgtagggatacactctatacggttgtggggtgttatttcgaaacatggaccgattcttacggcaacacagctcagcccaagcgcactggtttcggcggtgttcaggccagtgttccgaccatgttctatactttgttgttgcgtacgaaaaaaggaaatacggaaaagtcggtgatggagtgttcgcgcgaggagttgcagtgtgtcgctttcgtaatgagtcatgcgatgcaaaaagaacacgaacctgaacgacgcgacatgcggagtgtggcggaaatcgagcgattgacgggctttaccttcttcgccaacgtgccgaatgcgccgaaggatacctacaatccgtcggactggggcttgtagcgttccgaatggaaacccgggtctattcttggggcgacggccgaccctggcacagctacgcggcgtattgccggcgacatttcggcggtcgggtgcgtaagatcgcggtggatgccggcttgagctgtcccaaccgggacggaacgatcggatcggaggggtgtacgttctgtgataacagggcgttcaccccttcctactgttcgccccggaagagcctggcgcggcagatcgacgagggaatcgctttccatgcggcccgagggcgggacgaagggctttgtctggcctatttccagcctttttccaatacgcacgctcctgtcacgcgacttcgggagctttatgccgaagcgttggatcatccccggatttcgggactggtgatcggcacgcggcccgattgcgtggacgacgagaagttggatttgctggcggagctggcgcggaaacactatgtggcggtcgaatacggcgtcgaatccacctgcgacgaaacattgcgggccgtccgtcgcggccatgacttcgcggcggcccggcaggctattgcggcgagcgccgcacgggggttgcacgtcggggcccatttcattctggggctgcccggcgaagacgacgaaatgcttcttcggcaggtggagcggatcaatgccctgccgctcgaaacggtcaagttccaccagttgcagctcgttcggggaacggcccttgccgcccaatacgacgccgagcccggccgcttccgcctgcgtacctccgaggagtatctctcgctggtggtcgaggtgttgcggcggctgcgtcccgatatggctgtggagcgtatcgccagcgaagtgccgatgggatttcaccacttgacgcagtggcatttaacgcgggtttccaccctttggtccctgcttgaaaaaagattaacggcacggaacgcgtatcaaggcgaaatttttatacctttgcgccgttaaaccttaattgttcaaagaaaaatgactctgttgaaggaaaaaataactttcgggacgattatgggcgtagtacgggaatatttcgtgatgacgatcggtattctcctctacacgttcgcgtggatcgcctgtattctgcccgcacacggtaccggcggcggtgccacgggtgcggcgctggtgttgtgcggggcgatcgaaaacctgttcaacttccagattaacatcggtacgatggcgttcatcgtcaatggtattctgctgctgttcgcaggtttcatcattggttggaatttcggtatcaagacgattttctgtatcatcgtgcttcctgcgtcgctgaactttttccaggaaacactgcccggcgtgcaggcgtggctcgcggaactgggcgttatcccacccgatgcgatcagcctgttcggtaatctggaaccgctgctgctggtcatcatgggcggtatgctgtccggtgtgggtatctatatgtgttttcgtcagggcggttcgaccggcggtacggatatcgtggcgctgctgatcaacaagtatcatccgatcaactacggccgtgtcgtgctggtgaccgattcgcttatcatctgtgcatcgctgctggtgggcaacggcatcgagacggtgatctacggcttcctgctgacggcggtattcggtctgagcaccgatgcgttgctggcgggcaaccagcagtcgaatcagattctggtcatcagccatgagcacgaccgtatcgccgcagagatcgtcgagaaggcgcatcgcggggtgacgatgctcaacggcatgggatggtacacgaaagagtcgtcgcaggtagtgatggttatttgccgcaaacgcgaaacggccgacatcctcaagatcgtccgcaacctcgaccccaaggcgttcgtttcggtggcttcggtaacgggtgtttacggacagggcttcggtatcatcgacggcggtatgctcaacggtatgaagaagaattagggaatcttcttcgatttgaaataatactcctcgtcgatccggcggggagtatttgttttccgggaataatgcgtaactttacccgaagaaaaaccgaattgattccgtcgttttgcggttgcggctcggctccggacgggccggtcggttccgcagcctgaaagcactccttttcgatcctgctacgaccatgcgctatgccgacatcgtacttcctctggcccagcctctctacacctttgcggtggcggaaggcgtgacgctttgcgaggggatggccgtagtcgtgcctttcggccgatcgaagatctacacgggcatcgtctggcggctgcacgaccggcgccccgatttcaagaccgtcaagaccgtctcccgcgtgctctacggtacgcctctgctcgacgagcggcagcgccgtttctgggagtgggtcgccgattattacatgtgcacgctgggcgaggtgatgcgcgtggcgctgccgtcgctgatgaagccgagcggacacggcgaggaggagtttgctgccgacgagttccggccccgccgggagtggttcgtggccctggccggcgaagcgctcaccgccgacgggctggccgccgcgctggaacgtatggggcgtcgtgccccccggcagcgggaggcgctggaggagttggctgcccttgcgcccgacggggcggaagtcgcccggagccgactcgccgccgatcggacggctctcgctctcctggtgaaaaaggggttattgacctgtatcgaacgggaggtcgcacccggtccggtgactggcggtgcgcagtttcgtctgccgacgctttccgctgcgcagcggaaggctgccgaggagatccgtgccgtgtttgccgatcgcgcgaccgtgctgctgcggggtgtcaccggttcgggcaaaacggaaatttatatgcacttcgctgccgaggtgctggcccggggcggacaagtgctgctgctcgtgccggagatcgctctcacggcccagttggtcgatcggctccggcaggttttcggcgagcgggtgatcgcctatcattcgaaactcaccgaccgcaagcgtacggagctttacctccgcttgcgggattctgcgggcggcgagctggtgatcggggcccgttcggcgatcttcctgccgctgcgccgcctggagctggtcgtggtggacgaggaacacgatcccagttacaaacagaccgacccggcgccccgctaccaggcacgcgactgcgccgtgctgatgacccgactgctggggtgccgtacgctgctgggcagcgctactccgtcgctggagagttatttaaacgctgcgaccggaaaatacggcagcgtggtactggccgagcgttacggaccgtcgcggatgccgcagatcctcgtgtccgatacgatccgtgccgtgaaacgcggcgagcggcatgcccatttcaacaaattgctgctcgaccgtatggaggagaccctcggcggaggcggtcaggcgatgcttttccagaaccggcggggtttcgcaccctatgtcgagtgccgggagtgcggctggacggcccgctgtccggattgtaatgtgactctcacgctccacaagggaagcggtcgtatggtctgtcactattgcggtcatacggagcctgttccggccaagtgcccccattgccgggtgaccgaacccgtgccgatgggcttcgggacggaaaaggtcgaggaggagatcgcccgcgttttccccgaggcgcgggtcgcccggctcgaccgcgacagcgttacctccgagcgtgctttccggcagatcgtcgaggccttcgcccggggcgacgacgatattctggtggggacgcagatgattaccaaaggattcgatttcggcggcgtggagctggtcggtgtgctcaacgccgacaatctgctcaacaatcccgatttccgttcggcggagcgtgcattccaactgctgatgcaggtggcgggccgcgccggtcggcgcgaaaatcccggaacggtcgtgatccagaccgctgagccgggacatcccgtcttgcaacaggtgattgcgggcgattacgaggcgatggctcgtcagcagctcgccgagcggaaagcgttcttctatccgccctatgcacggctcctgaacctgttgttgcgtcaccgcgatcccgtgacgctgcgccgtgcggccaacgccctggccgccgccctgcgcgaacggttcgggcggcgcgtgctgggacccacggccccgcccgtcgatcgggtacggggcgagtatctggcgaccctgctgctgaaggtcgaggcgggggcttcgctggcccgggctcgcgaggcggtgcgcgggattctcgaccgggtggtcaaaagtcccgaatgcaaaggcgttacgattctctgcgatgtcgatcctcaatgatataaaggggctttttctgccgcctgtctgtcccgtatgcggcggcgagttgcacgagggcgagggtgctttctgtatgatgtgccgtacgttggcaccccagaccggattctggcgccgtgcggacaatccgctggccgagcggctgcgcaatgagtttcccgtcgtgcaggcctcggcttttctctggttcgttgcgggcagtccctggcagcgggccattcatggtttcaagtattacaaccgctggcgcacggcccgcgacctgggtgcctggtatggcggcaaccttgccgacagcggactgtacggaagcgtggactgcatcgttcccgtgccgcttcatacccggcggttgctggcccgggggtacaatcaggctgcctatatcgccgaggggatcgcttcccggatgggagtgccggtggaggatcgggcggtcagtcgcctgcgcaacaacccgagccagacgacccgttcttcggccgggcgctgggagaacgtacgcgacttgtttgcggtcgcgcggcccggagcgttggccggacggcacgtgctgctggtcgatgacgtggtgactaccggttcgacgctgctttcctgcaccgaagctctccttcgtgcggtgcccgactgtcgggtcagcattgctgcactggccgtttcgcgccgccatttcggattggatcggtaacttcgatcgagtagtctttgcattgacaatgaggtgtttcggttggattttgctccggccaggtccgaacgggtttggcttgtcacttacctttcgctatctttgtagaagataggatgcgcctcggaaaactgggaacaagttcctgttttctctcggctttcgctatctttgcagcgcgaaatttgtgttttataatatttttccggcggggtgcaatgtatctcgtcgggcttttttaactgtcgattgagctatgtttcgtatcgttttgctgttgtttgccggaatcggagcgggctatctgctgcgcaactggtcgtttgtggccaggctggagcggggagtatcgcttaccgtgtgggccctgctcttcgttttcggtgttacgatcggttccaaccgcgaactgatcgtcaatttcggacgtttcggctggcaggccgccgtgatcgcctgcctcggcgtcgccgggagtttcgcggcggtattcgtcgtccggcgttactttttccggaaaggagggagcgatgagagatagtctgatcgttttcgttttttttgcagtcggcgtggcgctcggttatgccgatgccgtcccgacgtggctgttggatcccgatctgccgatgattattctttcggtgatggtggtgctggtcggcttgggactcggggccggcgacaatctgcactatatgctgcgcacgttcaactggcggatgctcctgttgccgctttgtacgatcgtcggcaccctgctcttttcggcgctcggcgtgctggtgctccggggattcagcctgacggactgtctggccgtaggcagcggtttcggctactattcgctttcgtcggtgctgatcgccgacctgaagagcgcgacgctcggcgtgcagggcgccgccgagttggcgacggtcgctttgctggccaacgtcgtgcgcgagatgatcgccctgttcggaatgccgctgttcgcccgctggggcggtccgctggccccgatctcggtggcgggcgtgacttcgatggacgtgtgtctgccttcgatcgcccgttattcgggcagcgacctggtgccgctggccatcctgcacggcatcgtactggaggtgtgcgtgccgattctggtcggtgccttttgctgaccgaagggaccgtaaaaaagaatcgacagaaagcccctttttatcgacatctttccggcccgggagaatcccctgccggggatcgttcgattgtaaacagatttttcgacaaaacggggtccggggcgttttgatatgtcgccccgtttgtctatttttgaaagttgaaatccacgtaacgaatggctaaagaatatacccccgcttcgcgcaaccgcgaagcgttcgctgcaatgaccgatacccccggcaacgtgcctccgcaggccgtcgaactggaggaggcggtgctcggcgctctgatgctcgagaaggattcgatcatcaccgtgcaggagttcatcacgcccgaggctttctataccgaagagcatcggacgatctaccgcgcgatcgaggagctctcgaccgaactcaaaccgatcgacctctatacggtcaccgagcggctgaaggtccgcaaggagttgcagaaggtgggcggtgcgtcgtacctggcgcagctcacgcagaaggtgggctcggcggccaacgtggagttccacgccaaaatcatcgcccagaagtacgtgcagcgggagctgatccgctccgcgaccgagatccagcgccgttcgtacgacgaatcgactgacgtgacggagttgatcggctatgccgagagcgaaatcttcaaggtggccgaaggtcacgtcaagcgttcggtacagtcgtccaaggatttgctggccaaggcgctgatgcagatcgaggaggcatccaagaacacgtcggccttcaacggcgtgccttcgggtttcatggccatcgaccgcgtgacgctcggctggcagttgtcggacctcatcatcgtggcggcacgcccttcgatgggtaagaccgccttcgtgttgtcgatggcccgcaacatggccgtcgatcacgaacgtccggtggcgttcttctcgctcgagatgtcttcggtgcagttgatgatgcgccttatcatcgccgaaacgggtattccgggcaacgatatcaagagcggccgtcttacgcccgagcagtggcgccacctggagtcggcgaccaagccgctgggggcggcccccctttacatcgacgatacgccggcgttgtcggtcttcgaattccgctcgaaagcccggcgtctgaagatacacaacgacatccagatcatcatcatcgactatttgcagttgatgaccggcggaacgcaggattcgaagggcaaccgcgaacaggaggtggctttcatctcccgcacgttgaaggccatcgccaaggagttgaacgtgccgatcatcgccctctcgcagttgagccgtgctacggagctgcgcggcggttcgaaacgcccccagctttcggacctgcgcgaatcgggggccatcgagcaggacgccgacatcgtggctttcatccatcgtcccgaatattacggtatcaatcaggacgagaacggtatgccgacggcgggtatggccgagatcatcatcgccaagcaccgtaacggtgcggtcacggatgtcaatctgcgtttcctgaaggaccaggcccgcttcgccgatgtggacgaaacgctgatgccggaggcgggcagtcgccctgcgccggggcagtacgaggatgtatcgagcggttccaattccgggctgggcggcttcggcggcgtgcccgaggagttccttacgcccggtgtgtcgggggcgcccgtgaatctgaacgaggaggagccgttttagcggagccggctccggtttccgcgtccggttttgccgcattcgcggcgggggcgccgctctggaagtgcgggtccggaaattcggaccggagctggaggaagatcgcttgattgtatagtgaaagatcgataatatgttcgtcagtacgtatgcaggggctgttgccgggatcgacgccgtgaaggtgaccgtcgaggtcaatctcaccgggggcggtctgggactctatttggtcggactgccggacaacgccgtcaaggagagcgagcagcgtatccgggcggctttcgagaataccggtcgcaagatgtcgggccgcaaggtcgtggtgaacctcgctccggccgatctgcgcaaggagggggcgggtttcgacctgccgatcgccgtggggattctcgccgcgatgtccgaggtgagcggggagttgcttccgacgacgatgttcgcgggcgagctctcgctcgacggaacgctgcggcccgtacggggtgtgctgccccttgcggtcaaggcccgggacgaggggttgcggcggctcgtggtgccggccgaaaacgccgctgaagcggcggtcgtggagggggtcgaagtgtacggtctgcactccctgggcgaggtgatcgccctgctgaacggggagcggagattcgatgcgacggtgccggtggatgccgaggcaactttggcgtcgcagagtgcctatgccgaggatttcgccgacgtgaaaggacagacggccgtaaagcgggcgctggagatcgcggcggccggaggacataacgtgttgatgatcggtgcgcccggttcgggtaagacgatgctggcgcggcgcatgccgacgattctgcctccgctcagcgtcgaggaggcgttggaaacgaccaagatacactccgtggcgggaaaattgggcgcagagaggggattgctctcgcagcgtccgttccgtgcgccgcatcacatgacttcgcaggtggcgctgatcggcggcggacagtcgccccagccgggcgaggtgtcgctggcgcacaacggagtgctgttcctcgacgagctgcccgaattcggacgcagcgtgctcgaagtgctgcggcagccgctggaggataagaagatcgtggtttcgcgggcgagatacagcgtggaatatccggccaatttcaccctcgtagcggccatgaatccctgtccctgcgggtattacaaccacccgaccaaagagtgcacctgcccgccgggtgcggtgcaccgttatatgggacgtatttcgggcccgctgctggaccgcatcgacttgcaggtcgaggtgacgccggtggctatcggggagatttcgcaggtgcggccttcggagccgagcgccgcgatccgcgagcgggtgattcgggcgcgggaggtgcaggcggagcgtttccgtgaggtgccgggcgtgcatacgaacgccatgatgaacgccagaatgttgcgcgagttctgcccgctggatcaggcggcgcgggagctgctcgaacgggcgatggtgcggctcgatctttccgcccgtgcctacgaccggatcgtgaaggtggcccgcacgatcgccgatctggaggggacggccgacatcggtgcggcgcatctggccgaggcgatcaactaccgttcgctcgaccggggaagttggggccggtaatcgaatggggatgttgcgatgaagaagtggaaaccggaaaggagggacggattgctgctgctgggcatcgggctcggtgcggcggtgggactgttgcgcggtgcggtgctcgcgtggctgccggtgggcgtggcgctggggctgtgtctgcggggcggggccggaacccgcagcggaagcggtaaggattcgttaggagatatttcggataaaaatcaggaattttatgccggcggggatgcgtctgccgaggctggaaacgaaaataaaatatgaaaagagtcattgtttcgggcggcggcacgggcggtcatatctatcctgccgtggctgtggccgaagcgctccgacggcgcttcggggaggaagtcgagatcctcttcgtcggtgccgaaggcaagatggagatggagaaggtgcctgcattgggataccggatcgtcggtctgcccgttgcgggcttgcagcgccgtttcgatttgaaaaacctggcggtgcccttcaaggtgcttaaaagcatccgcaaggcccggcgcaccatccgcgacttcggggccgatgtggtcgtcggtttcggagggtatgccagcggcccggtgctgtgggcggcgcagcggatggggattccgaccgtgattcaggagcagaactcctatgcgggagtcaccaacaagctgctggccaagcgtgcccgcacgatctgcgtgtcgtatgagggaatggaacgctttttcccgaaggagaagatcgtgatgacgggcaaccctctgcggggacgtttttcgaaagcgggtgcggatcgccgcgaggcgctggcgcatttcggcttccgggacgatctgccggtgctgctcgtcgtgggcgggtcgctcggtacgcggacgctcaacgaaatgatgaaggcctgggttctgcggcagggcggtacttcgccggtgcaggtgatctggcagacgggtaaatattacgagcgggagatgcgcgagtttctggcgcagcatcctacggcgaatatctggcagggggcattcatcgaccgcatggattacgcttatgcggcggccgatctggtcgtttcgcgcagcggggcctgcacggtgtcggaactctgtctggtggccaagccgacccttttcgtgccgtcgcccaacgtggcagaggaccaccaaaccaagaatgcccgggcgttggccgacaagggggctgcgctgctgatccccgattccgaggcggttgcccgagccatggacgaggcggtcgggctgttgaaggatccggtccgtttggccgaattgagccgcaatatcgaggcgctggccattcccgattccgccgagcggatcgtgaacgaaatcgagaaacagttgccgcagtcgaaatagagccgccgggagcgaccgagcggggaaaatgcctgagcggggcaggtgaaatcgtcctgccgggtgtaataaagaagaagaaatcgatcaatgaaagagttttccaatgttttcgatgagcgaggggagcaccgaatctgttcggactctgccgagccggaaaaacaacgaatgcagttcaacgtatattttctcggaatcggggggatcggcatgagtgctctggcccggtatttcctccacgaaggccgaagggtggcgggttacgaccgggtgcggtcgcatctcacggaccagatcgaggccgaaggagccgttgttcactatgaagaggatccggcgcagattccggtggatttccgggatccggccacgacgatcgtggtctatacgccggcagttccggcggatcacgccgaattgcgctggttccggcagaatgggttcgagatcgtcaagcgttcgcagatgctggggtatctttcacaggggaagttcgtgatggcggtggctggtacgcacggcaaaaccacgaccacgacgctcgtggcatggctcaaccaccgggtgacgggcggcggaagcgctttcctggggggtatttcccggaatttttcgagtaacctggtgctcggctccggccggcgtctggcggtcgaggccgacgagttcgaccgttcgttcctgcggctgtggcccgacgtggcggtggtcacctcggccgatgccgatcatctggatatttacggtacgcacgaggcattgcgcgaggctttctcgcagtttatcggccagatccgcgaaggcggggcgctggtcgtcaagcggggtgtcgatctgaagatcgggaaccccggtatccgggtttaccgctattcgtacgacgagccgtgcgatttttacgcccgcaacgtgacgctgctcgagggcggtcactatcggtacgatctggtgacgcccggcggcgttgtcgaagggtgcacgctgggtattcccggttgggtcaatatcgagaatgccgtggcggccgtggcggcgctctggtgcgcgtcggagcgggacggcgagccgctggatgcggagcgtctgcgggaggcgctggcctcgttcgagggggtcaagcgacgtttcgaattttatgtcaatacgccccggcaggtttatatggacgattacgcccaccacccgcgcgagttggcggcggcgatcacttcggtcaagaagatgtttccggggcggcggctgacggcgcttttccagccgcacctctacacccgcacgcgggatttctaccgcgagttcgccgaggcgctctcgcatgccgaccgggtggtactgctgccgatctatccggcccgcgaggagccgattccgggggtggaatccgagatgatcggccgtctgctgacggtgccctggacgatctgcgaccgtgcggagttggccgaaaaggtggctgcgatggataccgatgtagtcgtcagcttcggcgcgggcaatatcgacgcctgctgcggggcactggcagaaaaattgcgggaaaaagcctgattcgccgtctgccggggacgatctgtttttttcgaggccgtgtccgtcgcggccgtaccggggcgggaagtaaacgccgggatgagattcaaccattgacgaatgccgaaatacctgaaatatacgcttcttgcactgctttggggcggtgtggccgcttatttgctctatgcgggaggcaaggtgcgccgtcatcgtgcggagcagcctgtgacgcgcatcgaggtcgaagtggtggacagcacctcgcagttgcggctggtgtcggaagctaccgttcggggatggctcgcccgcagcggcatcaaaaccgtcggcgagaagatcggtgccgtgcggctggatgcgctggagcggcttatcgcccgcaatggattcgtcgccgacgcccgggttacggtttcctattcgggcgtgctgcatgtcgccgtctggcaacggacgcctctgatgcggctgttgatcgacggctataattcgtacgtgaccgaggaggactatctgtttgcagtgccccgtgcctcgtcggtttatgtgccggtgattacgggtacctaccgtcccccgttcccggcctcctatgtggggtatgcggcggattacaggcgggagcagatgcaacagatcgacgataagatcgcggagttggaacgggaaaaataccctctttaccgacgggagctgaagaacgatgaaaatatccgttcgctgcggcggatgctgattaaaaagagatggttcgaatcttcggagtccttcggcgagcgggtgcgggaactccgcaagcacaaggagcagttgcgccgcaaatatcgctatgaggctcaggtgattcagtcggcgatcgacaaaatttccgaaaaacaggaagccgagcgtcgccgacaaaaaattttggcgaaaaggtacgaagatttctcgaaactgactacctttgtaaaatggatggaaaacgacgatttctggcggtcggaaatcgttcagataacggcccgcaccactgaaagcggggctatcgacctggaacttacgccccggagcggcaactataccatccttttcggccgcttggacgatgccgagcagaaactggataagttgctgcggttttaccgggagggactcggaaaagccggatgggatcggtaccggacgatcaacgtgaagtacgccgggcaggtcgtctgtacggagtggtaaggttttcgagatgcaggagccggatctgcctgcggaatatgtgccgggcagggaagaggctgggaaacgattcaatgaaaaaatagatagagcacagtggaaaaaaagagttatacggtagccatcgacctcggttcttcgaacgtggtggtcgctgtcgggtcgaaacgcgaagacggaacgctcggtatcgaagccgtcgtttccaaaccggtcgagggggtcaaggccggccggatcgataatatcgaacaggcgggcaatgccatccgggaggctgtcgccgaggtggaatcgacgctcggcgttcgaattacggaggcttatgccggcatttcgggcgagttcgtccgttgtgcccgccataccgaccacgtctttacctacgatccccagaacggggtgaaccagggcgatgtagatgccctgttcgatcgtatgcgcaacgtccaggcccccgacgacgaaacgatcatggagcgtattccgcagcattatatggtggatgatgccgaggaggtgcgcaatccggtcggttcgttctgcaagcggttgtcttcgactttcaacttcatactttgcggcaagacgccgctgcaacggctcgacatggctctccggcggctcggtatccgtatgttgggggtattccccaatgcgctggcgacgcccgaagccgtactctcttccgatgagaaggaggagggggtggccgtcgtggatatcggtggaggcgtgaccgacgttgcggtttattaccggggcgtgccgcgttacgtggcgacgatcccgatgggagcgagcgccatcaaccgggacatccgttcgcagagcattcccgagaaacatgtcgagagcctcaagtgcaaatacggttcggctgttgccgagctcgctcccgaagacaagctgatccgcgtgagcggtcgcacggcccgcgaagccaaggatattctgctgcgcaacctggccaccgtcatcgaggcccgggctaccgacatcgtcgaattcgtgcagcaggagatccgggattcggggtatgccgagcggttggcctacggcatcgtgctgacgggcggctcggcccgactcaaggatatagacgaattgttccgtcgtgtgaccggcatggacgttcgtatcgcaagcgccgaaacaggcatcagcgaagattcgcgcgaggcggttgcgaaccctgcgttcgccacggtcgtcggactgttgctcaagggggccggcatgggttcgtgcaacgtgatcgaggacaaggcgggcctttcgccccgtcgccctgtcccgccgacctctgtgccgggattccagcctccgcagccccagtcgcggccgcaaccccagccctatgcgccgacacggccttctgcggaaacggtcaatgcggcgtatgcgcgtcgggaggctgcccgtgcggaatccgcagcggccgagcccgaggcggacgatgccggagaggagcccgcgcctcaggctcccgtgcaggagccggtgaaaaaggaacgcaactggcggagtattttcaagcggacgctcgacaagatcaacgagggcttcaatgccgccgatgacgaggagatttaacgattaagacaagagaaacgaaacgatatgacagacgatgtaatcacccagttggccgctgcccgcacgaatccttccattatcatggtagtcggtgtcggcggtgcgggcggcaatgccgtgaatcacatgtggaacctggggatcaagggcgtggactttatggtctgcaacaccgaccagcaggcgctcgacaagagtcccgtggagctgaaagtccggctcggcagcgagggattgggcgccggcaacgaccctgaaaacggacgcaaggccgccatcgagtcgctcgatgtggtgcgccagcgtttcgaggcgtcggggaccaagatggtcttcatcaccgccggtatgggcggcggtacgggtacgggcgcttcgccggtgatcgccaagctggccaaggagatgggaatgctgaccgtcggcatcgtcacttcgccgctggccgtcgaaggcaagatccgttacgaacaggcgttccggggcatcgaggagctgcgtcagaacgtcgattcgctgctgattatcaacaacgagaatattcttgaaatatacggccgtctggccttgaagcaggctttcggcaaggccgatgacatcctggcttcggctgcgaagggcatcgccgagatcattacggtcgagagcgacctggtgaacgtcgatttcgccgacgtgtcgaaggtgatgcgggacagcggtcgcgcgcacatgagcgtagcgacggccgaaggcgacaaccgggccgaggcggtggccgaagcgtcgctgcattcgcccctgttggatcacaacctgatttccggagcccgcaacattctgctcaatatctcggtggccaatgccgaagagctgatgtacgaggaggtggtgcggattctggagtatatccaggcgcatgccagcgtcgaggacgagtcgggcaacattcacaacgccaatatcatctggggtacgagcgagaaaccccagttgggcaatgccatcgagctggtggtggtggcgacgggattcgagggcgacgaggagaagcggatgatggagacggtcattccgcccgcacggatcgtcaagcctgtcccggaaggtgccgaccctgccggaaagccggtgttggaaccggtgggcaagcccggcaaggccactccgcagacacgccctctggagcaggtgatcctgggcgagaaatcgacccgttacagcaatatcgaccagatcctcgccaaaccggcttatcagtcgcgtaaggcgcagttcatcgtcgagatgcctgcgggccgcaaggaggtgcttaaggaggagaagggtgctgcggagcgtgcggaggaaaaccgctccgagtcgctgttcgattaacataaaacggattggatttggaagatagtgctgcggccatcatctatcacggcatgacgtttcatgtcgtggtgctgtgttgtgtgactttgttcctgctattggtttcggcgttggtttccggctccgaaaccgcttttttttcgctttcgggcaacgatgtgcgcaagatccggcggcacgatacgccggtttgccggcggatgctgaatctgctgggcaaggccgatctgctgctggctacgattctggtagtcaataacctggtcaatatcggtatcgttatcctctcttcggagatcatcgattcgcttttcactttcgcccgtttcgagtttcttttcaagacggtgatcgtgacgttcctgctgctgcttttcggggagattctgcctaaagtcgcggcgcagacgattcctttgcggttcgccggtttcgctgcgcggccccttttggtgctgcgatggattttttatccgttgtcgtatgtgctggtgcgcaccggaaaccgtatcagcgagcgggctgcccaccatcaggaaatttccatcggcgaactggccgatgcgatcgatatgacacgcacggcctccaaggaggagcacgggatgctttcgggcatcgtcagcttcgtcaataccgaggtgcaggagatcatgaaaccccgggtggatattacggccgttgccatcacggattcctatgaacaggtcaagcagaccatcatccggtcgggtttctcgcgcattccggtttacgagggcgatttggacaatatcaagggaacgctttatgtcaaggatctgctttcgcatatcgaccggggcgacgaattcggctggcagcaactgatccgcaggccctatttcgtgccggagcacaagaagatcaacgacctgctggccgatttccagaaccagaagatccacatggcgatcgtcgtcgatgaatacggctcgacgcagggcctcgtgtcgctcgaagacatcgtcgaggaggtagtgggtgaaatttcggacgaaagcgacaaggacgaagtgttttatacccgtttggacaaagatacctacctgttcgacggcaagacccatatcggcgatttcgaacgcattgtggagattgccgaaggtactttcgccgatgtcaaggggcgtgccgaaacactggccggtctgatgctcgaactgaagtgcgacttcctgaaaaagggggatacggtaacggctcacgatgtgcggttcactgtggaggagatcgagggacaccgcatcgacaagatcaaagtccgtctgcatggataatatcctttgtatcgaaaaggttttgtcctgggaacggttgctgcggctggtgcccgaacgggatctccggttggctgcggcgttgaagccggcttcccgccgcgaagagtttctgatgtggcggtcgattgtttaccgtcgtctgccggatgccgaaatcgcatataatgcggtcggagctcccgtcgtatgcaattatcccctccatatcggagtttcccactgccccggatacgttgcggtctgtttctccgaccgtccatgtgccgtcgatatcgagccgcttgcccgcgatttcggtcgggcggcagcccgctttgcttctgccgaagagcggcagttgtccgacagtccgctgttgttgccggccctctggtgcgccaaggagacgctttacaaatattcggggcggcggaacctcgatctgctccgggatttacggatcgagcgtttcgatccggacgaaggccggatgacgggccgtatttgcggggaatccgcattggaaatcggacttcggagggaggaggagcttcttgcagcctatatcttggtgtgattatgcttgcaggcgtaattcggttcgggactttcggggtgtctgtcgttctataatggaggttccgccgaggagttgattttcggacgcttggggcgctgtctgcggcgccggatgcaaggatgccgcccggcagcttcgaggcggggcttcggtgctcttgaaatttcggatcgtctgttggcagaccgttttgccgccggggagggatgtcgggcggcctgcggaggattcggaaccttcttcctgccgaaatgggacgaataccctcctccttgccggaagtttcacaaatcctttttcgtatcgggcggccggaaatcgaacctcctgccgacgaaatccggtcggtcggggcgttattccgaatgttattgttatttttgtaacgatgaaacaggctgtcaccccgcttcgtttaggttccgaccggatttcgtcgctgctcgtccgttatgcgatcccttcgattatcgcgatgacctcttcgtcgctctacaacatcgtcgatagcattttcatcggacacggcgtcggtccgatcgccatttccggcgtggcgctttcgatgcctctgatgaacatcgcgtcggctttcgggtcgttgatcgggatcggtgctgcggcgctcacctcgatccggctggggcagggacgccgggaggctgccgagggggtgttgggcaatgtggtgttgctcaattttctggtagcggcgctttttacggccgtaggtctgttgctgctggaccccattctctgcttcttcggggcgagcgacgctacgatcggttatgcacgagatttcatgcagatcattctcggcggtacgatcgttacccatatgtatttgagcctgaacgaagtgatccgtgcttcgggttatccgaggagagccatggcgattatgctgacggccgtcgtgttgaactgtctgctcaatccgctgttcattttcgggttcggctggggtattcgcggttcggcggccgcgacggtgctggcccaggtcgcggcgctctcggtttcgctcatccacttctcttcccggggaagtttcatccggttcgaacgggggattttccgcttgcaggcgtcggtcgtgggcaagatcttttctatcggtatggcttcgtttctgctgcacctctgtgcttcggcggtagtgatcgtcgtgaacaaatcgctccgggagtacggcggcgacgtggcgatcggggcgtatggcatcatttatcgggtggcgatgctcttcctgatgatcgtttctggactgaatcaaggcatgcagcccatcgtggggtacaattacggcgcccggcggtacgaccgggtgttgaaggtcctgcggcagaccgtcgtgtgtgcggtttgcgtgacgacgacgggattcctgctgggacagctctttccccggcaggtggcgatgctcttcgtcgatgctgcggacggagctgcggccgagcggatgatctctacggcggccgaggggctgcggatcgtgttgtgcgttttcccgatcgtcggattccagatcgtgacttccaattttttccaatatatcggcaagccgcacaaggcgattttcctctccctcacgcggcagatgctgttcctcatcccgctgctccttgttttgccgccgcatctcggtacgctgggtgtctggatgtcgatgccgattgccgacggtacggcctctctgctggccgccgtgctgctcttctaccaggttcgtaaattcagacaccggccccatgcggaacggagtatctgagttttttgaaaatatcgattacagactctttcggtgaattgatggggcattcgctcgatccgggaaatacgacagaactctcggacggatcgttgcacgcgtccgatttggcttgaatacggagcaggagcgaggaggtgtcgggtgcctccgggcgttggtcgtaacgatagggatatctgcgcagaaagagcttttacgataataaaaaacagagccggtgatccaccggctctgttttggattttgtgttttggattaaattccgagtttggtgcggatctcctgcggaatggcgttcttgtttaccataacggacagggttttgtactccacgaacggacgcgagaagtagtagtaaccgtcgtagggaggacgtacgtcccacgagttctttaccttgaagaagggattgccctgctgatcgacggccgtacccacgattaccatgccgtggtcgtccgtagtttcgtagttgtcgaaagcgatctggcgcatctcctgcgtgatcttcttctccttgacgggtttgtcgaacttgtagagggcggcctctttctcggcggcgctcaatttgccccacttctcggcctcggtaccctccatgccgtcgatgtcggtttcgggaatgattccgatcgccttgatgcggtcgaagcccttttcgctgacgtcggtggaccattcgatcgaatagttgttggccatagcattatcgacgacggccatcatctcctccagtggtacgttgtaaaccgtaccccacatccagttgtcgggaacttcgatgatgaactccgagtagaaaggatggtgcgtgaaagaggctatggatacatagtcgtccattttgatcggcagcgacgctgcgaacgattcgggggtatattccttgccttcgtaggtgaatttttcagggcgcacgccgaaataagtgtccagcagcgcattcagaccgtcctgccaggccgtagtcagcaccccgttgtttcttgccttgataactgcgtccaggtaggctttcagtgctgcgtcgagctcgccgaagaccggtttctccgtgccgtagttcagacccggatagacctcctggggtacgatgccgtatttcttgatgccttcgattacgtcgtgggcggcaccgccttccgcaaagttcagatgtccgtgcaggcggacgtatttaacgcctttatcgaaatacatgttgcggacgatccacatttcggacaggtccatctccggcccgccagcccgcagaatttcgttttccaggaacgaaagagccgaataacaccagcaggtgccgctgcggtgctggtctttgaccgaagtggtcggtacggtggtcaagtcggtgaacttgtagccttcctcctgggtcttctgtgcaggtttcttggccgatgcggagcacaccataagtgccaggcctgcgagtaacagcagttttttcatcgtaattttggggtttgttattttttagaagtttgaatgattttcatgcacgcttcgagagtgatctcctcgggtttggtccctttgggaatacggtagttcttgcctttgtaggcgatataaggaccgtaacggccgtttttaatcagtagttcgggctcttcggcgaaggttttgagcggagtgttcgctgcaacggcgtgggtctgctgttcgcgcacgagctccgcagcgcggtcgtagccgatcgtatagggatcgtccgtgcgggcgagcgatgcgaacgatttgccgtgccgcacgtagggcccgaactttccgatgccgatgaccagatcttccccttcgtagggccccaggttgcggggcaggctgaagagcgccagagcctcttcgagggtgagcgattcgatcaactgccccttcttgagcgatgcgaaacggctcttttccccttcgttgcctttgatttcgaccatcggaccgtagcggccgatgcgggcttttaccgtatgccccgtagtggggtcggtgcccaggatacgtatctggttgtttttggtcgtctgggtcgtggtcgcatgatcgaccattttatgaaaaggaccgtaaaaatcgtcgatcatgctgttccaggtgatctctccgtcggcgatgcggtcgaactccttttcgacgttggccgtgaagttgtagtccatgatcggctcgaattgcgattcgaggtagtcattgaccaccatgccgatatcggtcggctggagtcggtttttctccttgccgtaggtttcggtaagccttttttcggcgatcttgctgccggtcagcgtaagttgcacgtagctgcgtttctgaccctccttgttctgtttgaccacgtacccgcggttgatgatcgtcgtgatggtcggcgcataggtcgaaggacgtccgatgccgagctcttcgagccgttttacgagcgaagcctcgttgtagcgggccggcggtgcggtgaagcgttccgtggctgtaatttgcgcgggattgacgctctcgccttgggccattttggggaggatgcccgatccctcttcgcccggctcctcgtccgtggattccgagtagagtttcaggaatccgtcgaaacggatcacttcgcccgtggcgacgaactgggcatccgaaccggcgatatcgatgacgatcgtggtgcggtcgagctccgcaggaaccatctgcgaggcgaccgtccgcttccagatcaggtcgtacaacttcttttcggcgggagtgccttcgatcgtctgccgctcgatatacgacgggcggatcgcctcgtgggcttcctgtgcgcctttggtttttgtcttgtaattatgtgccgacgaatatttctcaccgaaaagtttgatgatctcctccttgcactggccgatcgcctgcttcgagagatttaccgagtcggtacgcatgtaggtaatcaaaccctgctcgtagaggtgctgcgccacggacatcgtctgcgataccgacattccgagtttgcggcccgcctcctgctggagcgtcgaggtcgtgaacggaggcgcggggtagcgctgtgccggtttttcctcggctttggcgacggtgaaccgggcgtcgatgcagctgcgcaggaaagtctctgcttcctcgcgggtatcgaagcgggtggacagttccgccttgaaaagggttttatcgggatcggcggcggcgtagaactgtgctacgacacggtagtagggcgtcgagcggaatgcgatgatctcccgctcccgctctaccagcagccgtacggcgacgctctgtacgcgtccggccgagagttggggccgcacctttttccaaagcaggggcgatagctcgaatccgaccaggcggtccagcacgcggcgtgcctgctgggcatttaccagattcatatcgatcgtgcggggcgattcgatggctgccagaattgccggtttggtaatttcgtggaaaacgattcgcttggtttggtcgatcggcaggccgagaacctctgcgaggtgccaggcgatcgcctctccttcgcggtcttcatcggacgcgagccagacggtcttggtcttcttggccagcgacgaaagttcctcgacaaccttgcgtttgtcgctcggaatttcatagaccggttcgtagtccttgtccagattgacgccgagatcttttttcgagaggtcccggatatgcccgaagctcgacttgacgacgaaatccttgcccaggaatttttcgatggtcttggctttggccggggactcgactattactaaattttcctgcataacattcagtatcttttcactaacgcaagataacctaagttcgtacttaggttatccgcaggtgcttcgctattttatcatcgtgtaaatcaggcgcagcttgatcggcgcgttgtttgcggtattttccatgccttgtgccgatgtatagggcatcgtgaagagcccgtaggcttcgggtccgatgtagatcgtccggggggcgggattctccgtttggctgccgccggtttcgattccctgggatttcaggtagccgttccatacctcctgcaggtgactggtgatgtccatgacataacagccttggctgcggttgaggtaacctccgtacggcaactggaagttctggcttgaatagagcctttcgtaggtgtaatagtaatccgaaatgcccagtacgtgcttgtaatcggcatagaggcccaagcgctcgaatgatgcgtccagcaggggagtgatggctcccacgtcgatcttttcccaatcgtaatcgctcttttcgaggtagatcatcagttccgcctggttgatggcgatcgaggtgtaaggcatgcccgattcgtccgtaacctccttgtagagggcttcgattccttcgaacagggcgtccgtgagggtcagctccgtgattacgccgtccatcccttcgacatatacgttggggttcaggggccgctgttcgttccgctcgtcgatgtcggccggattgatcttggagccggtgtaatcatgccggatggtattgatcgaaacattgccgtagggatcgtcttcgcggtagaagaggtagctggccgtgatcgtatcctggatcagcgtcgggtcggttctgttccggctgcgggtgtacatcagaagacccgactccgcgaggttcgtagcgaacaggttcccttctcccgacggattttcctgggccggcttgatgtaaataccgttgaaatagtccacccaaagctccggattgcggtagatcgtcatatcgcccttgtacttgccttcgagcagcatcagacgcttgatgagcccccgtccttcgggcgtaggctgcagggtgacgtactccgtggccggtccggtcgtcgtgccgttggggaaggtgaaggtgaataccggattggggttgaggtagggggtcggatcgaaggtcgggtagaaaagggtgtcggcgacgctgcctgctccggccggggctgtcagcgagggattgaggtaatcgttcgaaatcacctcatagacgttgtacgtcatcggcttgagggtgtcgcctccgtagttcgagattttgattttgagttcgatcgagtcgaaaatgggctggtaaccgaagccggtcgtatcggagagggctacggcgcggtattgggtcaggaaacctgccgtgcgacgcccgaaagtttcgtcgtgcatcacaccgaaatacccctctcccaggttggaagccttgagagagtcggttttgtagagtcgagtttcgaaatagggccgctcggcgtcgggtgcgagcgcgaaaactttcagaccgatcttcatctgctgatcccccggttggtagcctgcgcccagccggtcgtccactttcgtgcaacctgtaaagaagaccatgcccgctgcggtgagaacggcggccaattcggcggcccggcgtattttactggatcgaatcatagaatcggttgtagttgtcgaaaaagtcctctgcgtcgggcgactggtattccaggagcggtttgccgctgttgcggaccaactcgataatttcgggggttaccgcatcggaagccagaatgatgccgtcggcatactccataacgtaacggcagaggttttcgtatgaaggggtgtcgaggatcgacagttttttgtctttgacgccttcgttggcgattttctccttcattcctgcatccagcggtttgtcgaaaccgtcgccgtagagcgaaacgacgattttgacctccttgaaaatcgggtcgtcggcgaagacctttttcagatagatcggcacgatactcgagaaccagccgtggcagtggacgaccgttggcgtccaacgcagtttcttgaccgtttcgagtacgccccgggcgaagaagatggcccgttcgtcgttgtcttcgaaatagttttcgtcggcatcccggagaatggctttgcgggcgaaatagtcgtcgttgtcgatgaaatagatctgcactcgggctgacggaatcgaagcgaccttgataatcagttgatgatcgttgtcgtcgatgatgaggttcatacccgagagccggatcacctcatgcagttgatgacgccgttcgttgatgcagccgtaccggggcatgaatgtgcggatttcattgccgcgctcctgcatcgcctgcgagagccgccggcacagaagcgccccttccgtatccgggacatacggagccacttcctgacagacgtatagtatcctgttcgatgccattggttgaaattttttcttcatctcctggtgcggtgtgctcggagtgcccgccggtcggaaacgatgattttttagcttgctcggcgaagaaggcacgggccggatgcaatgcgaaaagttgccttgtcgtgctgccgtacctcacttcacgaaagtttatctttcgcaaagatagtgaaagatgagagcaatcgcgcgggcttgcacgcaaaagattgccgaaccgcctcctatcttctgcaaagatagtgatttttcttaaagaatcagcatcgcgtcgccataagttccgaagcggtagccctcctctttggctattttgtaggcattcattatcaggtcgtaacctccgaatgccgaaaccatcatcagttgggtcgagtagggaagctggaagttggtcaccatggcgtcggccaccgaaaattcgtacggggcgaagatgaacttgttggtccagccctccatcggcttgatcatgccgccggtcgaaacggccgtttcgagcgttcgcatgaccgtcgtgccgatcgaaacgatcttatgtccttcgcgtttggtcttgtttaccgtttcggccgtgggttcgtccacgaagaactgttcggagtccatcttgtgcttcgagaggtcttcgacatcgaccgtgcggaagttgcccaggccgacgtggagcgtgatgaacgccttttcgatccccttgatctccatacgtttgaacaggtgcttggagaaatgcatgccggccgtcggagcggctacggcaccctctttgctggcgaaaatggtctgatagcgctcggcgtcttccggctcgaccttttcgcgcacccacttgggcagcggggtttcgcccagtttgaagagggtttctttgaactcttcgtaggacccgtcgaacaggaaccggagcgtgcggccccgcgaagtggtattgtcgatcacctcggctaccagcaggtcgtcgtcgccgaagtagagcttgttgccgatgcggattttgcgggccggatccaccagtacgtcccacaggcgcaactcgcggttgagttcgcgcagcaggaagatttcgatctcggcgcccgttttctccttgttgccgtacagacgggcggggaaaaccttcgtgtcgttgaagatgaagaggtccttttcgtcgaagtattcgatgatctccttgaaaatgcggtgttcgatggtgcccttggcacgattgaccaccatcaggcgggattcgtcccggttttcggccgggtatttcgccagcaggtcggcggagaagtcgtaaccgtattgcgatagtttcatggctaaaagtatttgcgaacattttttcggtccgtgggcagcgctgcaggcagttttgcgggtacggagcaagataaaccgtcaatttatctatacgaaaaataagttattttgtttcagctttttgcagtttttcgagaaaaaagttcaattcgtgcgccgcatcgagccgaaaacctccgctgcgggtgcggcagagcgaggtgaggtgcgcaccgctgccgagcgcctggccgatctctccggccagcgaacggatgtaggtccccttgctgcaccggacccggatgcggatgcggggcaggtcgtattccatgagctccatttcgtagatgttgatgagcgctttgcgcagttccacctcttcgcccgcgcgggccagctcgtaggcccggacgccttcgaccttcttggccgaatagaggggcggggtttgcagccgttcgccggtgagcgagcggagtacctcctcgaccgcttcgcgcgtgatatgttcgaagggataggtcctgtcgatggggtgttcgaggtcgaagctgggggtcgtagcgcccagcatcaggtcggcgacgtactctttctcctcggcttgcagggcgtccgccattttggtcgccttgccgatgcagaccagcaggatgcccgttgcgagcggatcgagtgttccggcatggccgaccttgattttcgggtaaccggccctgcgcagggcgaacttgattttgcggactacgtccgaggaggtccactccagcggtttgtcgatgacggcgatgtagccctcttcgaagtcgattccctgtaggttcagttcggattgttgcgtcatgtgcggattattggatcacgaaatagcggatgatggccagccctccgaccagcgtacagtagatggcgaaccagttgagctttccccgtttaacgatgtttatcatgaatttgcaggccagacagccgactacgaacgcagcagcgaatccggcgagcaggggggcggtcccgatgctctgggcggccagttctccgctcatcagatcgagaaccattttgcccaggatcggtgccagcaccatcaggaaggagaattgggccacgctctccttgcggttgcccaggatcagtcccgtggcgatcgtcgtgcccgagcgcgacagacccggcagtgtggcgactgcctgcgccagaccgatgatgaaggcgtcgcggtaggagatggtcgccttgtggcggggtttggcgtaataggcgaaggtcagcagtacggccgtgaccagcagcatggttccgaccagcagcaggatgccgtgattcggcaggtcttcgacgagcgactggagaaaaggttccagcgtgaagcccacgatgactaccgggatcatcgaaaggatgatcttcagcacgtaggcctgttccgcgttgaatcgtttggagaagagtcccacgaccaagcgtttgatttcgctccagagcacgacgatcgtgctcaggaccgtcgcggcgtgcagcgtgagatcgaaggtgagtcctcccacttcgggatcgacgcccagcagttctttggccagttgcagatggccgctgctcgatacgggcaggaattcggtcagaccctggacgatgcccaggatgatagcttgaatggtttccattttacagttctcggggatatttcggtgtcggggaagcgcgggttgcaacccggcttccggcggtcggagaagtccggattcagaatcgtttgagaatggcgtaaatttcgaagatgaagccgccgatcaccaggatcggggcgagcgtgatgcggcgccaggaaaacatggcgtagttgaactcgtcgggcgagtcgctgccgccgccggccatcaggacgaagcccagaatgatgacgatcagtccggcgagcaacaggatgtaatttttgagcgagagcggcatcttcggatcgtttttatcgttgatctccttgaattttttcatggtacggggatttttagtagagatagatcttgttggatttcatgttgacgaacttgttgacggcgaagaacgtgaagcagagcgagatcaggatgccgcccaacaccatgccgcccacgatgattccgattttcatggtttcggccagcgacatcagttccggaaccgcctcgttcagtccgtaaacggccgtcaggaagagtgccgatgcgatgattcccgacagaatgccttgtgtgatgctgctgcccaggaacggtcgcatgatgaaccatttggttgcccctacgagcttcatcgtgttaatcaggtagcgtttcgagaagatcgccagccggatcgtgttgttcagcaggatgagcgagatgacgagcagggctccgccgaagagtagcagcaccagccggatcttcgcgatcgtggcatgcagccgctcgacggtctgtgccggataggaaacccggtccacgccgtcgagttcggcaatttgggcgatgaaggtttcgagcttgtccgggtccgccgaatcggctgacagggtcaattcgaacgagtcgagcagcggattctcttcgaggatcgcctcgaactcctgttcgaacatctgccggaaatcggtgtcgttcagtttatcgtctttggagctgtattccacatggctcaccagctcgttggcttcgaaccgtttgcggagcgattctttttgtttttcgtccgctccgttgcggagctcgacggtgacggtgacgctctcctgcaacgtgcgggccacctgcatggcggccgtcatgaggtatcccaccgatcccagcaggaagagcaccagggcgatgctgatgttcgaaacgatgtaggaattgcgtaccttacgcttgagtcttttgtcgtctttcatggcgtaaaacgagtataacggttgcaatgatgcctgcgagaatcgcgagcgacgaggcgagcgtcacgccttcggcgacgttccagccgggggcgcggaaccgccattcgaccgtgtgcgtaccggccgggagctccattccccgcagcaggtagtcggctcggaaatagggagtttcgatgccgtcgatataggctgtccagccgtccttgtagtagatctccgagaagatcgccgtaccgggcgcagtggccgtgtattcgtaccggagataattgggccggtactcctccagacggatttccccttcgccgccgatcagggggcggatatcgaactcacgggtgttgatgacagccgccgttttggtgtcgatgcgccccagtgcgtcgatttctttctgcggagtgtccgcatcgacgacctcctggacgaaccaggccgggccgttggctgtggcccgcaattcggcgacgggctgtcccgtcgggtcgaagcggatgaggtaacgcgtgttgagcatgtcgagtacgccctcgtccatcgacgtgagataacgctcgatcaagtcctggtagcgggccagtttggcgccgtggtagccgcccaccgagcgatggaagtaggaggtcgtagcatcgttgaaggggctgaccgtgaggttcagcacccggaatccgggttccgggtcgcgcaggatcgcgcggtcggcttccgtgggctgtatctgctggcgccgtgcggcgacgaagcggctttgaggcaggtagcgcaggttgaccggcaccaggtcgatcagaacgatcacgccgagcagcgctatgagccagccccgtctgatccgtcccagggcgaagagcagcacgctgcccgccgcgagggcgatcattacgagcgagcgccaggcatcggagcgcatgatcgcggcccggtcggcggccatggcgtcggccgtcacctctcccaactcttcgggagcgccctgtgcgatggcttcctgcatacctgcggcttggaacatctggtagtattggcggctcatgaaatcggcggcttccgtccggccgaagtcgaagatcgcgctgccggccacggcgaagagcaggcagaaaccgcccgtgatgcctccggcccaggcgagggcccgcaggagttttcgacgcggcacctctccccgccagaggggcatcagagccaacgccgcgagcaggggaaccgtccattcgaccaccacgagggccatcgatacggtgcggaacttgttgtagccgggcaggtatttgaaggcgaattcggtgaatcccatgaaattatgtccccaggccagcaaaagcgtcagcagactgacggctgcgatccaccacttgttgcgtcccgatgccagcaggagtcccagcagagccaggaacagggcggcggcgcccaggtaggtcggtccggcagtgtagggctgctgcccccagtaggcgggcagttgctccgcgataccctccagcccgtacggtttcaaggcctcggctaccttgccgtcgcgtgtgaacgcccgacccgaatcgccgcccatgaagtcgggaatcaacaggttccagctttcggcgcgtccgtagctccaggccgtagcgtaatcgagtgccaacccttcctgggaggtttcctcgccggcggcgagttccgaaccgccgcggatggtctgtttcgagtggtgcatcgtgtaccacagaggagcgaagttcgagccgacggccagaatgcctgcggccagcagtaccgccgtgcggcggacgaacgaaggcaggtgcttttttcggaaggcgacgattccttcgctgatccacagcgcggccatggccagcaggaaatagtaggtgatctgcggatggttggcgccgatttcgagcgaggcgaaaagggccgtgagcgccccgccgagccacatgttaccccgcagcgtaagccatgcgccgcccatcatcaggggggcatataccagtgcccacattttggtcacgtgacccgcgccgatgatgaggaaaaagtaggtcgaaaggccgtacatgagcgacggaatgatgccgacccagggattcaccccgacgatcgggagcatcagccacatggaaaccatggcgaagaagacgaaggctgcgggagtatttataattttaacgatctgtcctgccgtgtttttgactagctgtgccgggtaggctacattgatcaggtaggcgggcatgccgccgaacatccgccccgcccactggggatcttcgcccgtttgggcgcggttgtcccagatctccttggccatgccttcgtattgctgcacgtcgtgctgtggcagcacttcgccgcgaaactggggggcgaaatagagggcgctgacgatgaagaagagcagcagggccgcgcccgtcggcagcactttcgggagaatctctttgaagcgggtcatctggaatgtttttgtcgattgccaaaggtacgaaaaaacattgagtttcctccccgactcagcgaaaaatcactacctttgcacggattgatcccaggctcggggcggttgtattccggcggggagacaatcgctctgtattcggctaaccttttttcgacgtaaacaaaagttcggttatggtaacactcgatatgatccgcaagccggtcgagggtgatctggaggccttcgagcagttcatccggcaaaaattcacggcggacggcacgttgctctccgagatgctcgattatgcgctctcggcgcggggcaaggggattcgtccgatgacggtgctgctgtctgcggcgctcaacgctccggcggggcagcgcagcggcggtctgcgcgcactgctcgcagccacgttggtcgagatgatccacgtggcctcgctcatccacgacgatgtgatcgacgaatcggacatgcgccggggccgggcttcggtcaatgcccgctggcagtcgcgcaatgcggtcgtagtcggagattacatcctggccaaaaacatggacctcggcctcaagagcggccagttcgacctggtgactcacgtttgcggtgccatcgccacgctctgcgagggagagattctgcaaaacgacaaggcgaaccggcaggagatgacgcgggcgtcgtacctggatatcatctacaagaaaaccgcctgcctgatcggggtgagcgcttcggccggagcgctggccgtcggtgcgtcccgtgaaaaacaggcgctcatgcgcaagttcggcgagtcgataggcatggcgttccagattcaggacgacattctggactatacccgcacggcccgtacgggcaagccctccaacaacgacttgcgcgaacacaaggtgaccctgccgctgctcacggtgctcgagtccgtcggcgaggagcgccgcagggagttgctggcccggctggcccgttgccacgaggaggatgagtcggtcgaatatttgcagcacatcgtcgagaacgagggcggtatggaaaaggcggcccgcgtcatgcaggaatacctcacgcgggcgatgtccgtgctctccgaatacgaaccttccgaataccgcgacgcattggccaacctctgtgtctatgtcggtgagcgggaccggtagggaagcggttgcccgtgcagcttggttccgggttcctcgtgcgaatttttgacctgttgtctggattttctgcggctcggctcggatttccgggcgggagtgcggattgtccgatcggcggaggtccgttgtaaatttccggacatgggacccgaacaggtgtatggcggtgtgtccgaatgacacacaacggtagttattatcgggatacgggttaagtcatttgccatagtaaaagactgtcacccttaccctcaatgccttgccttgcatccattccgacaccctttaggatcgtgcctgaaattttcatttcaacacactcttttttatgacaggatacacttgcaggtcgagggtggttttctgcgggctgttttgtatctttttttactgctttttatgatgcgctggcgggttgccgacccgtcggatgcgacgaagaagccgcctgataaaggcggctttctcttttcggggcgttttcagttattgacgcggtaggctttctgcacgcctttgatccgcaggatcgagtggatcagcatatcgaccatgcccgtaccgggcacttcgacgtggatcacgcccgagagcaggccgccgcccggcgacaggttcatcgagcggatgctcaacttcaggtcgcggttgattacttcggcgatgtggttgatcatccccgtcgtgtcgctggccaccacgcggatcgacacccggaacgcgccctgcgcttcgtcgcgccagcgggcttcgagtacccggtaggggtagtttctgcggagacgctgtgcgttggggcagtccgtacggtggatcgtgatgccggcacctacggtgatgaagccgaagatttcgtcgccgtggatcggattgcagcatttggccagtttgtagtcgagctgtccgatcttttcgtcgatgatgagtgcgtcgccgctgctctgggtcgaaactttttcggctttgcgtcgtttttcggactcgatggctgctgctgcggcccggcgctcttcctccgcttcgcccgacagatgggcctgaagcagctccttgatctgcatgaggtcgatcttttcggtgccgatcgaggcgtaaagttccgttcccgtgcggagtttgaagtgcttgcagaggatgccgaccccttcatcgacggtcaggggcagtttccagttcttgagtttgcgttccaattcttcccgtcccagacgggcgttcttggtgtgctcctcgcgcagcgaggccttgatccgggtgcgggccttcgacgtggtgacgaaccccagccagtcggctttgggcttctgattcttctgcgtcagcacttcgacgatgtctccgttgtggagtacgtcgcggatcgccgccggacggttattgaccttgccgcccgagcaggtgagccccagcgaggtgtggatgtcgaaggcgaaatccagcaccgtggctccttcgggcagcttgcgcaggtcgccgccgggggtgaagacgaaaatttcgcccgaggagggcttggcgtcgaagttctgggccagcggacgggtcttgtcttccattagctcccggagttgtttcatccacatttcgctcccgtccgatcccgcgtttacgcctttgtagcgccagtgggccgcgatgccccgctccgccacggcgtccatccgctcggtgcggatctggatttcgacccaccgtccctctttggtggcgacggtggtgtggagcgattcgtagccgttggatttggggatggagatccagtcgcgcatccgctcgggattgggcgtgtagaaatccgtgacgatcgaatagaccgtccagcattgctgcttctcctcttcgagcggacagtccaggatgatacggatggcgaagatgtcatataccccctcgaacgggacgtgctgcttgcgcatcttgttccagatcgagaagatcgacttggtgcggctcttgacgtgatagcgcagccccgcctggtcgagccgctgcgtgatgggttcgaggacgcgggcgatgaaggcccggcgttcgctttcggtctcggccagtttgtcggcgatatgctggtagtcctggggttcgagatagcgcagggcgatgtcttcgagttcgctcttgatgttgtatagacccagtttgtgggcgatttgggcgtagaggttgaggctctcccagctcttcttgcgccacttttcgcgggggaaaatttcgaggcggcgcatcacctcgagccggtcggccagcttgatcaggatcacgcgcggatcttccgaataggagacgatcagctcgcggaaattttccgcctgctcccgggaggctttcaggcgaatatcggagatgtggctcagacttacggtcatgccgagcacctccttgccgaagcggtcccggatctcgtccgtcagccgcaggaatgtctcttcgtcctgccgactggctgtgcggactacgtcgtggagaatggcggccacgaccgagtcgcctcccagcccgatctcctccagcccgatccgcgctacttcggcggcgtggtccagcatcggcgagccgtcgtgtcgtacctgcgaagcggtatgttcggcagcatattccagggcgcggtcggctgcggccgcctcgtcgggcgagagcgttcggcggatcgcgctgcgcagcttgtcataacgggtcaaatccattttccggaaagttttactgtttttcaaaagtagcgaaaatcttcggcatcgcaaagcgccgtcggggatttcacggaataatcttgtgcaaaaaccgatgcagttgtataaaaaacgtatctttgtagaacagaattatacgtcgtctatgaaaaaagaggaaaaagtccgtttgccctacgtacccacctacggcgaggaggtggccaacacggtttcgcatgccgtgatgctgccgctgaccctttgtctgctgcctttcgctgcggtgtggacctatctgcacgatgcccggcccgtgctggcgtcggtgtcggtaagcgtctgcgtcatttcgatctttctgatgttgctcgcttcgacgctctaccattcgatgcgcccggattcgaagcacaaggccgttttccacaagctcgaccatatcttcatcttcgtcgccatcgccggaacctatacccccgtagcgctgctcgtgatcggcggctggcagggtgtcttcgtcaccgttttgcagtggacggccgttctgctgggtattctgtataagacgctggcccggcgttccatcccggctttgagcctgacgatttatctggtgatgggctggacggcgatctttttcctgcctcggctgattcggaacgcttcgctgcctctgctgttgctgatcctgctgggcggggtcctctatacggccggagcgatcgtttatgcgaagaagggattccgctaccaccacctggtctggcatctgtttatcgacctggcgctgttgtcgcatctggcggggatcgtcttttttatcggttgataatgaattcgcttatatgccgggcgtaacaatgcagattctttcggaggaagggatttgggaacagttcggaatcataaacgcggccagtaccgcgaataagcgatcgtcggatatattttaatcattgacagatgagcgttgtaaaggtcggaccggacgatttcgaagagctggccgaagtgtgggaggcttccgtgcgggctacccatgattttctctccgaggcggatattcgggaattgcgttctctgttgcctgtccgctacctgccggcggtcgaacttcgctgcctgcgggatgcggggcgtatcgtggcgttcatcggtctgaacggaagtcatatcgccatgttgttcgttcggcccgaataccggggcagaggctgcggacgcaagttggtggagtgggccgtcgcccgccagggagctgattcggtcgatgtcaatgaacagaatccgcaggcggtgggtttttacctgcgtatggggtttgcggttgtcgggcgtagcgaaacggacgatgccgaccggccgtttccgattctgcatctgcgtctggagaaataaaaatgaaaaagtttcccttttaggaaactttcgctatcgggattctggttcgttttccgttcccataaaatccaacagggcccgagccgtgatttcgggttcttcgaggaatcccatgtgtcccgaatgttcgagccaggcgatgcgagcctgaggatgggccgccgccagtgcttcggctttttcgaggggaatatagccgtcgtgcttaccgaagatgaagagctgccgcaccgcagagcggcggagcatttcgttgcggtcgggccgctcgatcataccgcgcagcagggctgcgatcccttcgtcttcggtgacgaatacctgttcgaccagatcttcgatctcgtcgcgcattcgcggccggttttcgggagcgaagcccgcttcgggagctacgcgggccagcgcgtcctttttgcctgcttcgaccaatttgatttcccgcaggcggttttctttcttttcgtccgtatcggcgtccggcgtcgaactgagcagcaccacgccgtcgagccgttcggggtatttctcgcagaaagccagggcgacgtaaccgcccatcgaatgtcccaccagggtacagcgggcgataccgagcgcatcgagcgtatccttcaccacatcggccaggtattccatcgtgtgtacaggccctttgaccaccgagatcccgtgccccggcaggtcgagcgtaatcacgcgtacctgtttgtaaagataggggacgaaatcgtcccagacgagcatcgactccagataaccgtgcaacaggaccgcgcaccggtctcctttttcggagtcgcacacatggacgggcgtgtcgcctgccgtaatgaatttttcaaccattgtcgggtggattttcagttttcctcgtcgtcgaaatagtcgaacgccgattcccgcttggggcgtgcgggcgcatcgtcttcctcgtcgtcgagttcgcggtagatggtgtggcgttccttgccgcttttgtggatcggctcgagccgtttggccttacgaagttcgtccgcatggttttcgtcgcggaatcccttgttcgttttcatggatcggagaagaaaaaatagatttaggattgaaagttggcggtatcgtagctgccttcgaatactttgcgggcctctcccgaaaggcggatgcgggtgtagatgccgggtttcggctcgtcgaaggcgatgccgagccgtccgccgcgtacgtcgatgcggaacgctgtgacggaaggctgggccgcgaggtgggtgaccagcgccgcagcggtcgatcccgtgccgcaggcgagggtttcgtcctccacgccgcgttcgtaggtgcggacggcgatatgcccgggaccgactaccttgacgaaattgacgttggtgcctttggcgaagcgtttgtcgtagcgtatccggcgtccgcgtccgatgacgtccacggcttcgaggtcgtccgtgaattcgacgtagtggggaacgcccgtatcgaggaaccagtatccgtcgccccggtcgatccgttcgacgtcgatcattcccagctctacggtgcttcgcagcccgtcgatacgaagcatcctggcttcgtggatgccgtccgtcgagtcgaaccgcttgatgtcgccgccgatgcccaggtgatgggcaaacagggcgaagcagcggcctccgttgccgcacatctcgcccggcgagccgtcggcgttgtagtagcgcatcgaacagtcgcagccggatacggcggaagcggcgagcgtcatcagaccgtcggctccgatgccgaaatggcggtcgcacagacgggcgatctccgcgctttggggagtcgctccgccgttccgcaggtcgagcaggatgaagtcgttgccggcaccttcgtattttgcgaatcgcatttgcatctgttctgaaatatcggctttgtcgctattccggttcggaggtcggagccgttcggcacttctcttgcatcctgaaaacgcgtgtatgtccgggacggaagagggtttttccggggcgctgcaaaataggttccaaccagctttaacgcggacaaaaataataaaattctaaaagttttactacttttgcgtgaatttgttacgtaacttataatccgtatgaaaacattgcttgcaaaacaccgttcgatccgaaaattccgctctgagcctattgcgccggaggtgctgcaagacatgctcgaagccgcctcgcgtgcctcgacgtgcggcaatatgcagctttacagtctgatcgttactcagagccgggaattgcgcgaggcattggccccgtgtcatttcaatcagccgatggttacgcaggctccctgcgtgattacggtttgtgccgatgtccaccgtttttcgatgtggtgcgaacagcgcgatgccgagccgtgctacgataatttcgcctggtttctcaacggggtgaccgatgcgctgctggcggcgcagaacctgtgtgtcgaggccgaagcgcacgggttgggaatctgttacctcggtacgaccatctatacggccgaggagatcgcccgcatcctcgatcttcccaaaggggtgattcccgtgacgacgatcgtggtggggcatcccgacgagtcgcccgaactgaccgaccgcctgccgctcgatgcggtcgtgcattgcgagaaataccatcattacacctcgtcggagatcgacgaactctgggccgagaaggagacgtcggaagagacccggcggctgctcgaggagaacggcctgccgaatctggcacagattttcacgcgcaacaggtatcgtgccgaagataacctggctatttcgcgcaactatttcgcgctgctgaaaaaacagggtttcttcaacaattaacggaagtcttgaaacggttgccggtcatattcgtctttttgctggcggtgctcgcgggggtgtcgtgcagtgtcacgcgcaaacttcccgaggaaagttatctggtgcagaaggtgaccgtagaagccgataaggaaacgcctaaaaaagagcgtattccggcttccgacctgcggaaattcatccgtcagaatccgaataaacggttcctgggactcaatttttacgtctgggtttatgagcaggccgatcccgaaaaggataattggtggaaccggttcaaacggcgtatcggcgaagcgcccgtgctgctggatatgagcctcacggagcagtcggtccgcaacctgaaggtttacatggactatcgggggttcttctcttcgcaggcgacttacgaagtcgataccacgtcgcggaaaaagcgggctttcatcacctaccgcaccgtacagcgcgagccttaccgcatcaaccgcctttcgtacgatttccgcgatcggttcctcgagcagatcatcctgcccgatacggtacattcgctgctccgtacgggcgaggtgttcgacatggaggtccttgaccaggagcggcagcgcatcaccacctacctcaaacagcgcggctattacaattttacggtcaataacatcgagtatgaagccgacacgctcggcggcaatcatctggtggacctgaagatgatcgtcaagcagcatctggccggttataacgagcagggttatccgattctgcgcaacaatacggtttaccgtatcgaccagatcaatatttttcccaattacgatcctacggcggctattgctcccgactaccgcaagggactcgacacgatctactaccgggggttgaacgtggtgtaccacaaggacaacaagcgtcccaacatacgtccttcggtgctgcgacagatcgtgccgatctatccgaactacgtctataacattaaccgggtcgatcagacgtacaaccagattatgtcgatgggctatttcaaaagcgccaacgtcattttcaacgagcaggccgacagtgtggcaaaggataactacgtgactttcgtgggcgaaggcaaggagccggccgattcggtacatcagacccgcgagggctatctccagtgcgacatccagtgcattccggccttgaagcaggggtataagatagagctggaaggaagtacgacgtcgagtttctacggattgcgggcgacggtggggtatcagaaccgcaatattttccggggagcggagtctttcgacgtttcgttctcggtagggtacgagtatatgaaaactccgagtgcccgcaagcgcaacgccatcgaattcggagtcaatatgggtttgcagtttccccgtttcctgctgcctttccgaacccagcggtggcagtcgatccagatgccccggacccggctcgaattcggcatcaatttccaggatcgcccttattatcggcgtaccctttccagcgtggcttggggatattcgtggagcgatttgaagtattcgagctattcgctgcgtccgatcgatatcaacgtgatcgatatggggtatgtcaatagggaggatttcctggatcatctccagaacgaatatctcaagcgaagttacgagtcgcagttcatcagcggcctttcgttcagttatgtctataacaatcagcgcaagcatctgggcggaaacgcgacgctgctccgcttcaattacgagatggcgggcaacctgctcgacggcctgatgcacctcttctcgcgtccggcggccgggaaggactattacgaggttttcggtcttcaatattcgcaatatttccgggccgatttgagtgtgagccgcaagatcatgctcggtgaggtgacggctctcgtgggacggctttacggcggttacggtatggcgtacggcaattcgacttcgattcccttcgaccgtctgttttatgcgggcggtgccaacagcatgcgcggttgggcaccccgtatgttggggccgggggctgttccggagccggaagatgcggttttccctacacaactgggcgatatgaagctggaggccaatctcgaattgcgcttcccgatttgggggatgtttcacggagcgacgttcgtcgatgtgggcaatatctggtttgccgaccggcattccgcgccttcgcccgctgcggttttccatttcgacagtttctacaggcaactgggcttcgatgccggtatcggtctgcgcctggacatcaaatttgccgtactgcgtctggactggggcatacagatccacaaccccaatgcacctgccggacaacggtggatccacaatttcaagtggaagaatacggcgcttaatttcggagtaggttatccgttctgatgccgatatgggaatatgggccggagcgggcggtgtaccggatttttcactgcggcggccggggctgtgtatggagccgctgtcgggcgaggatgattcgtctgcacggagttcgtgtcggcaggggaaggatatgttgaactttgatttccgcagctcggaaaggacttttggaagaaataaagcgtccgcttcgaaatccgaagcggacgctttttgttgtcgatgcgttgccgtttattgaatccctagctcggccttgacttcggtgctcaaatcggtcatggctgcttcgtcgtaatagaccatcgaggggatggtcgtattgaatacggcgacgtaagctcccttttgcgccaccttcttgacggcctcctgagccttggcgacgatcgggtcggtcagctccttctcctttttctgcaagtcttcctgtgcgctctggtagaactcttgcagacggttttgcaggtcggtcaattctttctccttcagttggcgggttacctccgagtaggtcgctttgtttttctggaaatcgttgtacttggtgttcagctcgacctgaatcgtttccaggttgtcgcgcagatctttgctgtacgcctccatgttggtcatcatctccttgtattccggcataagggtaatgatctcttcgagattgatacggcccagcttctgtgcgaacagggaactgcttcccagtaccaaggcaaccacgagggttaatttaatgagttttttcatacggatttattgatttgattcgatatttcttactttttcataaattcgatgagggcctgagtgtggtcgattttttctgaattgtaaagcagcgtggggttcgaagccgcatcgagaaccagctcatacccgttttgtgcggcatagttcgcaatggcgtcgaatacccgtttctggatcggctggatcagctcgatccgttttttcataagggtaccgtcctggccgaagatctcctcctggaatttgctggcctcctcttcccgggtgagaatcaggttttgccgggcctgtcgtgacgaagccgaaagggacatttcctgcgccttatagttgttgtagagggcttcgacctcttcgaatttgagatcgacctgctgctgatagcttttggccagttggtcgagcgtgtcgagtgctttgttatattcgtcgatcgacttgaatactttttcgctgtttaccacgatgtagttctgtgccgaaagcgagcctatggctgccgtgaaggcgagtacgagcaaaaggatccgtttcataccgtttattttttagttatcttttataagtataaccctgtttcttcaaatttattgccaacttccgccggtttagaactgcatacccatcgtgaaatggatgtggctgccgctgcgcttggtctgtcctgcggccgggtcgaagccccagccccaatcgactcccaccatgcctacgaccggcaggaagaggcgcacgccgatacccgccgaccgtttgatcttgaacggggagaactccttccacgaggtgaatccgttgcctccttccaggaatcccagtacgtagatgttggtctgtcccttgagcaggagcggatagcggagctccatcgtgtatttgttgtaggcacacgaatagttgctgcctacgggatcgagcgctccgtcgtcgtaaccgcgcatggagataatgtcgataccgtacatattatagcccgtcatgccgtcgccgccgacttcgaaccgttcgaagggcgataccttgtttttattgtaatgtcccaggtatcccatttctgcgcgggccatcagcaccaggttgccgttgcgggtcagcggagtgaaccattggcctttgagcatccacttgtggaattcgatccagttgtagcgttcctgttcgcttaaagccgtgcttttgtaatccttgccgtcccacagcgaatagggaggagtgagctgcaccgaaacgctgaaatcggaacccctgcggggatagatcggctgatccaccgaatttcgtcccaataccaggcggatcgacagcaggtttgccgcaccgttcttgagtacgaaggtgttccagtccttcagcatgtagcgctcgtagctggcttccgcatagaacgtgaagtacgggtcgggccagtccagacgcttgccgagtcccgccgcgacaccggcggtgcggaaataacgggtacctttctgccaggcgtaataggcgttgttctcatcggaatagtgagccgaaatcgtgaaggagttcggttttcgcccgcccatccagggatcggtgaagctgattgcgaaggctttgtagtaagtaccgttggtttgggcgctgatcgacagccgctggttctgtcccatcgggtagggtctccaggcgcctttcttgaagaagtttttgatcgagaggttgttcagtgtgacacccaccgaacccacgaacgtaccgccgccccaaccgccggcgatctggaactggtcgctggcgatctcctcgagcggccagttgatatcgaccaattcgtccgaattgacgacgggctgaatgtccggagcgatcgcttcggccgtgaaatgtcccatcgaacccagggtgcggatggtctggaacaacagcgactggttgtagagttcgcccggccgcgtgtagagttcacggcggatcacctcgtcgtcgagccgcatattgcccgaaatgccgacattgttgatggtgaattgtttgccttcgaatacgcggacctccaggtcgatcgagtctttgccgatgatgatttcggccgggtcgatctgcgaggtgaggtagccctgatctttgtagagattggtgatggacggttcgtccggattgtagtaggcgccgatgcccaggcgcttgtacatcgattttttgtcgtaaatcgagcctttttcgacaccgaacatccgagccagttcgtcggtttcatagaccgagttgccgatccaggaaacattgcggatgtagtacttgttgccttccgaaatgtccagcgtgatacccatacgcttgtcgttgatcgcgtagatcgaatcggcgacgatgttggcgttgcggaaacctttcgaattgtaaaagtcgagcagcagctccttgtcgttttcgaaatcttcttcgttgaatttcgccccccggaagaagttgaggcttttctggtgggttttcttgaaggtgcggcgcagacgtttgtcggaaaattcttcgttgcccgtgaaattgatctctccgattttgattttacgtttgcgatcgacgatgaaggtcacgtttacggcctgcttcagtatcgagtcgttgtcgatgcggaccgatacttcggcgttgcggaaacctttgtctgcgtagtatttgtgaatgagcttcgagttcttgtcgatcacgtagtccgaaagctcggtgccgcgcttgagtttgagcttttcgagcaggtctttctggttgcttttggagatgccctcgaaacgccagtaattgacgcggggacgttccttcaggaaaacttccaggtcgaggctgtcgccttcgatggtcgcaccgacgcggatgtccgaaaagaggcgctggttccacaggcgggtgatggctgtcgagatgaagttgctgggcaggtatatcgaatcgcccgggataagacccgacgaagctcgcagaatgctgttgtcaatgtattgcgccccgtgaatattgacgttgcggatgtggtaaagtttctgggtaccgccttcgagtgtcggggctttttcgaattgctgtaaaagctggttcgtatcctcgtcctgatccgtctgttcggccgggggcggagccgcctcgccggagggctcctgcgcgaatatctggggacagagcagcagcagggcggccgtcagtgtcagaaatactttgcctggatgattcatcgtgtgtcgtctaacttctctctagagtttctttcttcattctctccgttcagtgtagcgagtaaactcgtgatgcactcgcttaccgaatacgttcattattttttaccagtccgaaacgcctttcgcgccgggcatattcgtcgagtgcctgcgcgaaatcctcttcggtaaagtcgggccataatacgggggtgaaaaagagttcggcgtaggcagcctgccacagcaggaaattgctgagccgttgttcgccgctggtgcgtatcagcaggtcggggtcgggacagcccgccgtatagagcgcttcggaaaccgtttgctcggaaatctcttccgaagagaagatgccggctgcggcacggcgtgccagaccctgcatcgcatggacgatttcgctgcgggaagagtagttgagggccagttgcagcgtaaggcgtttcccggtagccgttcggttttcgatctgatccaggtggtgttttactttttcggggaaacggcttttgtcgccgatgatccgcacgcgcactccctgagcggccagttcgggcgtttcgttgattacgctcttgcagaagagctccatcagggcatcgacctctgcggcggggcgtccccagttttcggtcgagaaagcataaagcgtcaggtagcgaaccccgtgacgggtcgcggcctggattgcccggcgcacggactccacaccccggatatgaccttcgaaacgctccagcccgtgttgcgcggcccagcgtccgttgccgtccatgataatggcgacgtgtcgaggtatgcgtttttgctcgctcatagcatgcaaatatagggaataaaatccgaaagcgaaagaatttccggcaaacagggatttttcgtcagcttcggatatccactccccacatcattttcttgcgtaacgtgtcgtaaaacgatatattgtgcgggaccgccagaaaaaagcgtctggaagccagtcggaccctgaattcggctccttcgggaatcggacaggtttcgttgtcggtggcgatcgatatttcggcgtgccgggcgtgtaccttgagccgcacgtcgctcgacgaaggaatcacgactgggcgcatcgtcaggttgtggggcgcgacgggcgagagcaccaggcaggcgcattggggggcgacgaccggaccgcccacgctgagcgaataggccgtcgagccggtcggcgtgctgacgatcaggccgtcgccgtggtaggtggcgaccatttggtcgttcacgtacgtttcgaccgagatcatgcccgcgccttggcgctggatgaccacttcattgaccgcatagcgggtcgagatgccgtcgccgaagtcgcccgtgacctcgagcatcgatcggggctgacattcgagtttgccggcggcgatcagctcgaagacatcgccgatgcagccgttgcggggtacgctcgtcagaaaacccagatgtcccgagttgatgcctatgacggggatttcggcccctcccagccggtgaatgccatccaaaagcgtaccgtcgccgccgtaacataccagcaccgactccgcaggctggggacccatcggccgcccgtaacggtgggccgcatcgatggatatgccggtgagccgttcgatctggggagcgaactcctcattgaccgcgtaatcgaacccgaaacgggcgatcgcgtcgaacatctgatgcaggtcgccggccgtgtggacgacgccctgccgggaaaaaagtatgattttcatccgtcgtgtctggaaaaataattaactttacctccgcaaagatagtgaaaggtgagagcaatcgtgcgggtttgcgggtaaagtttgacggattgcctgtcgtttttgggtaaatagagttttttatgacaaaactgagtgtgaacatcaataagatcgccgtggtgcgcaattcgcgcggcggcaatcttcccgacgtggtacgtgcggcactggactgcgagcgcttcggagcgcaggggattacggtgcatccccgtcccgacgcccgccatatccgttattcggacgtgcgcgacctgaagaaagtgctgacgaccgagttcaatatcgagggtaatccgatcccttcgttccgcgaactggtgctcgaagtgcgtccggcgcaagtgacgctcgtgcccgatgccgagaacgccatcacctccaatgccggatggaatacggtgaagtaccgcgattttctgcgggaggtgaccgctgaatttcaggccgggggaatccgggtttcgattttcgtcgatcccgtcgccgagatggttgcaggggcgaaggagtgcggagccgaccgggtggagctgtacaccgaggcctatgcccgggatttcgccgccgggcgcgaacgggcgatcgagccttatgtccgggcagctgaggaggctcgccgttgcggtctggggctcaatgcgggccacgacctcaatctggagaatctgcgctatttcgtcgagcggattccttggacggacgaggtttcgatcgggcacgcgctgatctgcgacgctctctattacgggctcgaaaataccgtgcggctttaccgccgtgaactgacgttctgaaaattcgcccggcattcgctccgaagccgctttcccggcggatggctcgctcttcgacgggccgtcgcggggcagttccgtccgttccgtatcgaaacggatgcggagggtaggtcgtaatgttgttaaaattctgattttattccgtgaaaaaaaacgattccacagctcctctgtccctgccggttttccggcagatctccgcgattgccgcccagcaggacgttccggccttcgtcgtcggagggtatgtccgcgatttctacctcgggcggccttctaccgacatcgacgtcgtggtcgtgggcagcggtatcgggctggccgaggagctgggccgggaactgcggaccaaggtgtccgtctataagactttcggcacggcggcgctccgaaccaggggtgtcgaagtcgagttcgtgggagcccgcaaggagtcttacgtgcgcgattcgcgcaagccgcaggtcgaggcggggacgctcgaagacgaccagcggcgccgcgactttaccatcaacgcgatggcctggtcgctcggggaggaggatttcggccgcctggtcgatcctttcgacgggatgcgggatctgcatgaggggatcatccgcacgccgtgcgacccggatgtcaccttttcggatgatccgctgcggatgatgcgggccgtgcgcttcgcttcgcaactgaatttccggctcttccccgaaactttcgaggcgatcgtccgcaacagggagcgtatcggcatcgtttcgcgggagcgcatcgccgtcgaactcaataagatcgttctctcgcccgttccgtccgtaggattcgacctgctggagcggacggggctgctggagctgattttccccgagatgcagcgtctcaaaggtgtcgaacggcggggacaacacgcccataaggacaatttctaccatacgctcaaggtcctcgacaacgtggcggccgtgagcgacgatctctggctgcgttgggcggcgatcctgcacgacatcggcaagccgctgacgaaggcttacgatcctcaggtgggttggacgttccattcgcacgaagtggtcggctcgaagatggtgcccgccattttccgagcgttgaagttgcccatgaacgagcatatgaagttcgtgcggaagatggtctttctgcatctgcgtcccattatcctttcggaagatatggtgaccgattctgcggtgcggcggctgttgttcgaggccggggacgacgtggagaaactgatgaccctctgcgaggcggatattacgtccggcatcgacgccaaagtgaaacgctacctgcggaatttcgagttggtgcgccgcaagatgaaggacctggaggagcgggaccgcatccgcaatttccagcctccgatcacgggcgagatcatcatggaaacctacggagttccgccctcccgcataatcggcgagatcaaggagatcatcaaggaggccattctggagggggagattcccaacgattatgaggcggcgtacgccttgatggaacggctggcggacgaacggggacttcgtaaaaaacagtgagtacccttcccttcctcgtgcggttcgttttccggggcctgtttccttttgatttttatcgtaaggcgggtgatcccgatcccgtatgccgtcgtgtgggtgcggagaggcgggacgaccgtatatgaaatgcagcgcaggggttcgccttgcgctgcacgtttttcggaacgaccggtcgcctggggcggtcggccgatttatttcttatccgtcattttgacggcttgttccgcttcgaggtcttttcgtgatttggacatcgttaccagccatacgcccaggaagatgcagcccgctgcggcggctttcgtgaatccgaaaacgtcgagcccgagcacgaccgtgaaaagcaccgaggcgacgggttgcacgtaattgtacatgctgataaccgtcggacgcaggtagtgctgggcgatcggcaccatcagataggccaggaacgtcgagagtacgatggcgaaggcggctccgccccagacccgtgcgggaacggccgggaagtccacttcgagggcgggccggtggtaaagtacgaccactacgatcgctgcgaagaagaacatccacttcattgtggtcacgggcgagtatttgaggatcaccttgcggcaggccgtcaggtagatggcgtagcagaccgaactgacgagggtgatgatgtcgcctgcgatcgatccgccgccgctttcaccgcggctgctgatgagaatcagcagcacggctcccgcggcgccgagcagcacgccgcccgtcttgagcggggtgatcggttcgcgcagaaagaacatcgccaggatcatcgtgaggatgggtaccgtggtggcgatgatcgagacattgatcggcgaggtgagggagagtccccagaggaaaagaatctggtcgagctggatgccgaagagcgaggcgatgaacagtccgcccaggtcgcgccaggcgacccgttcgcgcgggaggaaggcggatgccagccagaagagcagaaaagccccgaccagacgatagaccgtcagggcgaaatggttgagcccctccgggttctcgggcgagagaaggacggtcttgcagatcggggagttcagtccccagatgacattggccagcagcagggctccgtgccctttgagagctccgcgctccattcgattgattccttttttggtgacagggacaaagatacgcagaaaaccggaacttggtgcgaaaattgtcctatgctttccgtctatgggagcgttgcgttataatttcgatctgattttcgccaatctgttgttcggcgccaatttttcattttatgtctctttgacgcgcaactacctcgatttccagcagatttttatgcttcaggtacttgcggcgtcgatttttttcattcctttcgcccttttctcgaaacagtcctaccgcattccgctgcgcgatttcggcaatatcttgatcgtgaccgtgctgatcgtctatggttggatgttcatgctgttgtggggagcttcctatacctcgccgatcgacgcttcgacgatctcgaccctcggtccggtgttcaccatcctgacgggacatttcctgctgcgggaaaagaacattacgtgggcacgccgtatcggtgtggtgctgggtttcgcaggtgcggctttcctcctgttcgacaaggggtttcggctggcacccggcagcagcggcctgggcaacgccctggtgctcgtcgccgtggtggcgatcgcggtcaatacggtcatcatcaagccgcagttgcagcggtacgggacgttggtggtgatgggatggtactatatcatcgggttgcttattaccgcccccttcttctggaaatacattgccgatacggattttctgcgcctgccgctgagcggtcaggcggagctggcttatgtgctggttctgggtacggtgctgccgatgtacctgctttaccggggcacggagaagctcactttcatccacacggccctttaccgttatatccagcccgtagtcgctacggttctcgcgctcgtgcggcaccaggaacagatcgaccgcaccaacatcatcgccggggtgttgattttcgccagtattatcctggtgatccgcgaagctaatctgcgaggtttcttctccagcgttcaggcaccgtcaccgactcctgacggtcgaagtcgaaagcgaccatgaccgaggtgctttcggtctttaccgtttccctcccggcggcattgcgcccgatgatctgctggaagagggtgatgctcttgttacctactttggcgaccgtagtcgtgacgtagatgtcgtcctccatccggatctgctctttgaaggagttcgcggtcgcggccgtgatgatgcggctcgttccggagagtacgtcgtcctgcaggacctgccggtagaaatccgctttgcccaggtcgaaatacatctgctgcgatacattgttcacgtgctggaacatgtcgatatccgaaacacgcttttgaataagagttttgatgattcgtgccataaggtgtaccttttagggcaagaacctgtcgctgcctttggcgggggatccggacaggctctctgcctggtagatggtaaaaagaggccggagttctgtcggtgctttattcgcggatgatcctgaactctccggcttcgttgaaaaggaggatcgacgaggccttgcccgtcggtttgccttcgaattttggattgaccacataatccaccccgtcgatgatctcgcgggagatttcggccaggttgcggggcgtatcttcgcccgagatgttcgctgaagtcgaaacgatcgggcgccccagcttgcgcagcatcgcctggcagaaggcatggtcgggaatccgtacgcccagcgtcccctcttcggggatgaggttcgcggcgacgcccgaagctccgggcaggatcagcgtgagtggcttggtggccagctcctgcacttcgaaggcgatgccgggggccttgtgaacgtaccgcacgaccatatcgggcgtggcgcagagcaccagcatcgatttcttgttttcgctgcgcttgaggtggtagatccgctcgaccgcttcggcgttggtggcgtcgcagccgatgccccagaccgtgtcggtcgggtagaggatcactcctccttcacgcaggatccggacggcctccgtcacggcctgttccatggtttccgttgccataatgtttttcgaatttgcggatactcccggagcggagcgatttccgggagccgtcttgtgttaatggttcaggggcagcacttcgatccagtagtcatccggatcgttgatgaagtagagtcccatttcgtggttttcgaagcagacgcatcccagctccttgtggtaggcgcgtacggcttcgtagtcgcccgcgacgcggacgcagaggtggctttcgttctcgcccaattcgtagggcgtcgcggcgtgatcccgcagccaggtcagctccaggcggaacccggtttctccgtcgcccaggtaggcgaggatgaagctgccgtcgtcggcctgcttgcgtgaaatctctttcagaccgagggcccggtcgtagaacgcgaggctgcgttccagatcggtgacgttgatgttgaaatggtcgaagcgggctttgatttccatagaaaaaattgtcgtgttttcgttgaatatcctgtttcgttttcgccgttgggcgggtccggattccgtctgcccttgcagcgcggaaatggaaagaggctttcgtcgtttcctgttcggggggccggaagcggctgtcgtcccgatactgcgatcgcccggtttccgggatggctcacggctccgggtcgtggtcgtaaggccggtttgcatcttccgtttgcggcgacgcgatccgcttttccgcccgcggaaccggacgtttaggcacgcggtcgcatccgggtatccggccggtccccgcgcggcgaaaacctttggcaaagttagacatttttggatattccttgtaaaatatgaattgtttttcttaattttgcgccgcgctccggtccccgaagacgtttcgggtgtgggagttagagtcgttgaataattgaaaaaatatagaaaactatgggaagagcgtttgaatatcgcaaggcgcgcaagttgaagcgttgggggcacatggcccgggtgtttaccaagatcggcaaggagatcgaaatagccgtcaagtcggcgggtcccgatccttccgccaacacccgcctgcgcatcctgattcagaacgccaaggcggagaacatgcccaaggagaatatcgaacgtgcgatcaagcgtgccacggagaaggattcggccgactacaaggaggtgatctacgaaggatacggcccgcacggcatcgcggtcatggtggaaacggcgacggacaacaccaaccgcacggtggccaatgtccgcatgcacttcagtcgttgcggcggtacgctgggtaacagcggcagcgtggctttcctgttcgagcacaagtgcgtgttcaagttccacgtgccggcaggtacggatttcgaagagctggagctttcgatgatcgacctgggcgtggacgagttcgcacccgaagacgaaacgaccgttacggtcgaggcgccctatgagtcgttcggtgcgatccagaaatggctcgacgaccagaactacgagatcgtgtcgggcgagtcgatccgcatcgctacggataccaaggagcttcacggcgaggagcgtgaggcggtcgagaagctgatcgagcgtctggaggaggacgacgacgtggtgaacgtctataccgccatgaaggacgaggcggaagaggagtagttttccgtttcgcacataaagacgatcccggcatttcacgatgccgggatttttttgtctggcggagggggtttgtcgggggcttcgcccgactgtcgtgtcggccggagcctcggtggttgtgtcccggcgtttcgttacatccctttccgggcgatcgcccaggccaggcggttgtaggccgcgagcagcggaccgcgccagcggacgggcagtgcgttgaggatgcgcagtttgcgcagcgtacgtcggtcgtgccgggtgtaggcgaagaatttcgctgcccgggcggcttccgccgtgccgcctttggcgctgacgacgagggctttgcccagtgccgcgcgggcgacgtattcgttgctcgaatcgcgggcggcgggttcgtataggtcttcgaaggaaaatcgcgtctgttccgggcggtagatggctgccgaacggttggaagcagctttcgagtaacgcacgagccgggccggggagaagcagaccgggctggtgcgggcgagtttcgtccaaaggtattgatcttcgcccatgcgcatcccttcgggaaatccgcccagcgagagagccggtttccgccggagcgtagtcgaggaggggatcagcacgtaatgggagagcgcttcggtgaagaaatccacgacaccctccgtttgcggagtgtcgcccggtgtcaggtgatgtccgtcatccacgttgaaagaggttgcgtaggctccgcagcccgggtaggcagcgatcagacgttcgatttctgccagatagcccggttcccacgtatcgtccccgtccagcagggcggcgtactctccgcaggcttcctgcatggcccggttgcgggcggcgcttacgccccggttctcctgccggatcagccggatgaggggcgagccgatctcctcgacccgggcggcgcttccgtcggtcgaaccgtcgtccacgacgatgatttcaagaggctgcgaggtttgtgccagcaccgaacggagggtgcgggcgatctctttctctttgttatagagaggaatgacgaccgaaatatcagatttcatagctcgatttttccgggagtatccgctcgaaagcctcgcacagacgctggcattggcggtcgaagtcggagatgtgctcgctgtcgttcaggcagatcatccgccagcgttgccgttcgatgtcgcggcagatgctttcgagcgagtcgtccgtgagggtcatcaaccggcagtcggccatcgagcggggtgcgaaagctcccgaagccagcatgtcgtaacggacgagccagtgcgacaggtcgctcaaggagcggattcggtggcggcaggaggcgtccagctcccggggccagcgttcccaggcttgccgaaagcgctccgtgaggtagggctggggcatgtgggagtcgttgaaacccgggaagaagccccagggtaacagcgtgagggttttcagcaggctgacgataccgtagcgcggcgagaaccaccgggcgatgtggttgcggatagccgtgcgtttatcgtgcaggcggttgatcagctccaggtcgttgtagatgatatgcccgaccgacgaaggttgtacgacgctcaggcgtgccatgtcgcagggcacaccccggcgaaaaaaatcctccggccggcagccgcgcgtaagaaacgtgtcgtcgttgaagagtacgaaccggtcggccaacccttcgatgcggtggatattcagttcgatggtgttcgaattgaatgtggggaggtactccgccgggatgaaatcccggtgattcacgatgtgcagcttggggtggtcgcgccgtaaccacgcaggcaggtgtccccaggtaatgaaatgcaccttccgcacccagggagcgaaacgttccgcactccggaaccagtagtgcagattgcgccagtcgcggtaacggatctccgaggcatcgtcgttctccgcctgtcgtgtgcggacgaactcttcgcgccaggcgggatcgttgccgtccacccacaggattacgaaatctatctcgttcatttttgctgtttggcaattaaattttattcgggttcttgtccgtttccgtttttttcgatcttcgggtgactgcgggattttcaggccgccctcttcggggtgtttttgcgaggaatccctttttgcgtagataccgaagccccggtgtttactgtaccagcaggttgcaaccgcgtatgtcgctgcggtcgatacgtccttcgatttcgaaactgccgtcgtcgaagacgcggccgatgtcctgcgtctggatgaaggcgcaggagtagcggttggccaggtcgatgatgtcgatcccgccccgcacacctgccgggcggatgtcgaagggatcgttcacgtcgcgtacgagcacccgcatccagcccggtgtgcggaagatgccgctgcccgaagagtaggcttgcgaggtcagttcggccatgccgtattccgagtggatgctttctacgccgaacgcttcgcagaggatgcggtggaattgggccttcggaagctcctcccggtgccctttcataccgccggtctccatcacgaccgtattttcgaatttcggggcgtatcgctccgcgaggtcccagagtgcgtagctgacacccagcaggattttgggcttcggatcgcgggccatgtccgcgagcagtttttcgtagtcgtcgaggtaaaagccgcccgaaccgcaggctgcgatcagtcggtcggccatatagaccagcgacgaaccttcgcgctggagatagttgggcagcaatccgtagaggctccacccggccggatcgccgtaaaacgtccggaaggccgtgagaaacgccttttcatagtgggccagcgattgcatgaagtgccgcgagggaatcgtgccgcccgtgttgctcgacgtgaagacgatttcggggggccggtcgccggcataaacttcgcgtcgcttgaacagctcgatcggcaggaacggaatctgttcgatccgcgtcacttctgcgggtatgactccgatgcggtcgaggtattcgcggtacacggcgcaccggtcggcctgaaaccggaaagtttcgagcgcggtccgttcgaaagcgggtgtatttcccggttcgagggcgaagatattgtcggttgtcgtcatcgtgcaggtgaaagattaaaagcgcagtcaaagatagtgaaaggtgagagcaatcgtgcgggcttgcacgcagagatcgtcaaatcgcatcctatcttctacaaagatagtgaaagccgaaaagaaaacgggagcttgctcccagttttcagaggcgtatcctatcttctacaaagatagtgaaaggtgggcgacaagtcaaacttaactttttgttttcctccttctctgcccggttgtcggctctgcctgcggcgaatcgtgcgaagcggaatttcccggcttgtgctccgggtccccaattccaattccaattccggttcggtcgggaaatattcggtgtcgtaaattcaaataacaccccaagggaaaatgtgatttctccctcggggtgtgtcgtatttacggtcggagcccgtgttgccctcggtctgtcgttattttttcgacttcggcgcgaggatcatgttcatcttcttgccgtccaatttgggcatcgactcgactttagcgagctcttccagatcggtggcgaaacgcagcagcaggatttctccctgctccttgaacacgatcgaacgaccgcggaaaaagacgtaggctttgaccttggaaccctccttgaggaagttctcggcgtgcttcaacttgaagttgtagtcgtggtcgtcggtctgcggtccgaagcgaatctccttgatcgtgaccttcgcttggttggccttcagctcctttgcctttttcttctgctggtagaggaacttctggtaatcggcgatgcggcacacggggggatcggctttgggcgaaatctcgatcaggtcgagctccatctcgtccgcgagcttgagtgcgtcgcggatcgggagtacgacgggctgttcgacgttgtcgccgaccacgcgcacctggggtgccgtgatctcgtcgttgatacggtgcggattatccgcttttttcggttgaaaaccgggtcttggaagcctcggtttctgtgaattgttattcccgggagtcgatggtcgcggcgggaatggacgaggtggtgttgctatagctttgtcctcctgaaatatttagttaatacttagtttttttgctccattttgttggcgtcgatctcgtggctgaccagatcggtcatatagtcgcggaacgcttcgagggtcatctgtcccttgtcgccttcgccctgcgcacgaactgataccagtccttcggcttcctccttttcgccgacgatcagcaggtaggggatgcgcttgagctcgttgtcgcggatcttgcggccgatcttctcgttgcggtcgtccacctgcgagcggatgtcgtacttgttcaggtaggcgctgaccttctcggcgtagtcgttgaacttctccgaaatcggcagcacgaccacctggtcgggcgagagccacagcgggaatttgccgcccgtgtgctccagcagcacggctacgaaacgctccatcgagccgaacggcgcccggtggatcatgatcgggcggtgcatcttgtcgtcggcgcccttgtatgtcagatcgaaacgctccggcaggttgtaatctacctggatcgtacccaactgccacttgcggccgatggcatcgcggaccatgaaatccagcttgggaccgtaaaaggcggcttcgccgtattcgatgaccgtgttgagccccttctccttggcggcctggatgatggcgctttcggccttctcccagttttcgtccgatccgatgtatttctccttgttgttgggatcacgcagcgaaatctgtgccgtatagttgtcgaacttgagcgttttgaaaatatagagcacgatgtcgatcactttttcgaactcttcgagcagttggtcggggcgtacgaacatgtgggcgtcgtcctgcgtgaagccgcgcacacgggtcaagccgtgcagctcgcccgactgctcgtagcgatacaccgtgccgaactccgccaggcgcaccggcagctccttgtaggagcggggcttcgagcggtagatttcgcagtgatgggggcagttcatcggcttgagcagatactcttcgccctcgatcggggtgtggatcggctggaacgagtccttgccgtatttggcgtagtggccggaggtcacgtacagttccttattgccgatgtggggcgtgatgacctgctggtagccgtactccttctgtacgccgcgcaggaactgttccaggcggtcgcgcagggcagcgcctttgggaagccacaggggtagcccctggcctacgcgttgcgagaagcagaaaagctccagctccttgcccagcttgcggtggtcgcgtttcttggcctcctccatcatcgccagatactcgtcgagcatcgacttcttggggaaggagatgccgtaaatgcgggtgagcatcttgttcttctcgttgccgcgccagtaggctccggcgaccgaggtgagcttgatggccttgatcaaccccgtgttgggcaggtgcggtccccggcagaggtcggtgaatgcgccgttggtgtagaacgagatcgtgccgtcttccaggtcgcggatcagctccactttgtaaggatcgcccttttcggtgaaattcttcagcgcgtcggctttcgatacttccgtgcggatgagttgctccttgttgcgcgaaagttcgatcatcttcttctcgatggtttccagatcggcttcggtgatgggcacgggtgagtccacgtcgtagtagaatccgttctcgatcgccgggccgatgccgaacttgatgcccggatagagggcttcgagcgcctcggccagcaggtgcgacgaggtgtgccagaaagcgtgcttgccttcggggtcgtcccacttgtagaatttgatcgaagcgtcctcttcgatggcgcggttgagatcgacggtcgcgccgtttaccgatgcggccagggagtcggcagctaaacgagggctgatactctcggcgatctgataagccgtagtccctttggcgaactctttgacgttgccgtccggaaaggtgattttaatcatttgtaaattattgttttggggccttcggcgcttccacaattacgagacggaatacacctccggttcgcccggttttactgttttgcctgcggctttccggcgggcttgtccgcgcaggcggatagggccggattgtcgcttatgcttgtgacaaggaacgtgccgggaagcggtttcttgtccggatcggctccgttgccgtatgacactatgccttgaatcggccgggaccgtcgggagagtgcgtgccgtccgatttacggagccgactatccgttcggttttcggagccgcgttcagccggtttaactctctttctccgtatcgggcaggtccttcacggacaagtcccttccgccccgttcgcgctcggcgtgcggcagcgggttgctcgtccattcggcccaggcgcggcggttgttcacgatgtccgtggccaggtagatggcgttgcgcatcgattgcgggtcggccttgtcctgtccggcgatgtcgaacgccacgccgtgatcgggcgatgtccgtacgctgcccaggcaggccgtgaaattcaccccgtcgggcgagagggtcttgaacggcgtgagtccctgatcgtgatacatggctagtactgcgtcgtaatcccggtagtggccgctggcgaagaatccgtcggcagcgaaggggccgaaagcgagtatgcctttttcgtaagcctcattgactgccggtcggatgatgtgttcctcttccgaaccgagcagaccgccgtcgcccgcgtgaggattgagtgccagcaccgcgatacggggttcgacgatgccgaaatccgccttgagcgacgaacgcagctgttcgagccgtgtgacgatcttctgccgggtcaggtcgtggctgatctcggtgaccgggatgtggatcgtgaccaatcccatgcggagcaggtcgctgcacatcatcatcaggggttcgccgcccagctcggccgccagaaattcggtgtgtcccgtatagcggaagtcgtccgactggatcgactccttgtcgatcggagccgtgaccagtgcatcgagctgttcgtcccgcaggtcgcgcacggcggcgtggagcgcctcggctgccgcccggcccgcctccggcgaggccgtacccggctcgatcttcgtttcgtcgccgcagagaatcaggttgatcttgccccggcgtatctcgtgtatcgaagaggcgatatggaaggggacgggttccagatcggcgatggttttctggtaaaattccgccgctttcagggatccgtagatgacgggcgtgcagagttccgtcatacgcggatcggcgaaagtcttgagaatgacttcccagccgatgccgttcggatcaccctgcgtgatgcctattttgagtctgttttccgacataaataaaattctttgttccgttttcgcgcacgcgatccgacgatagaatccgtcttttcgctgtttgccgggcgaaaacgctctgtttcaatctacaaatataggatattttttcggagttcgcggattttgcgccgaaattatgaccggatgtaaatttttttgccgaaaattatgggggggggaattttttctatctttcggaaagttttgaacccattaaattggaagtgtatgaaaaagttgcttttatcggtggttgcggcattctgcataaccgcttcgccggcccagagttttgaagagttgttagctccggtccattcctgttgcgagcgtgggaatcgggcgatggaagcgaagaggtatgcggaagcggagcgtgagtaccgggaggcgatccgccttttcgagacattgcccgatagtgtccggacgcagctcgacgagtggaattacggcggctatttgagaggcgaatattacaacctggcttgtgcacagtcccgactgaacaaacgcagggcggctgtggcgagccttgcggcctatgtcgattgcgggaactgcgattactcctggatgatcgaagatcccgatctggacaatatccgctccgagaggggatatgcggagactgtagaaaaagctcgtgagcagggcgatttcatgtggatcttgcggcaggcggggccttacgattcctctgcgccgacggattctcttccccggttccgctatgccgatcccaacgaccgcgatctggtgcgggtgcgggagtatttcaacttggacagtattgccggcagcggcgacgaactgtcgaagatccggaacctgatgcactgggtgcacaatgcggtacgtcacgacggcagttcccgcaatccgacctctcgcaacgcgatcgatctgatcgaggtgtgccgcaaggagaaccggggaatcaactgccgtatgatggctcaggtgctcaacgagtgctatctggcgatgggtttcaagtcgcgcttcgtgacctgcatgccccggaagatggtcaatgactgtcacgttattaatgtcgtctattccgcgacgctcgacaagtgggtttgggtcgatcccacgttcgatgcctacgtggtcgatgagaacggggtgatgctttcgatccaggaggttcgggagcggatgcgcgacgggcgtccctatttcctgaacgaggatgccaactggaacaacgagtcgccccagacgcagaaacattatctcgatacctatatggccaagaacctctattacctggtatgctccgaccggagcgagttcgacaccgaaacctggtgcgaaggcaagcatccgatctattatgttgcgctgattccggagggctatgattgcgaccgggagtatcatttcatgacgaccaacgacaaatggttctgggcatcgccgtatgcggagtgatttcggtctgcgttggttccgaaccctctcccgatcctgcggagagggttttttagtcgctcggaaacaggagtgtatattctgtcgctggccggtgtggggcgttttttaagaatggcggaatgtgcgcccggctaagaaacggagcgcttgggggagggagaaattccgataggtattccggtcctccgtatcgctgccgttctttttcggctgtcagttgtctgttttccgatatatgttcgcccggcgtcgggcttatgccgtagaaccgtctgtgtttgacgtaattacttcccgtttttcccgaaatcgttcgccgaggagataaaagtcgctaaactaaaaaatgcaccggacggggatttgccggctgaatgccgactctccggtccggttctctctcgtctttcggacttgtcttatctctttgcgctcgcctgccggcggaattcggcgcagacgacggccgtggcgatcgctacgttgagcgattccgaaccgttgcggtcggcgggatagggcgggatgaacagtttgtgcgatacgtgtcgtgcggcggccggagcgatcccttggccttcgttgcccatcaggacgatcccgcccggcgtaaggggtgtcgagtagatgttttccccctcgaggaaagtcccgtaaacgggaatattccgctcccgagcctgtgccaggtacggttcgagggccgtgtagtggactttgacccgcaggatggcccccatggtcgcctgcacgaccttcgggttgtagcagtcggcggtcgttggggaacagacgatctcggggatgccgaaccagtccgccaagcggatgattgtgcccaggttgcccgggttctgcacctggtcgagcgccagcaccagctcccgttgtgccgtatcgggccggaaaggatgatgcgggatttcgaccagcgccagcgaatccgacggggtcttcagcagcgagagccgctccatttcacgcgaagacacggtttcgacttcgccgccctcgaaaagcccttccagggcgaatatcttgcggacgcgcagggcggaggtgcacagctccccgatgaacttgtgtccttcggctacgaacagcccgtgttcggtgcggctgcgtttgtcggccagcgagcggacgagttgtatttcggctttggtcatggttgctgccgtttttcgatcgtgaatgttgtgccttcggtggccgggtgggtatcgggaaataccgtgcgggcctcttcgaccagaacgctctcttccttgtagcgggacgagtagtgtccgattacgagccgtccggcgccggctttgagggcgatgcgggccgcttcgaccgtagtggagtgaccccgctcgcgggcgatcttgtgctcggcgtgggcgtaggtcgtttcgtggtagagcagatcggccccctcgacgagttttgccgctttgggcgaccagctcgtatccgagagataagcatatgaacgtggcgcgtaaggtcggtaggtcagttccgcattggggagcgtgtctccgttgtcgagcagaatatcttcgcctcgcttggcggccgtgatccgggcgatcgagagtccgtattccgtgattttctccttgcggacgttcagcgggggctgtttctcccggaacaggtagccggaggtggggatgcggtgacgcaggggaacgctccacacctcgagcgtgcggttttcgaacagtagggcgtgccgggtcgtatcgacttccacccattcgatttcgtagggtagttgcgtgtcgaagtagcgcaggtggcatccgagcatttcgcccagcggcgcgggaccgaaaatcttgagcggcgtgcggcgtccgtagagccccagcgtcgagatcagcggaaagagtccgaagacatggtcgccgtgcagatgggagatgaataccgcccgcagtttcagcggattgattccgtagcggaacatttgctgttgtgcgccctcgccggcatcgaccaggtagtgctgttcgtgtaccttgacgatctgcgccgacggatgtcggtcgggcgtaggtttggccgaagccgagcctaatatggttacgctgaaactcatcttttttcgattttatagggcatctttcgcccttcctcgtcctccccgaaagggagatacttgaagtatgtcccttccgtgtcgtccgtcgtcatgtcaaaatctgcacccctaaaatcaaaaaagggcggcaggatatggggactctttcgcccctttttcgctctttccgactggggaatacttaaaagtatgcccatccggccatcgcatcgtcctgtcaaaacctgtgcccttaaaatcaaaaagggttgcagggaatggataccttccgttcttcctcgtcctttccgaaaagggtgacagccgcgtcgaaacccatgctgcaggaattggaaggagttcgagggtttccgtgttctccgcctgccggttttgtaagaccgggtttcgaacggtcggaaaccgtccggctgtcggggatgaagaaagggaacggcttgtgcgcactcgttccctttcttgaatagaaattactgcagcaggaaacgttcgcagtcgagagcggccatacagcccgagccggcggccgtaatcgcttggcgatagtggggatcctgcacgtcaccggcggcgaaaacgccttcgacgctggtgcgggagctgcccgctacggttttgatataaccttcggcgtcgagttccagttggtctgcgaaaatctccgtgttgggatggtgcccgatcgccacgaagaagccagcgatgtcgattttggtttccgtgcctttgttgtcgcgcagcagggcgcctgttacgccggtttcatcgcccaatacttcggccgtgttgtgctcgaagaggactttgatgttcggggtgttcattacccgctcctgcatggctttcgaagcccgcaggtagggcttgcggacgatcagatatacctggcggcagatcgaagccaggtaggtggcctcctcgcatgccgtatcgccgcctccgacgaccgctacgtccttcttgcggtagaagaatccgtcgcaggtggcgcaggcgctgacgcccatgcccttgaatttctcttcggagggcagtcccaggtatttggctgcggcgccggtcgaaatgatcagggcttcggcttggatctccttctctccgttcacgatgacgtggaacgggcgcgaggagagatcgacgctggtaatgacgcccgggcggatatccgccccgaagcgcaaggcctgccggcgcatgttatccatgagtttggggccgtcgatgccttcggtgaaaccggggaagttttcgatttcggtggtggtggtgagctgtccgcccggctcgatcccttcgtagagtaccggcgagaggttcgcccgggaggtgtagatcgcagccgtatagcccgaagggccgctgccgatgatcagacattttacgttttccatagagtattttttgttaagttattaagcttcgacgtattcgttttcttcgatgtagcgcggtgtgaatccgccgacgatgcgtccgttgtagtcggcaagcgcccagagcccttcgctccgaatgcgagaacagcccgtgtaggggttgtaatcgacgatttcgtagcggggttcgatcacgtagtgtccccgtttgtcgatcaggcccatgccctgtgcggtctggacttcggcgcgtccttcgcggaagtcggcggcccagacgaattgcggcgcgataaccggtcggttttcggtatcgacgaacccgtagccggtttcgtcttccacacgaaccagttgatcggacatctcgcccacgaacagatgtcccggaaattcgggcagcgtggtgtagcgggacggttccgcgtcgcaaagcatttgccccttgccgccctgttcgcgcacgaactgacgcagacgttcgaatccttcggcgtcgtgtccttcgccgaaacgggcgaaatggtaccggacgggaatcagtcgtccgtcggaggtgacgtagaggttgccgggtttgagattgttgtggctgaagcccagctcggacagtcccgcctccagtttatcgagcgccgaccgcagggattcggcatcgaactctgcggcgcagaccgaaagggggcgcccttcgggcagccgatgcagcaccacatcgcaggtgcgggtcgtcccggtgtcgtccgtgtaggtcatttcgtcgcgcaggatcgtgtattcggtaagcaacggtgtccggaggtaccgaagccgggccgctgtctgttcgacggcgaagatcgaggctgtcgagagcgggaagcagagcaggtatttccggctctgccattcgatttccgcttcggcgaagcgactggtgcgcgacagggctactcctcccgtcgccgtccggcggggatggcagtcgcggagcgtcgaaaaggccagatcgggagcctggagcgcttcggtgaagttataaagggtgggaacggtcatctttttactgtattttgatgctgatcgagccgatgttgaggatggcgatgagttcggcgatcgacgtgttgtaactcattccccggaagggtggtttggccagatcgccccgcacctgtcggatcgcctctgaaagctcttcgggcatcggactcgaacagtcgtgcagcagtcttgcgtagcggttgtcggcgggaatctcctcttcggtcggaaagagcagcgaacgtgagtcggacgtggtggcgatatggatgttgatcaggagcaccttgccgtcggtggttccgatggtgcggatcttttcgcagatcgcgagctgttcgcgctggtcgcagtccgaggcttccccgtcggtgatgttgaagacgatgggcggaaaactttcgctgtgggccggattcgtgcaccacgcttgtgtcaggtcgcggatttgcagcagcgcttcgtacatgggtgtctgtccgaccgctttcggagcgatccaggccggcatcgaaatcttgcggaaggtggcttcgccgtccggcatgcggcgctccacgaccgtttctgcgaaatcgacgggcagagcggccagccgcgataccggaaccagcggctccggatcgttcagcagcgatacgattccgtcgcccgaatagcccaataccgcgatgtcgtagtagtcgcgcacctcgtcgctgcgccgggcccgttcgatgagttcgaacagcagccggttggtgacttcggcgacggcttcggccttggtggtctgtcgtccccggaacaggagtttctccgccatcgagccggattggtcgatggccaggatgaaggctgtgcggtggctccgcgtgatactttgggtgtacattatcggattcctcttacggtgtggtagtcctgcattttctcctcctccgaatcggcatccacgccgtatccgacggccatggcgggcgagcagtcgcgggcccggtcgtcttcggcggatttatggagtgtttcgcgggttcgctctccggctgtcacggcttctgcgatctcttctggggagggagcgtgtccgagcagttgcacgagcaccccttccgcccaactgcgggcgtaatggtcgtagtcggcggctatccggccgaatgcccggtcgatgccttccagcgaatcgatgccgccgttcgcaatggcgtcgaggatgcgtttcacctcccggcggggaacgtattgccccgccacatcgttccagcggcccgtgccgtccgcacgacccggttcgccgtttcggagcattgcgccgagcgaggcgacgatcgccttattgtagagcttcaggcccctttgcagctgcgtggagcggatcagggcgtggttgtggacataactctccgcgtcggggtgcgcttccgccagcgagttgagggtattgaccgcatcgatcattcctccggccagataggggttgtactcctcgaagttgatccggtcgcgtttgacggtgcgccggtcgcgttcgggccatttcccgatgtcgcgcacggtgccgtagctggtgaggttggcgcccggcatcagcgccgaacgtccgtcctgttccaccaggtaggagaacggaaacgccgaggtgtcgtgatgctgcgtatggcggcccaggaccagcgtaaagggtccttcgatggccggagccatgatgtaggtgccgctgccgaatttgcagccccgcaggtggacggactggtgcactgcgccgctcttaaagaggtggttgctctggttggcgccgctgccggcgttgaagaacgagaacattccggcgatcagcagcgaggatttgtggtgcgaaacggtgtagggacccgcgaagatcgaaacggcctctccgttttcgcagtggctgttggcgaaaaagagcgaatcgacggccgtgaagtgtttgtccagcgtgcagcattcgccggcgaagcagcgttcgagaagcgtgccgccgtcgacgcgggctccttctgcggcgatgaaatcgcgggcctggacgtcgatgccgacataagctccggcgcagaccgtgccgttttccaacagggatgctccgtcgatcgtcgctccttccccgatattgacctcccggatgaaacgggcgccggtgatgcgtgcgtgcggaccgacggtaccgagggtgtcgcggcgctctgcggcgtagcgttcgatcatccgttcgatggcttcgacagcctcggggcgatagcgatagacggccaggatgtaggcggtctgggcggtgagtcggtcgtagatccgtacggtacgtccgccgttctcgttgatggcggcgacccggactccgttgccgaacgaggattcgcggcggcattcgagcgccgtaactccttcgatcagcgcctcttcgccgatgcggtagttgcgtatggtgcagcggcgcagccgtgctccccgcccgatctgtacgcgtccttcgagccgacagcccgaaagttgggccggtgtgaagtcttgtgcgacttcgatggcatcccaattttccgcgctgtttccggcggccgtgagcgcctcgatttcggccggtgtcggttttctgtattccgtcatgttgtcgttgcgattcgaaatattgaagacaaagatcgtgaaaggtgagggcaatcgtgcgggcttgcacgcaaagattgccgaactgcctccgatcttctgcaaagatagcgaaagccgggagaaaacgggaacttattcccggttttccgaggcgcattctatctaaaactatgtcaaagataacgaaaggaggacggcaagccaaacatcccttttagtttctttttttgcgaggcagagggcactcgtgaactctgcctcgcttcgaccgtcggttgtccgaacttgtccgagtcgccttctatcttttgcaaagatagtcaaagcgacgggcaatcgaaaatttatttttcggattcccgcgaaacgaccctgtcggaacaggtattcttcggataaagatagttgttcgccgtcaaatatgcaaggtggttcggggttccttgcggccgatggccagacgttgtccgtcgcggacgacgatcgcccggccgtttgcgaacggttttaccgcgttgcagtccgaacagttgatcgctacggccccggtggagtctatgaaatgccagcagcgtcccgtgcggacggcggccaagccttcggagaagtcgaaaccggcgtcgtatatgggtgggatcaattcccgttctccgattttgaaaccccacagtccgtcccggacgaagagttcgccccggtcggccggagtttcgggcccgcaaacggcgtatcggacgagcggcttcaagttcggcaggcgcatcagcggggatttgagcacccgggcgatgcgatagcggacggcgtcgcccgccttttcgaacagtgcgaggcattctgcgtgggccgcacagccgtgccggacgattttccggggcgagagcagcagtccctctccccggttgtagcgggcgagcagtccgggctcgagcgccagcgcgtgcagggtcgtggagatcgtggcgatggagtagtcgtcgatcgacgcgtcgaaatcctccgccgtgcgtccggggtgctggtaggctgccgtgcccagttcgggacttttctctccggcgaagacgggaagaaacatcgcatcgaaatccaccggacggagcgtgccgctctcgtccagcagaatattttcgggtttcaggtccccgtgcgcccagtcgctttcgagaagttccagcgccaggcggtcgaactgtcgggccaagttgctgaggtgcgctttgtcgccggagccggcgccccgcataacggcttcgtagagcgtgatcccttcgatccagtcgtctatgaccacgtcgcaccactcgccctgcccgtcggcctgccaaacgtaaagctcttgccgcaggagtttctcttgatagatcgcttcgagatgctccataggccgtgtgtagcatttgagcattttgtaccggccgccgcagcggattttgaaaaccaccgcgctgttgccgacccagcgcaggggttcgccgtccgaagaacggcacacttcgatttctcccagtgtgcgggtcagcccatagggatcttgaagagcctcgatgaattggcggatcgaatggagcatggataacaggatgaagggaagataaaaacaagtggaaaaccgaaggctctccacttgcaggattgaagaaaagcgtacgggaacgcttttccggtgtcggattagtggcagcagccctcgccgcagcctcccttgtggtcgctgcaacctccctcatgatcgccgcagccgccgtcgcaaccgcagctgcagccgcctgccgattgcaggtcttcgggcgttacgtcgcgtaccgaaacgacctcgacctcgaaattgagggtcttgccggccatcggatggttgaagtccattttcacggtctcttcgcccacctccttgatggtaccgatcatgcggttgccctgtgcatcgctcatcggcacctgcgaacctgcgaagaggatgtcttcggccagcttgccgtccaccatgaatgtatttttaggcagatcgacgatcgcttcggcgatcacctcgccgtaaccgtccttcggagagagcgtgaaggcaaccttctcgcccggctctttgcccaggatcgcctcctcgaatttggggagcagcatgcctgttccgcagatgaactcgaggggagcgcccggctgggactggtctgcgattgcgccgtcaacggtcagtttgtaatcgaccgctaccattttgtttttttctactttcattgttttcagaaaattatttgagtgtaattgtgacaaagatacgattttcgcccggattttgcaatcgggatgaaataaacggatttatacattgtattattaacgcgaaaacgatgaaaaaattattcttcgcatggatcatggcgctgtggtgcttccccgcagtattcgcgcagagcgggcaggggattcgttatcagggagaggtcggtgtggggaccgctttcggagtaggatcgaacgcctacgaccgtttcgtcctggaaaccgtccacggcgtgcgcatcggcccgcgactgttcgtcggcctgggtgtggcctggaactactattccgcccggggagatatgccggacgatagtttcagggagtacaccgacggaggccgttcgttcgtcccgattttcgccgatatgaaggtttatttcctcgaccggcggatttccccctatctgaaagtggatatcggttacggcatccacaagcacggcggtatttatgctgcgccggccgtcggtgtgaaattcggtttggggagtgtcctggcactgaacatcgacttcggattccaggtgcagcagcagactgctcccgacacttcgagcggtctgggaggtatcgtcctgcgtgccgggttgagtttttaggctcgaatccttcggggtgaaataaaaaggaggggcgcagtccgcgtccctcctttttcatgcagagtcccggtttattccgtgcagcggcagaccagattgcggtcgccgtagccgttgtcgatcttcgacacgtaggggaagaatttcgactcgcggatgaattcgagcgggaacgctgccttttcgcgcgtgtagggatgcgaccattcgccgcagatttcggcagccgtgtggggagcgttcaccaccacgttgtccgcttcgcccgaagcggcggcctcctcgcattcgcgcttgatttggatgagcgtggcgatgaagcggtccatttcggctttcggctccgattccgtaggctcgaccatcagggtttcgtgtaccgggaaggatagcgtcggggcgtggaagccgtagtccatcagacggtgggcgatgtcgccgcagtcgatgttgtagtctttcttgaagtgggtcaggtcgagaatcatctcgtgacccacgcggcccgtttcacccgaatagtaggtgcggtactccgacttgagggccgacgacatgtagttggcgttcacgatcgccatctcggtagccgctttcagaccttcgccgcccagcatcttgatgtaaccgtaggtgatcgggaagagcatggccgaaccccagggtgccgatgccacggccgtgatgccttcgtcgccgccggtggggacgatcgaatgcgaggggaggaacttgcggaggtgctccgccacgcagatcggacctacgcccgggccgccgccgccgtgaggcattgcgaaggtcttgtgcaggttcaggtggcagacgtccgcaccgatgtagccggggttcgtgaggcctacctgggcgttcatgttggcgccgtccatatatacctgtccgccggcgtcgtgtacggcatccacgatctcgcggatgcggctctcgaatacgccgtgcgtcgaggggtaggtgatcatcatgcaggccagctccgagctgtgctcctgggctttggccttcaggtcctccacgtcgatattgccgttggcgtcgcagtcgaccgtgacgatcttcatgccggccatcgccgccgaagcggggttggtgccgtgtgccgacgaggggatcaggacgatgttgcggtagccctggccccggctctggtggtaggcgcggatcaccatcagtcccgtgtattcgcctgcggcgcccgaattgggcatcagcgagcaggcggcgaagccggtgatggtcgccaggtcggcggccagcccgtcgatcagttcgcggtagccttcggtctggtcggcgggagcgaacgggtgcatgttctggaacccggcgagcgacaggggctgcatgagggctgcggcattgagtttcatggtgcaggagccgagcgagatcatcgaatttgccagcgagatgtcgcgcagctcgaggcgtttgatgtaacgcatcaggtcgctttcgcagcggtaggtgttgaagacgcgttcggtcaggaactccgactggcgcaggatcgcggccgggatggtaatctcctccgacagtttgacggccttggcttttttgcctttggcctcggcgaagatggcgattacctcgttcacctcctcgggggtggtcacgtcgtcgaacgagaaacgaacccgatcctccgaaggatagaagaagttgatgccgcgttcgagcgccagcgactgtacgacggcggcttccgcctctacttcgagcgtgtcgaagaagttcttggctgccagtttgtagtccatcgcttcgagcgccttggctaccgttacggctgccgtgtgggccgtcttggccgagcggcgcagaccttcggcgccgttatagacgcagtagaagccgaccatcgaagccatcagtgccgtagcggtgcagatgttcgaggtggcacgctcgcgcttgatgtgctgttcgcgggtctggagcgccatgcggagcgcacggttgcccagacggtcgatcgatacgccgatgatgcggcccggcatgttgcgcttatacgcttcgcgcgtggtcatgtagccggcgctcgggccgccgaagcccatcggaatacccagacgctgcgtcgtgccgacgacgatgtcggccccccattcgcccggagccttcagcagggccagcgacagcaggtcggcaacagccgttaccagggcgcctttggcatgggccgcttcggtgaaggcggcgtagtcgcgcacctcgccgttggcggcggggtactgtacgatggcgccgaactccttgccggtgaattcatatgtattgtagtcgtcgatcaccagttcgatgccgaatggctcgctgcgggtgatcagtacgtcgagcgtctgggggaagatgttacgatcgacgaaaagctggttgcgtccctccttgaccgcttcgcgcgagcggagcgagaacatcatcagcatcgcttcggcggctgcggtgccttcgtccaacagcgaacagttgccgatctccatgcctgtcagcgaaatgacggcggtctggaaattcagcagcgcctcgaggcgtccctgcgaaatctcggcctgatagggggtgtacgaagtgtaccaggcggggttctcgaagacgttgcgcgtgatggcggccggtacggcgcaggggtagtaacccatgccgatgaacgaacgcagggtgcggttcttggctgcgagggcctggatgtgattcgcgaattcgtattcgctcatgccctggggcagggcgagcggctgtttcaggcggatagactgagggatgacctgtgcgatgagctcatcgacggatttgacgccgatcacggcgagcatcgctttcaaatcctcgggattggtgacgccgatgtggcggtcggaaaatttatcaaacataggattttgagaatgatttttttatgatttgtaattcgaatttattcgttcgggatcaatatttgaaactgctgcctccgatgaactcccgcaggagcgacgtgggcgggatctcttcgggagagatcgggatgaagttgtcgaggaacttgagcatgcgtttggcctcgccgtattcggggaccgtatcgggtacttcccgcaggatcggttcggcaaagcggcgcaggaccgaaatttcgtagaagagcgacgaattgaacatcacgtcggcattctcctggtaggggaagatgtgcttctcctcgccccggcggacgctttcccagcgggcgagcgtcgaaagggcgtcgttgccccgcgtgcggtagtcgcgcgtcaggcggcgcagcagccggttgtcggaggtggcgatgcgcgacacgttgtcgagggccaccgaggtgaagcaggaaacgtagatcttgaatttccgggattcgggaacgccgggcgtcagggccgggttcagtccgtggatgccttcgacgatcagtaccgaccgctcgtcgagctgcaaggggttgtcgtgccactggcgggtgccggaaatgaagtcgtaacgcggaatatcgacgctctcgccccgttcgaggcgtttcagatggtcgttgaactgttcgaggtcgatcgcttcgagtgcctcgtagtcgtactctcctttttcgtcgcgtggcgtcttttcgcggtccacgaaatagtcgtccagcgagatcagtaccgggttgagtcccaggacccgaagctgtacgcccagccgcttggcgaaggtggtcttgccgctggacgaagggcctgaaatcaacaccagccgcacgccccgttcgcggttggcctccgcgacgcagccggccacctgggctagcttgttttcatggaacgcctctgcgatcttgatcagctcgctggcgtcgcccgcgaggactttcgagttgagctgtccgacggtcggaacgcccatgatctccacccacgactggtattggtggaagacgtcgaacatcttctcctggtggacgctctgttgcagccgcgtcggatcggtccgcagcggcagggcgatgaagaagccgttgtaataggggtgcaggtcgaactgcggagtgtaacccgtcgaaggggtcagggctccgtagaaataacccggcagggagtcgatcgtataaattttgctgtataacctcggccgggagtcgagcagggcgattttatcggccattccgaacccttcgtagattttgcgggccgtgtcggtgagcatcttcaccccctggatcggcaggttgcggtcgatgatccctcgcatgcgggccttgatcgcgtcgaggtgttcggcgggaatcggtccgaagcccgatatttcgcagtagaaaccgcttgcccccagcgagtgccggatgtagagcgtgcggtcggggaacagctcccggaccgccttttgcaggatgaacgagatcgtgcgctgatatacccggattccttcgaaggaggtgatgtcgatgaaccggaccgttaccggtttgtatattctgtagttgagttccttgatgcggttattgacataggcggccaggaacggatgcggcccgtcgagccggagctgccgttcgacttcgagcagggtcgtgcccatcgcgacctcgatcgtccgtcctgcgttttcgcagatgaccggaagggtgtctgacatatttttgttcataaatcgcgtaaaaatacaattatttcctaactttgacaaacgtaaactctatttgtgatgaaaaaaatcttcttgggtatttcgctgttgctgtgtgcggcgttgtgtgcgtgcgcacctcgtgaaaaagtagttatcatattatcaacgaacgatatacatgcccaaatccagaattttccgcagttggcgacggccgttgccgagtgtcgggacacggcgtcggtgatcctggtcgatgccggcgaccgctggacaggcaacgcctatgtggaccaggccgaaggacggcgtcccgtgttggagctgatgaacgagctggggtacgacgtggccacgctcggcaaccacgagttcgacgtggggcagcagacgctggccgaagcgatcgactattgccgtttcccggtgatctgcgccaacatggtcagcgagaactcgccgattccgcagttgaaaccctatgtcattctcgatcgtgaaggggagaagttcgctttcgtcgctgcggtgaccaattacgggtacaacaaccatccggacggccacgacgccatcttcgaaggattgcgttttacggatgccgtgcggacgctcgaggagtacgaatacctgcgcgacagttgtcaggtgttggtggcgctgacacacatcggttcgaaatacgaccgggaactggccgacgaagcctcggaatacgacctgattatcggcgggcacagccacgagcggatcaacgaggtggaggacggcgtgctcatcacgcagacgggccgcaacctgaacatggtgggggttaccgaggtgcgactgcgaggcaaggagatccggtccctgtcgttccggctggttccgctggccgactacgcgcccgacccggtttatcaggagatggtcgagacctaccgcaacaatccggtgctgaaggagaaggccggagagctgaccgctacggccgacaaggtgggggtggccaacatcttcctccaggcgctcaaacgcaagtcgggcagcgacgtggctttctaccactacggggggattcgccgcgacagcctttcgaaaggcgacctgacacggagcgacatatatgacctggatcctttcatttcttctgtcagcgtgatggagatgacgcccgaacagatgagcaaaatggtgctgaccaaatacaacgacacggtcaataagggcgagtcgcatcggatcgacctcttctcgaccgcaccgtacgtgatccgtaccgacgggtacgatgcggtagaggtgatctttcccgggttggtgtccggccgtaaatacaaggtggcgatgggcgactatgttttcaagaattaccagggactcgaatatacgaacggcgagactacgcagtggctcgtgcccgacgtattgatggaatacgtcgccaacggcggcaaacccctcgcacccgacaatacgctccggcagtcggtcgcaggtctgcacgatgaccgggagaaccacgacgatcgtgacgacgattgatccggtcctttcatcgaaggacggggatcggtgagtcgggtattatgcgccggggcggtcgggctccggcgttttgttggcggcggggagctgggggtcggccgaaacggtcggattttccgaggcgtttcggcgcaagtgtccggcttgtcggttgtgtcttgcacggtatttgcccggaatgcagggaaaccgcgacggttcggcaggttgccggatccgcaggcggcagcttctttagcgtatggtgcaagcgactccgttgaatcttttggtgaagtcccatttggcgttgctgttgtgcaacatcatctgggcatgcgactatcccttttacaacctcgtgctgtcgaagtacgtggccccgatcgcgctggttaccgcttcgctttgcgcggcggcacttttctcgctcgttcctttgctttggagcaaggcccggccgatcgcccgcaaggacatcaaaacgatgatcggtgcggccctgctgatcggcgtaatccgcaaggtgctgctcatgtacggtttgtcccgcacgtcgcccatcgacggatcgatcatcgacacgatcacgccgctgctggtactgcttatttccgtggtgctcggtatcgataaattcacgcgcctcaagatcgccggtctggtgttgggcatggcaggtgcggtgggtgtcgtcctgctgggagccagcggcggacatacgcactccggactagtcggcaacctgatgatcgcgggctgcgccctggctacttcctgctacatggtctggttcaaaaagttgatcgccaggtacgatgtcgtcaccatgttgcgctgggtctattgtctggcggcgctgatggtgcttccgttcggtgcccgggagttggtgcatactgatttcgcggcgatggataccgacatcctgctggcgacgttgttcgtggtcttcgtgccgacgtatgtcccgaacctgttgctgaactattcgctcaaatacgtgcagccgaccgtttcgagcatctatacctacctgcaacccgttttggcggtgattttgtcggtggcgatgggcctcgaccggctgcatctggacacggcgctctgcgcgctggttatcttcttcggcgtggggctggtgatccgctcctatcgcggcccggccgtaccttcggctccgctgcccgtccatacgcattgattttctgcgtaaaaaaggtcgaaagtttgcagattgccgatttcttcctatctttgcactccccgtatgcgcacgatgcgcgaggggagtgttttattattaaccatttaacgagcgattgcatcgcatttaatttccacatggaagaagcaaaaaaagttgcaaacgagaactttgactggaacgcgtttgaaaacgacctgggcgtttacgaccagcccaaagagcagatcggcgaggcttatgacaagactctttcgaacatcgccgcaaacgaggtgaccgaaggtacggtcatcggtatcaacaagcgcgaagtggtcgtcaatatcggctacaagagcgagggtatcatccccatttcggagttccgttacaacccggatctgaaggtaggcgacaagatcgaggtttacgtcgagtctgccgaggataagaacggtcagctggctctttcgcacaagaaagcgcgtcagctcaagtcgtgggatcgtgtgaacgaggccctcgagaaggacgaaatcatcaagggttacatcaagtgccgcaccaagggcggtatgatcgtcgatgtattcggcatcgaggccttcctgccgggttcgcagatcgacgtgaagccgatccgcgactacgatgtatatgtagataagacgatggagttcaaggttgtgaagatcaaccaggagttccgtaacgtcgtcgtttcgcacaaggcgctgatcgaggccgagctcgaggcgcagaagcaggtaatcatgtcgaagctcgagaagggccagatcctcgagggtacggtcaagaacatcacttcgtacggcgtgttcgtcgatctgggcggcgtggacggtctgatccacatcaccgacctgtcgtggggccgcgtcaaccaccccgaagagatcgtttcgctcgacgagaagatccgcgtggttatcctcgacttcgacgatgccaagaaacgtatcgcattgggtctgaagcagctcgctccgcacccctgggaggcgctggatcccaacctgaaggtgggcgaccacgtgaagggcaaggttgtcgtgatggccgactacggcgcgttcgtcgagatcgcaccgggtgtagagggtctgatccacgtatcggagatgtcctggagccagcacctgcgttcggcacaggatttcatgaaggtgggcgacgaggtagaggcagtcatcctgaccctcgaccgtaacgagcgcaagatgtcgctgggcatcaagcagcttactcccgatccctgggccgatatcgaaacccgctatcccgtaggtacgaaatgcaaggccaaggttcgcaacttcaccaatttcggtgtgttcgtcgagatcgaggagggtatcgacggcctgatccatatttccgacttgagctggaccaagaagatcaagcatccgggtgaatttacgtcggtaggcgccgaaatcgaggtcgtagtgctggaggtcgataaggagaaccgtcgtctgtcgctgggccacaaacagctcgaggagaatccctggaacgagttcgagggtcagttcgcagtggacagcgtacacgaaggtacgattaccgagatgaccgacaaaggtgccgtcgtatcgctgggcgaaaacgtcgagggcttcgctccgatgcgtcagctggtgaaagaggacggcacgacggcgacggtcggcgagaaactgccgttcaaggtgatcgaattctcgaaggctaccaagcgcatcacgctttcgcacactcgtcttttcgaagaggctaaacgtgccgagcgggccgagcaggctgccgagaagaaggcttccgccgaggctaccaagtcttcgatgaagaagatcaacgcttcggtcgagaagaccacgctgggtgacatcgccggtctggccgaactcaaggacgcgatggaagcggctgccaaggaggagaaataatccttgatcgcatggatgagaaaatccccgaccgcgaggccggggatttttcgtcggtgcacgcgccggttcctgcggaaacgaccgattttgccggttcgtgccgaccggttttcaggcgatcgggctgtccgtgtcggtttgcagcgggggcggtcgattccttcgcgaccgtaccggttcgtgcaggcgtatcggagcctgatcccataggctccttcggtccggtgaaattcggcattgacaggagattttgggcgtcgtattatttataggtcggtgcgtgcggcttcccgttccgtccggtagcggcggatgtcgtcgatcgaaacgatcggaaagtcgtgttcgcaggcgaaagctaccacttcgggcagccgagccatggtgccgtcttcgttggtgagttcgcacaggacggcgcagggtggcagtcccgcgagttttgtcagatcgacacttccttcggtgtgccctccgcgttcgagtacgccgccgctgcgggccgccagagggaagacgtggccggggcgggcgagcgattcgggacgggcgtcgggtgcaacggccgttcggatcgtgcggatgcggtcggcggccgaaacgcctgtcgtgatgccttccgccgcctctatcgacacggtgaatgccgtaccgtagcggctcgtattgacggtggacatcgggggcaggtcgagttgccggacccgctcttcggtcagacagaggcatacgatgccactgcatcggcggatcatcagggccatctgttcgacggtcatatttgtcgcggcaaagatcagatcgccttcgttctctctgttttcatcgtcaaccagcaggattccgcggccttggcggaggctttctgcggctcgttcgacccgttcggcagccgtgccgtaacgggataatagattttctcgttccatgagttcgtttgtttccgacaaaaatagggggaacgagccgttgtgaaatgtattatatttgcggatagatatactatatttgcagataaactttcttttttgatgaaaattctcgaacggcgtattctccacgatcccggcacggctttcagccatatccgttacgggcagttctcgctgccgtgtcatgcccatgtcgaattcgaactcatgtacatcacttcgggccgggggttgcagttcgccggcgatggggtggaaccttatcgggccggggatttggcgctgttaggcagcgggctgcctcatttccatctgtgcgaccgggtgcgcctgggaggggacggcgaagcgagttcgggcgaggttctgcaatttccgcccgacctgttcccgcagaatatggagcgtctgggggattatgccgaaatccgcagattgctggagtgcagtcgcagggggattcgtttcggcgaccgggtgctggcggccgaggtcggccgcctgatccgctcggtcgatgcgttgtcgggtacggagcggctggtgcgtctgtatgaaattctcggacggttggcacgcagtgcggattaccggctgatttcgccggccgaatgtgtatgccgggcttcgtggtgtcccggatcgcccatgtatgccgtcgaaggttatctggcggcccatttccgcgagcgggtttcgctgtccgcgctcgcagcggcggcaggccggaatccggcggcgctgtgccgttattttcgggagaggacgggtaagacaccgttcgaatacctggcggaaatgcgcatcggactcgcggtgcggttgctgaaacattccgatctgacctgttcgcagatcgcttatgagtcggggttcaacagttatgcactgttcgtgaggcagttccgtcgcataacggggaggacgcccgatcggtaccggcgggaaatctcgctggaagtcggttactcccggactttgtaaacgacgtaaatatggtcgtcgggcagggcgtagagacagcgctcggcttcggtgagcgaggctgcgaagtcgatgtcggcgacttcgaatccggcactgcgcagccggtcggcgtagtcgcggccgtagatgcgccggtgatcgtactggccgaagacgtgggtccgttctgcagggtcggtgatcgtgtcgtcttcgaaggtctcttcgcgcgacgaatccatcggcgacaggacgatgccccagccgccgggtttcaggatacggtggagttcgcgcagcgcctgccgatcgtcttcgacatgttccaggatgtgattacagatcaccacgtccgtaaaatcgtcctcgaggggaatgtgctgcacgtcgaaatgtaggtcggccagcggactttcgaggtcggcggtgaggtacaggcccgggtgaccgtcgtaatgtttgcgcagtttgcgcatcaggcacacttcgggagcgatgtgcaggatgcgggggtacgcggtcggcaggtcggtttcgcgttgcaggtagagccatagcaggcggtgccgttcgagcgagaggcagcgggggcagagggcgttcggacgggagtggacgtagccgtagggcaggaacttgcgccgccgggtgccgcagacgggacattcgacgccccggccgatataaaaccatcccagcaccggaaccgatattccggcgatgcgttgcagaaacgtgcggggcaggtggttgagtgcccagcgaatcagccttttcatcttattcggagatttttttcagctcctcttccgtccggtgcagccgctccttgcagagggcgatcagttcggtagcccgcttgacctccttggtcagcgaatcgacggtcatctcttcgcggcggaagcggtcgaggatctgctcgatttcgttcatcgcttcggtataggtaatctctttctttgccatattgtcaggttgcttattttacggttgcatcgaatgtgccgtcggacagttccacccgcagagtgtcgccggaggaaagccctttggccgaagtgacggtttcatcgccccggtgtacgatggcgaaccccagcgagagaatatgttcgggcgaacggcttgcgatcagctcttcggcggtcgtgagccgtgtgtgttgccgccgcaggagctcgccgacagcggccgaaagctcgtcgctccagcgggagagctgttcgttgcgacgcaggagcaggagggcgctttgatgcgcgatttcgctgccgagctccgcgagccgcagttcatggcggcggaagatgcccgccgaggcgtcacgcagttgcagtgcggcggtgtcgagccatccctcgacgcccgtcatccgttcgacgagccatccggcgacggccgtcggggttttaagtgccgtgtgggccaccatgtccgcgacgctcgtatccttgtcgtggccgatgcccgtgaggatcggcaggggaaactgggcgatgtgggcgcagaggcggtaggcattgaaacagttcaggtcgctggccgacccgccgccccggatcagtacgaccgcatcgaaatcgtccatgcggtcggccacggcgtcgagtgccgccacgatcgaatcctcggcaccggcgccctgcatgaaagcgtcgaaaagcgtcagggagaaagcatagggacttttgcccaactccttgcagaaatcctgatagcccgctgcctggcggctcgaaacgatggcgatacgctgtactacctgcggcagaggattttcgcggttgatgtcccagactccttcgcgctggagccgctcgatggtgatctgccgctgtcgctccatgtcgcccagcgtgaaggtcgggtcgatgtccaggatgttgagcgagaaaccgtacagttcgtggtaggagatcatcacccgggccaggatgcggatgcctgcggccagtcgctgacccgtttcggcctcgaaatagccggcgatgcgggcgtaagccgtgcgccagatgaccgcccgggcctgcgagagcggcacgccgttgtcgccacccttttcgaccagttcgaggtagcaatgccccgaatagttgattttgatctccgcgatttcggcactgacccatacgggcagggcgaacgcttcgtcgagcgtcgctttgacgagcttttggagctgggagagtgtcaggtggttttgcatgacgacaaagatagtgaaagccgggaaaaaacgggaacttgttcccagttttccgaggcgaatcctatcttctgcaaagatagtgaaaggtgagagcaatcgtgcgggcttgcacgcaaagattgccgaaccgcctccgatcttgagcgaagataacggaagaagggcgatgcaccgaacttaattatgggttttccgtcttttcgccgggcagagtcggctggcgtcctttgcgctcgttttgatctccggtggttcgagcttgtgcggaccgtgctctcttttctgcgagggcggcgaatctcggtccggcaggtcgatcgtttggggacggtcggtttccggggatggcgccgtcggtctgccgtgcgacggtcgttgtgttcgactttgggttgggatcgtcagaatttcggaaatcgggcatgatacccactgcgaagtgcggtcggggcggggacagtaggtgccgaccgttgttagcacaggattttgtcgagcaggatgcctgcggtcagcagggcgccgaagagcaggatgttgcgggccgtttcgccgaggcagacgttcagttcttcgccgtggtcgatgcgtaccatcttgcgccatgtggcgatatggactgcaaggtagggcagaggcagcagagctgcggcgatacggccttcggccaacagcgagaggcacagcaggatggctcctgtgcccagaaccaggtaaccccagcgtcccgctgcggctccgaggcagacgacgatcgtgcgcttgttgcagcggcggtcctcctcccggtcgcggaaattgttaatcatgagcatcgtgtcgatcaccatgccgcaggccagtccgactacggcggtttctccgctccaccctccgcactggaggtagtaggtgaatccgacgggaatcaggccgaagaaaaggatgacggctatgtcgcccataccgtgataggccagcggccacgggcctgccgtgtaaaaataggcgaagacaatgcaggaggcacccaccagcaggagccaccagttccagccgctgagggccagcaatcccgctccggctgcacaggccgccagagtgaaagccgcgataccgctcttcatcgcccgcagggtgatgtagcctttggcgaaagcgcggtcgggacccagtcggtcggggcggtcggctcccttcaaaaagtcgcagagatcattgaccagattggccgtacactgcatcgtcacggcgaagacaagacacagcagagcgacgaccgggcggaagccgccgtcggtgaaggccagggccgatccgatgagaatgaggatgacggaattccccagactgtacggccggatggccagaatccatgcggagagtgagttcgttttcaagtttcggagggtttggtcggatttagcgcatgatgaattccaagggacgcggaatgcttttgccttcgggcagttgtacgcgcagaaccccttcgctttcgaccggctttccgtcgcgcatggcgggctgccagcggggtgctttttcgacggcgtcgatcacacggcgccgcagccttcggtcggtcgcttcgagctcgtcggtcgggacggttctcccgtcggtcgtgatcttgtaacgcaggactacccgtgcagccggcagagaatcatcccaatcggtctgtttggaaatatagtcgttgaaactgccgtctgcttccgggaagcgggccggggtgtcgtatcgcagggtgatgagtatcacgccgttcgaggcttttgttccgtatcgggcgatggcctgctcgtcggcaggcagcatctcggtcgattcgatgtcgccgggcggaatgttgcggatgtcgcttacgacctgcccgttgactacgtatatggggtcctgcgccgcagcggaaaagatcccggtgaagatcagtgtgaacaggagtatgagctgttttttcatacggttcgtttatccgcagaacgggtttcggccacggaatattgctttcagagagtgacctccttccagcccgagtgggtcagatcgacgcagccgttttttcggaagcggacaccttccgcttcgagcatcggacgttgctctgtccaatggggtgcggttctgcctgcgctgttcacgacccggtggcagggaagtccggcgggagccgctgccagcgcatgtcccacgtggcgggcatatcccggcatgccgatcagccgggcgatctgtccgtaggtcgttacgcgccctgcgggaatttgcgccacgaccgaatagacttccgcgtcgaatccttcgggaagggccatgtcggaggtgtgttagagttcgctctccttgaggcgctcggcgttttccgctacgatcagatggtcgatgcagtcctggatgtcgccgtccatgaaggccgacaggttgtagatcgtgtagttgatgcggtggtcggtgatgcgcccctgcgggtagttgtaggtacggatcttggccgaacggtcgcccgtcgaaaccatcgtcttgcgcttcgaggcgatttcgtcgaggtatttcgaatattcgaggttgaagacgcgggtgcgaagttcttcgaaagccttgtcgaagttcttgagctgcgatttctggtcctggcattgcacgacgataccggtcgggatgtgcgtcaggcggatcgccgagtaggtcgtattgaccgactgtccgccgggacccgaagcgcagaagatatccttgcggatgtcgttcatcgagatttctacgtcgaactcctcggcttcgggcagcacggccaccgaagcggccgaggtgtggacgcggccctgcgtttcggtctggggtacgcgctgcacgcggtgtacgcccgattcgtatttgagcgtaccatagacattgttgcccgtgactttcatcacgacctccttgtatccgccggccgtgccttccgagaaggaggtgatttcgtacttccagcctttggattcgatgtatttggtgtacatgcgcatcaggtcgccggcgaagatggcggcttcgtcgccgcccgtgccgccgcggatctcgacgatcgcgtttttggcatcctgcgggtccttgggaatcaacaggagtttgatctcctcttcgagggtttcgatcttcggttccagttccgcgatctccccgcgtgccatttcgcgcatctcctcgtccttgtcgttggccaggatgtctttggcttcggtcaggttggcgatggccgtgcggtagcgttcggaggcttcgatgatcggttccagctcccggtattccttgttgaattggatgaactgcttgacgtcggcgatcacttcgggatcggtgagtttctggccgatctcttcgtatttgagcttcagaccgtccagtctggtgagtatggaattgtctgccatataatttaatttgggtacaaagatagtgaaagccgagcgaaatcgggagaatttattcccaaagatttccgagatgcccctatcttatgcaaagatagtgcaagcggggagcaatgccaaatttatttggatttgtcccggcccgtgctctcccggcaagaccgtgccgcgcggtgaatgtcggaattccgcttcggattatcggttatccccatatatggcgacgcattttccggggagggcgccccgggaaaatccccaatacgcggggttgtccgccgtcggaaaatccgcgtcctttgcaacaggaagttcactcataaaaccaaataaaaagatgacaggaatttttttcggcagcacgaccgggactacggagtccgtagctgccaggatcgccgagcggctcggcgtagcacaggccgatgtgcataatgtggcggctgcgtccgtcgaagatgtgaagaaatacgatctgctgctgttggggtcatcgacctggggcagcggagagttgcaggacgactggccgggatttctcgacaagttggggaaggaagacctctccggccgccgcgtggcgctgttcggctgcggcgatgcgggtgtttacagcgatactttctgcgatgcgatggccgaaattcgggacggactggcttcgacgggctgcacgttcgtcgggggattcgacgccgaggagtatccggggtgcggttcgcggctgtgtcaggacggagaggcgatcggctgggccgtggacgacagcgcgtcggacgccgagaaccagatgcggatggagttgtggatcgccgccatcggctaaaacggaatgccatgagtgccggggatttcagccgatacgacaatatgaagatgctgctgcatcatatctacgaattccgcaagggcgttcgggatctggtgctctgcacgctgtgcccgacctgtgccgggctgctgatcgaacggcttcgcagtcagggtatcgactatctgttgcagccggtaacggagcagaaggtcaatctctatttcggcaagcgtagctgcctggacgctgtgcagacgttcgtcgataaaccgttgaacaaactgactcccgaggaggatttcatgctgggcatcatgttgggttatgatatttcgatgcagtgcgaacgctattgcaagcgtaaatttcatctgtccggtctgatcgcctgatcgcggagcggttaaaagattcgggggagaagttttcgcttctcccccgaatcgcatattccgcagagcggtcgtttagattacgatgttgatgattttgcccggtacgacgatgatctttttcggggccttgccttcgagccacttctgcgcttcgtccgtgcgtacgatgtccgcctggatgtcggccggggagagcgtcagggcgtattcctttttgaaacgcagctttccattgaccgaaaccgggtattcgaacgaactttccacgaggtatttctcctcgcagacggggtattgcgcgtcgcagaccgaggtcgtgtgtcccagcgtgtgccacagctcctcggcgatgtgcggtgcgaagggggcgagcagcacggtcagcggttcgaggatctcgcgcttcgagcagccgcccaactcgttcaggcagatcatgaaagcggcgaccgaggtgttgaacgaaaaattttcgatgtcctcgcgcaccttttttatcgttttatgaagcgtcttcagctctttatccgtggctttttcgtccgtaaggatcagttgtccttcgcggttgtagaagagggcccagaaacggcgcaggaatttatgcacgccgtcgatgccgttcgtgtcccacggtttcgactgttcgagcgggccgaggaacatctcgtacatgcgcagtgtgtcggcgccgtagttatcgacgatgtagtcggggttcacgacgttgaacatcgacttcgacatcttttcgatcgcccagccgcagacgtacctgccctcttcgaggatgaactccgcatccttgaattcgggacgccatgcgcggaacgcgtcgaggtcgagtatgtcgttgcgcacgatgttcacatcgacgtggatctcctgggttttgtactggtctttcagcccgagcgatacgaatttgttggtgccgaccacgcgatagacgaaattcgaacggccctggatcataccctgattgacgagtttcttgaacggctccggttcgcagacatatcccaggtcgtagaggaacatgttccagaagcgcgaatacatcaggtgtcctgtcgcgtgttcgatgccgccgacgtagagatcgacgttacgccagtattcgttggcggcgtggcccacgagcgcttggtcgttgtgcggatccatgtagcgcaggtagtaggccgacgatccggcgaatccgggcatcgtggatacttcgaggggatagccttcgggcgtcgtccactccttggcccgtgccaagggcggttcgccctgttcggtcgggccgaagttgtcgatcggcggcagttccagcggcagccgctcttccggcagcggataggccgtgccctccttgtagtagattgggaacggctcgccccagtagcgctgacgcgagaagatggcatcgcgcaggcggtagttcactaaccggcggcccaatccgcgtcgctcgatttcgcccaggatgcgaccgatcgcctcctttacatcgagtccgtcgagcagatccgagttgatcagtttgcccgatttggcgtcgtaggactctttctcgatgtcgccgccctcgacgaccgggatgatctccagcccgaaatggcgggcgaaggcgtagtcgcgcgaatcgtgggcaggaacagccatgatcgcccccgtgccgtagccagccagcacgtagtccgaaatgtagatcggaatcgccttgcccgtgaaagggttgatcgcataggagcctgtcgctacaccgcttacgcgcttggtttcggcgatgcgctcccgctcggagcgtttcttcgcctgggcgatgtactcctcgacggcggcccgttgttcggacgtggtaaggtcgtgaacccattcgtgctccggagcgatgaccatgaaggtaacgccgaagatcgtgtcgggacgcgtggtgaatatctcgagttttcggtcggagccctggatgtcgaagaagacctgggcgccttccgaacggccgatccagttgcgctggatctccttcagcgagtcgctccactcgagccgctccagtccgtcgagcatccgctgggcgtaggccgttacgcggagcagccactgtttcatccgcttctgttcgacgggaaagccgccgcgttcggagagtccgtccttcacctcgtcgttggccagtaccgtgcccagctgcggacaccaattgaccatcgtgtcggcgcggaacgccaggcggtagttctggaggatctgttcgcgttcctcttcggttttggatttccattcgtcggccgtgaaacgcatctcctgcgtgcaggcggcgtcgagtccttcggtgccctgcgcctcgaaacgggcgacgagtttttcgatcggttcggccttgtccgtactgcggtcgtagtagtgtttgaacatctccagaaaggcccactgggtccatttgtaataggagggatcgcaggtgcggacctcacggtgccagtcgaacgagaagccgatcttgtcgagctgttcccggtagcgggcgatgttccgttcggtcgttacggcggggtgctgccccgtctgaatggcgtactgttcggcaggcaggccgaaagcgtcgtagcccatcggatgaagtacgttgaagccgcaaagccgtttgtagcgcgagtagatgtccgaagcgatatagcccagcgggtgtccgacgtgcagacccgcacccgaagggtaggggaacatgtcgagcacgtagaatttgggacgtgtgggatcggcttccacgcgataggtttcctcttcctgccagcggcgctgccacttggcttctatctctttgaaattgtactccataggtttgaattgttttcgtttcaggggcaaagatagtgaaagcccggcgaaatcgggagaatttattctccaagatttccgaacagcctcctgtcttctgcaaagatagtgaaagccggaagaaaatgggtgcttgctcgcagttttccgaggcgtattcgatcttctgcaaagatagtgaaagatggggggcgagccaaacttgtccggaccgtattctgtcttctgtaaatggagaaaggaagcgacgggccggatttgactttgaacttgtttctccgttttccggatccggtatcatttgtaaatactccttatattcttcgtttatcggcctcttttcgggacccctgttcgttgtacggcggagttcgtatgtcctcggtttccgtttcgggtccggtcccgccttcctgtacggaaagatggcggaagccggagacggatcgaaattttttgattgagagaggcttgccctttgcttcggagaattggggtgaaagacccggatgagctgtccgggtgtcgtagtggagcctgtgttttggtgagacgggaggtcggctggaggccgaaagactatttcgcggagagcagataggttttattgtcagtaagttgcggatttgtatataagtattatgttatatgtttataaattctataaataaaaagaatcgataaaagggctgaaatgggctaaaatgctgaaaaatcgggctggaacggcaaaaaatattgcacttatatatggcggttcggaatttttgcgtatctttgcagtccattttggacaatggagattgaaattcaaaccatttattaaaggacaaaaacagtaagaaatgcctactattcaacagttagtgagaaacggccgagtacgtctggaggacaagagcaagtcccccgcactggccgcgtgtccgcagcgccggggcgtttgtacgcgtgtgtacaccacgaccccgaagaagccgaactcggcgatgcgtaaggtggcgcgtgtaagattgaccaatggcaaggaggtcaacgcctatatccccggagaaggccacaacttgcaggaacactccatcgtgctggttcgcggcggtcgtgtgaaggaccttccgggtgtgcgttatcatctggtgcgcggtgctctcgactccgcaggtgtggacggacgccgtcagcgtcgttccaagtacggtgcaaaacgccccaaggcaggtgcagcggctcccgctaaaggcaagaagtaatatcaggactacgacaaaacattaatttagccaataacaatgagaaaagctaagccaaagaagcgaattctacttccggatccgaagttcagcgatgtcgcagtaacgcgtttcgtgaacaaccttatgctggatggtaagaagagtattgcctataccattttttatgactctctggagttggtgggcaagaagatgaaggatgctgataaatctccgctggaagtctggaaacaggctctcgagaatatcacgccccaagtcgaagttaagtcgaagcgtatcggtggcgcgacattccaggttcctatggaggttcgaccggagcgcaagatttcgatttctatgaaaaaccttgtcctttactcccgcaagcgcgccggtaaaacgatggctgagaaactcgctgccgaaatcgtggatgcctacaaccagcagggtgccgctttcaagcgtaaggaggagatgcaccgcatggccgaggccaacaaggcatttgcacactttagattttaattaggagattcgacagatggcaagagatttaacttatactcgcaatatcggtatcatggctcacatcgatgccggtaaaacgaccacctcggaacgaattcttttctacacgggtaaaacgcacaagatcggcgaggtgcacgaaggtggcgccacgatggactggatggtgcaggagcaggagcgcggtattacgatcacttcggccgctacgaccgctttctggcagtacaagggccaccagtatcagatcaacctgatcgataccccgggacacgtcgattttacggtcgaggtggagcgttcgctccgcgtgctggacggcgctatcgccacgttctgtgccgtaggcggtgtggagccccagtcggagaccgtttggcgtcaggccgacaaatacaacgtgccgcgtatcggttacgtcaataagatggaccgtacgggtgccgacttcctggccgtttgtgcccagatcaaggagcatttcggcgctacggcgctcccgatcgttctcccgatcggagccgaagacaagttcgaaggtatcgtggaccttatttataataaggcttactactatttcgatgacaagaccgttcgtgataactatgagatccgcgagattcccgactccatgaaggccgaagccgaggagtggcgcaacaagctcatcgaagaagtcgcttcggtggacgatgcgctgatggagaaattcttcgacgatcccgcttcgattcagcccgacgagttgatcgctgcgatccgaacggctaccattcagatgaaactggttcctatgttgtgcggctcttcgttccacaacaagggtgttcagatgttgctcgactgcgtgatggcgttcctgccctctccgctggacgtacccgctattcacggtatcaaccccaagacggagcaggaggagattcgcaagccgtcggaggacgagccgttctgcggtctggccttcaagatcgctaccgatccgttcgtaggtcgtctgtgcttcgtgcgcgtttattcgggtaagctcgatgcaggttcttacgtgcttaattcccgcagcggcaagcgtgagcgtatcagccgtctgtatcagatgcacgccaacaagcagaatccgatggagcaggtcgctgccggtgacatctgcgcagccgtaggtttcaaggagattcgcacgggcgatacgctttgtgcggaagatgcacccatcgtattggagcagatgaccttccccgagccggtgatcggtttggctgtggagcccaagacgcagaaagacctcgataagctgggtattgccctgggcaagctggccgaggaggatcctacctttaccgtacataccgacgaggacagcggccagaccgtgatcagcggtatgggtgagttgcacctcgacatcatcgtggaccgtctgcgccgtgagttcggcgtggagatcaaccagggtgctccgcaggtgaactacaaggaggcgctgaccaagaccgttcagcaccgcgaggtgttcaagaagcagacgggcggtcgcggtaagttcgccgacatcattttcgaaatcggtcctgccgacgaaggcacgatgggtcttaccttcgtggatgaagtcaagggcggtaacattccgaaagagttcattcccgccgtgcagaaaggttttgccgcagcgatggcgaacggtgcactggccggctacacgatggactcgatgaaggttaccctgaaggacggttcgttccacccggtcgattccgaccagttgtctttcgaaatctgcgcccgtaacggttaccgcaacgccgctcccaaggccggttcggtcatcaaggagccgatcatgtccgtcgaggtggtgacgcccgaggagaacatgggcgacatcatcggcgacctgaacaagcgccgcggtcaggtgacgggtatggagtcgaagggtaatgcccgcgtagtgaaggccaaagtgcccctgtcggagatgttcggttatgtgaccgtgctccgtacgatctcgtcgggtcgtgccacctcttcgatggagttctcgcacttcgaggaagttccggcgaacattgccaaggaggtgatcgagaaggcaagtggtaaacgtaaggaattagaataagaaaaacatatgaaccagaaaattagaatcaaactgaagtctttcgaccacaacctcgtcgataagtcggccgagaagatcgtgaagaccgtgaagagcacgggagccgtagtcagcggtccggtgccccttccgacgcacaagcagattttcaccgtgaaccgctcgaccttcgtcaataaaaaggcgcgcgagcagttccagctctgcacgttcaagcggatcctcgatatctattcatcgactcccaagaccatcgacgctctgatgaaactggagcttccttcgggtgtcgaagtggagatcaaggtctgatagactgatcgaaacctgtttcggatcgtgccgccgcccggtgtcgagccggtgcggcagccctttccggcacgttttgccgctacgggatcgcaaatgttcccgacagttctaagaagatcactttatactttatattaacaaacgtaatttgacaaaaatgtcaggacttattggaaagaaaatcggaatgacttccgtttacagtgccgagggtaagaacataccatgcactgtcattgaggctggtccgtgcgtagttacgcaaatcagaaccgtggagaaggactcctacgaagcggttcagattgcctatgacgacaaaagtgaaaagcacaccaccggcagtttgttaggacacttcaagaaagccggcactacccctaaacgcaagatggctgagtttaaggatatgcctgaagtgaacctgggcgatacgctgaccgtcgatatgttctcggaagaggactgggtcgatgtgacggggatctccaagggtaaaggcttccagggcgttgtgaagcgccacggtttcggcggcgtgggcggtcagactcacggtcagcacaaccgtcagcgcaagccgggttcgctcggtgcatcgtcctatccttcgcgcgtattcccgggcaaacgtctgccgggccgtatgggcggtgagcaggtgaaagttttgaacctgaaagttttgaaaattattcccgagaacaacttgattctggtgaaaggttcgattccgggggcaaagggtgcttatttaacaattgagaaatagtatggaattagctgtattaaacacacaaggaaaagagacaggccgtaaagtggtcctttcggacgctgttttcggcgtggaggctaatgaccacgctatctacctggacgtgaagcagtatcttgccgatcagcgccagggtacccataaatccaagcagcgcaacgaggtggccggttcgacccgcaagctcaagcgtcagaaaggtacgggcggtgctcgttgcggcagcatcaaatcgcctctgttcgtaggcggcggccgcgtgttcggtcccgttccccgcgactacagcttcaagctcaacaagaagctcaagcagctggctcgccgcagcgctcttacttacaaggcacaggcaggtgcgatctgcgtggtggagcctatttcgatggacgctcccaagactaagtcgatcgtagcgatggccgaggctctgaaggttgccgacaagaaagtcctgctggttttgccggattcgaacgtcaatcttcagctctcgtgccgcaacctcccctacgtgaaagccattctggcttcgaacgtcaatacgtacgaagtgatgaacgcttcggcgctggtgatggtagagggtgccgagaatattttgaatacaatgttagcctaaacacgcgcaagaaaaatggaaattatcattaagccaatactgaccgagaaaatgacgattcagggcgagaagctgaaccgttacggttttatcgttgacgttagagctaataagctgcagatccgtaacgccgtagagcagctttacaacgtggttgtaacggatgtgaatacggtgaactacatgggcaaactcaagagccgctacaccaaggcgggtcttctggaaggccgtgctaataacttcaagaaggcgatcgtcaccttgaaggatggagacaagatcgatttttacagtaatatctaaaagagatggcagtaagaaagtttaaaccggtaacacccggtacaagacataagattatcggcacgttcgacgagatcacgacgaacgtaccggagaaatcgctcgtcagcgtcaagaaaagttcaggcggacgtaacaatacgggtaagatgacggttcgctacatcggcggcggtcacaaacgtatgtatcgtcatgtggacttcaagcgtgtgaaggatggcgttgctgcaactgtgaaaacgatcgagtacgatccgaatcgtacggcacgcatcgcattggttgtgtatgccgacggcgagaagagctatatcctggctccgaacggccttcaggtcggccagaccgtcatgagcggcgcaggtgtcgctcccgaagtcggaaatacgctcttcctgagcgagattccgctgggtacggtcatccacaacatcgaactctaccccggtcagggcgccgcgatggctcgttcggccggttcctatgctcagcttttggcacgtgaaggcaagttcgccgttatcaaattgccttcaggtgagactcgtatggtactcgtaacttgccgtgcaactgtcggcgttgtgtccaacgtggaccacagcctcgagagttcgggtaaggcaggtcgtgagcgttggctcggccgtcgtcccagaaaccgtggtgtcgtgatgaacccggtggatcacccgatgggtggtggcgaaggtcgtgcgtcgggtggtcacccgcgttcgcgcaagggtctgttggctaagggttacaagactcgtaatccgaagaagacgacctcgaagtttattatttcaagaaagaaaaaataattaaaagagtaacataatgagccgttcactgaaaaaaggaccattcattgacccgaaactcgaggcgaaagtagtcgctcaagccgagggcaataagaaggcggtcatcaagacctggtcgcgagcaagtatgatttcgcctgacttcgttggtcagacgatcgctgtccacaacggaaataagtttattcccgtttacgtaactgaaaacatggtcggacacaaactcggcgagttcgctccgacgcgtaacttccgtggtcatgcgggtaacaagaaaaaataggtagaaaatgggtgcaagaaaagcaataagagccgaaaaaatgaaggctgaaaagaagcagaaggctatcgccgttctgcgggattgcccgacgtctccgcgtaagatgcgtttggtggccgacatcatccgcggtgtggagatcaacaaggcactgggtatcctccgctactcgaagaaagaggcgtcgatccgtctggagaagctcctcaagtcggccatcgccaactgggaggccaagaacgagggagaacgtctggaagataccaaactttgtgtaaaggagatatttgttgacggcggtcgcatgctgaagcgtattcagcccgcgcctcaaggtcgtgcacaccgtatccgcaagcgttcgaaccacgtaacgatcgtagttgacaaaatggtaaccgtagaaaacaagtaatcaaatgggacagaaagttaatccgatagcaaatcgtcttggcatcatccgcggttgggactccaactggttcggaggtaaggatttctcagagaaattggtcgaagacgccaagatccgcaagtatctgaatgtccgtttggcgaaggcgagcatctcgaagatcatcatcgagcgcacgctgaagcttgttacggtcacgatcgcgacggcccgccccggtatcatcatcggcaagggcggccaggaggtcgataaactcaaggaggagttgaagaaactcaccggtaaggaggtccagatcaatatcttcgaagtgaagcgtccggaggttgacgccgtgatcgtgggacagaacatcgcccgccagttggagggccgcgtatcgttccgccgcgccgtgaaaaccgctatcgcatcgacgatgcgtatgggcgccgaaggtatcaaggtccaggtttccggacgtgtaggcggtgccgagatggcccgcagcgaaacgatgaaagagggacgtattccgctgcatacattccgtgccgacatcgattactgcctgaccgaggcgcttacgaaggtaggtatcctgggtgtcaaggtatggatctgccagggtacggtttacggcaagcgcgatctgttcgagatcgccggcgcttcggcttcggcacagggcgcgggccagccttcgggcgatcgtcgcggtcctcgcggcgaccgtggcgaccgtcgtggtcccagaggcgatcgcggagagcgtcgtggcggtgctccgaaacgtaataataaacagtaagtaggaccttttaaagcaagaacaccatgttacagccaaaaaagaccaaatttagaagaatgcagaaaggtcgtatgaagggtatcgctcaaagaggtaaccaacttgcatacggatcgttcgcaatcaaagcacttgattccgcttggattaccggtcgtcagatcgaggctgcgcgtcaggctatcacccgttatatgaaacgtgagggtcagctctggatccgcatcttccccgacaaaccgatcaccaagaaaccggccgaggtgcgtatgggtaagggtaagggtaatccggaagggttcgttgcgcctgttacgcccggtcgtattctcttcgaggcagaaggcgtgcccctggcagtggctcaggaagcgcttcgtctgggagcccagaagctgcctatcactaccaagttcattgtaagacgagatttcgttgaaacatcaatctaagctatcaagatgaaaagtgcagaaataaaggacctgtcggtcaaggagcttcaggagcgcatcgacgtggagaaggcgcagctttcgaaactcaagttgcagcacggagtttcgccgatcgagaacccgtctataatcaaaaaatcccgcagagacatcgcgcgcatgctgacaattctgcgtcagaaaaaccctaaatgttaattaccgttatggaaagaaatcttagaaaagagcgtattggggtggttgtcagcaacaaaatggagaaaaccatcgtggttgcagtggcccgtaaggtaaagcatccgatctacggcaagttcgtgaacaagacgacgaagttcgttgccgagtgcctggacgaaacctgcaaggaaggcgataccgtacgtatcatggagacccgcccgttgagcaagacgaagcgttggagattagtacaaatcattgaaagagcgaagtagttatgatacaacaagaaagtagactcacagtagctgataacagcggtgcaaaggaagtgctttgtatccgtgtgcttggcggcacgaagcgtcgctacgcgtcgatcggcgataaaatcgtagtggctgtcaagagcgcttctccttcgggcgatgtcaagaagggtgctgtatcgaaggcagtcgtagttagaacgaccaaggagatcagacgtgccaacggatcgtacatccgtttcgacgataacgccgtggtgcttctgaacaaccagggtgaaatgcgcggtactcgtattttcggtcccgtcgctcgtgagcttcgcgatcagtatatgaagatcatctccctcgctcccgaagtattgtaatcttaaaaacacacattcagatatgtcagttaaattacatattaagaaaggggatatggtttacgtcaacgcgggcgacagcaaaggccagcagggcaaagtcctgaaggtcgatgcccagaagcagcgtgccattgtcgagggcgtgaacatcagcaagaaggctaccaagcccaatgcgaagaatcctcagggtggtatcatcgaacaggagtcggcgatccacatttcgaatctgcaggttctggatccgaagagcggcaaacccactcgtatcggtcgcaagcagaatgcggcaggtaaattagtccgtttcgctaaaaagtcaggggaggagatcaaataatggcagcatacgtacctacactcaagacacagtataaggagcagatcgtacctgcccttatgaaggagttcggctacacgagcatcatgcagtgtccgaaactcgagaagatcgttattaaccagggtatgggccaggccgtcgccgataagaaacttatcgacgtggctcagcaggagctttcgctcatcgcaggtcagaaggccgtgcagaccaagtcgagaaaggatatctcgaacttcaaattgcgtaagggcatgcccatcggcgttcgtgtgacgctgcgtgcaagcaagatgtacgagttcctggagcgcctgattgccgtggctctgccgcgtatccgcgacttcaagggtatcaacgagaagttcgacggtcagggcaactacaccctcggcatcaccgagcagatcatcttcccggagatcgatatcgacaagatcaccaagatcttcggtatggagattacgttcgttacgacggctgcgactgacgaggaggcttatgccctgttgcgtgagttcggtcttcctttcaaaaatgctaaaaagaacaaccaataagctatggcaaaagagtcaatgaaggcacgcgaagtgaagcgtgcgaaactcgcaaagcgctatcagcacaaacgcgatgagatcgctgccaaggtgaagagcggtgaaatggatcacgaggaggcatggatcgccctgtcgaagctgccccgcaactcgaatccgatccgccagcacaaccgttgcaaactgacgggtcgtccgaagggatatattcgtcagttcggcatcagccgtatccagttccgcgagatggcgtcgaacggtctgatcccgggcgttaagaaggcgagctggtagtgttcttgcctgtctcgaccgccgctgcggagggattccctgtccgcagcgaccggggatggaagccgtgaggttttccggacaggtagcaagaaagcgtattccgccggcggaagatgctccgaaaggtgcgtcggaagcaggcacactgagagattcatctactgagggtgttatgcccgttgtagtcaggggccggtacgccagatgtgcgtgcgcagggtcccgtttgaggaccgattttcggtctgggaactacgaaagaggtgaatcctatacgggtgcggaacccaagtagaattgtcgcaaagtcgaggaaagtgccaccgtgcaggtggtaacttctcggcggagggactttcgaacggttcggtacttggatgcaaattttcaaccgttgagtcctgtgacgaagacgagggggagcgattggctgtaaagcggtttttcggtccgtttcgacgacgtgcggagaggacttttccgggggattttgagcagaatacatgttggctccagtggatgctgacatgctctgttttccggaagaggtcttaattcgctaaaaattagggcttaattgtgaattattgagaaattattcctatatttgcacgctttgtacccgcgtatgtccgtgaaaaagtgccttttgcaggcgtcggaaatcagggcataaggggatgcaaagagggttgaacgtattttggaaataattcaaacggctgaaaaccaaagagtaacatatttttattaatttttaacttttaattcattatgacagatcctattgcggactttctgacccgaattagaaacgcagtgaaagccaaccacaaagtggttgaagctcctggctcaaaaattaagcaggaaatcactaaaattctctacgagcagggttacatcctggcttacaagttcgacaccaacgaacagggccacccgaccatcaagatcgcgctcaagtgggatgcggcgaccaaatccaacgccatcaagaatctgcaccgcgtgagccgccccggtctgcgccagtacgcttccgtggagaagatgccccgtgtgatgaacggtttgggaatcgccatcctttcgacttcgaaaggtattatgaccgatgccaaggctcgtaaagagaacgtcggcggcgaagtactgtgctatatttactaacatcaaataacaacaacacaaatgtcaagaattggtagattacctgtaaacttgcctgccggagttaccgttacggtatcgccggataacgtggtaagcgtgaaaggaccacttgggacactgagtcagaaggttgattcagacattaaagtagaggtgggtacgcacaccgacgttcatacgcagaaagagattcctgccgtgctggtgtcgcgtccgaccaaccaaccccgtcaccgttcgctgcacggtctgtaccgcgccctgatcaataatatggtgatcggcgtttcgaaaggttatgaaatcaagcaggagctcgtcggcgtcggcttcaaggctgaagtcaagggcaatatcctggaaatgagcctcggctattcgcacgatacatacctgatgcttcctcccgaagtgaccgctacggccgttacggagaaaaagggcaacccgatcgtaacgctgaagagcatcgacaagcagctcgtaggccaggtcgctgcgaagctccgctcgctgcgcaagccggagccgtacaagggcaagggtatcaagttcgtaggtgaacaactccgtcgtaaggcaggtaagtctgcaggtgctaaataataaacattgagtaaattatggcattgactaaaatagaaagaagagagaggatcaagatgcgtatccgcaaaatcgtgagcggtacggccgagcatccccgtatgactgtattccgtagcaacaagcagatctacgtgcagtttattgacgacctggccggcgtgaccctggcgaccgcttcttcgctggacaaggaagtagctgccgaggctgcgggcaagaacaaaatcgacgtggcagccctggtcggaaaactggccgcgaaacgcgctatcgagaagggtatttcgaccgtttcgttcgatcgcaacggttacctgtatcacggacgagtaaaaatgttagcagacgccgctcgtgaaggcggtcttaaattctaaagcgatatggcaaataccaatatgaagaaagtacgcacaagcgacctcgagctcaaagaccggctcgtaagcattcagcgtgttaccaaggtaacgaagggcggtcgcacgttcagcttctcggccatcgtggtcgtcggcaacgagaatggtgtggtaggctacggtctgggtaaggcttcggaggttacttcggctattgccaaaggcgtggaggatgccaagaaaaacctggtgaagattcccgtaatcaacggtacgattccccacaagcaggagatgcgcttcggcggttcgctggtgatggttcgtccggcggctcccggtaccggtattatcgccggcggtgccatgcgtgccgtgctggagtcggtaggcgtgaagaacgtgcttgccaagagcaagggttcgtcgaacccccacaacctggtgaaggctaccatcgccgctctctgcgagctgcgcgacgctcacagcgtggcacagttgcgcggtatctcgatgaatcaggtgtttaacggttaattggaaagaagactatggcaagattgaaaattactcaagttaagagccgcatcggcgccactgcacagcagcgcaaaaatctcgatgcactcggtcttcgcaagatccgtcagagcgtcgagcatgaagattcggtcatcatcaagggcatgctggagcgtgtgaagcacctcgtaacgatcgaggaggttaaataattgaaaatgtttaagaactgataaacgatggaactcaataatctcaaacccgcaaagggatcaacgcatcacgataaacgaatcggccgcggtgcaggttcgggacacggtggtacggcaacgcgcggtcacaagggtgcccagtcgcgttcgggttattcgcgtaagttaggtttcgaaggcggtcagatgccgttgcagcgtcgcctgccgaagttcggcttcaccaatctgaagagagtggaattcaagccgatcaacctttcgacgctcgaagaactcgcagccaagaaaaacctgacggaggtgacgatcgacacgctggtagctgccggcttcatctcttcgaacgacaaagtgaagatcctgggtaacggtgcgattacgaaagccctcacggtgaaggctcacgctttctcgaagagtgccgaagctgcgattacggcagccggaggcaacgtggaaaaattgtaataacccgcaaaacccaatattatgaatggttatggttatctgattgttggtatcgtcgtagttgcgatcatcgcgctgctggcgaccaacaagaaattcgtagaaaccctcaagaacatatacaagatcgaggagctccgcaagcgtattctctatacgctgggtcttctgcttgtgtatcgcttgggctgttttgtggtcattccgggcatcaaccccaacgccttgggcgaggggtcggcgcttgccagtcagttggagggcaacggtcttctgggcctgttgaacgtattctccggcggtgcattcggcaatgcggcgatttttgcactcggagtgatgccgtacatcaccgcttcgatcatcattcagttgatgggcatcatgattccttacttccagaagatgcagaaagagggtgagagcggccgccgcaaaatgaatcagtggacgcgcatgctgacgatcatcgtcctgttgatccaaggtcctgcgtatattacgaacctgtaccatcaagtacccgaggcattcgtttacggaaacacgttccttttccttgcgtatgcgacggtcatcctgatcgccggcaccatgttcatcatgtggctgggcgagaagatcaccgacaagggtatcggtaacggtatttcgctgattatcatgatcggtatcgtggcccgtctgccgcacgcgttgctcgccgagatcaacgcccgcttccagacctccgacggtagcgccatcatgctgatcctcgaactggtgttgctgttcctggtcttcatggctacggttgccctggtacaggccgttcgtaagatccccgttcagtatgcgaagcgtattgtcggaaacaaacagtacggaggtgtacgccagtacatccccctgaagatgaatgctgcgaacgtgatgcctatcatcttcgcacaggcgctgatgtttattccgatgttgttcgccaatgttgcgcccggttttgctgcggcattctccgacatgcgcggcttctggtacaaccttacgctcggcatcctggtagtcgcctttacttatttctacacggcgattattatcaatcctcaaatgatggctgacgatatgaagcgcaacggcggcttcatcccgggtgtaaagccgggcaaggcgacggtgaactatatcgataccatcatgacgagaatcactcttcccggttccatcttcctggctctggtggcgattctgccggcgctggccatgaagttcctgaacattcagcaggcgttcgcctatttctacggaggtacttcgctgctgattatggtcggtgtgatcctcgacactctgaagcagatagagagctacctgctgatgcgtcactatgacggtctgatgaagacaggacgcattcagggccgctactaattgttgttcaagagagttctgaaagaatgatatacttaaaaactgaagaagagatagagctgctccgtgagaacaatcttctcgtgagccggacgctggccgaggtgggtcgccacatcgcaccgggcgttacgaccaaggagttggatactctcgccgaggatttcatccgttcgcacggagcagttcctgcttttctcggataccagggattccccgcttcgctgtgtatttcgatcaacgaagaggtggtgcacggtattccgtcatccaagagagttctccgtgagggagacatcgtatcggtggattgcggtacgtttatgaaggggtttgttggtgattcggcttatacgttcgccgtgggagaagttgccgaggaagtacggcaactgatggaagtcaccaaagaggctcttcgcaaaggtacggcacaggccaaggctggaaatcgcgtaggcgacatttccgcggctgtgcaggagtatgccgaaagtttcggctacggcgttgtccgggagttggagggacacggtctggggcgtaagatgcacgaggccccgggtgttccgaactacggcgcacgcggcagaggaccgcttctcaaacagggaatggtcatctgtattgaacccatgatcaacatgggcaccaaggcggtggttttcgaacgggacggttggacggttacgacccgcgaccgcaagccggcggctcacttcgagtacgcggtggcggtgggcaaggacggaccggacgttctgacggatttcagtattatcgaacaggcaataaataagtaagactctatggcaaaacaaactgcgatcgaacgggacggtacgatcatcgaggcgttgtccaacgcgatgttccgcgtggagttggataacggccacgtgatcacggcccatatctccggcaagatgcgaatgcactacatcaagattcttcccggggataaagtgaaagtggagatgacgccttacgatttgagtaaggggcgtatctcgtttaggtacaaataaccattagattgcttgaaaaccatgaaagtaaaagcatcaatcaaaaagagaagcgaggattgcaagatcgtgaagcgtaaaggcaaactttatgtgatctgcaagaagaatcccaagtttaaaatgcgccaagggtaatgtttaaacgattaattaaagaaagagaaattttatggcacgtatagtaggtgtagatttaccaaaaaacaaacgcggcgagatcggcctgacgtatatctacggcatcggtcgctcgaccgcccgcaaaattctcgacgaggccggtatcagctacgacctcaaggttcaggattggtcggatgaacaggtcggcgcaattcgttcgaagatcgcggatatgggtatcaaggtcgagggcgaatgccgttcggtcgtacagctcaatatcaaacgtctgatggatatcggctgctaccggggtatccgccaccgtctgggtcttccggttcgcggtcagagcaccaagaacaatgcccgcacgcgtaagggcaagaagaagaccgtcgcaaacaagaaaaaggcaacgaagtaataattagagagttatggcaaagaaaactggaacagtcaagaagaaggttgttaaggtcggtgccgtgggtatggcctacgtacactctactttcaacaacgtgatcatcaccatcaccaacgaggtcggcgacgtaatcagctggtcttcggcaggtaagatgggtttccgcggttcgaagaaaaatactccctatgcagcgcagacggcttctgccgattgtgcgaaggttgcttacgacatgggtttgcgtaaggtgaaagtttacgtgaaaggtccgggtgcaggccgtgagtctgccgtgcgtaccatccacggagccggtctggaggtaatggagatcatcgacgttactccgatgccgcacaacggttgccgtgctcctaaccgccgtcgtgtataattcggccggcaggtgttacgtaaaaactattttatctgattttaaaaagttaatacaatgggaagatatataggacctaaatccaagatcgccagaaagttcggcgaagctattttcggtgcggacagagttctcgagaagcggaatttccctcccggacagcacggtcttgcacgcaagcgcaaaaaagtatcggagtacggccagcagctcagcgagaagcagaaggcgaaggctacgtacggtcttctggagaaacagttctcccgtacgtacgagcaggctgcccgtatgggcggtatcacgggtgagaacctgctgaagctgctcgaatgccgtctggacaatgtggtatatcgtctgggcatcgctccgacgcgcgccgctgcccgccagttggtgtcgcactgccacatctgcgtaaacggcaacgtggtgaatattccgtcctactcgctcaaagtgggcgacatcgtgtcggtacgtgaaaagtcgaaaagtttggaagtcattgtcggatctctggccggcggttcgaagagccgctacgcttggctcgagtgggacggtgcggctatggccggcaagttcctgcagcgtcccgagcgcgaggagattcccgaaaacatcaaggagcagcttatcgtcgagttgtattccaagtagtaattaaacaaccaattcaatattatggcaatattagcatttcagaaacctgaaaaggttatcatgctcgaatccacttcgtcgttcggaaagttcgaattccgaccgctggagcctgggtttggtatgaccgtcggtaacgctttgcgccgtatcctgctctcctcgctggaggggtatgcgattacgaccgtcaaggttgccggcgtggaccatgagtttgccgctatccctggagtgatggaaggtatgatcgacatcatcctgaatctcaagcaagttcgttttatccgcacggttgacaaccaggatgccgagaaggtatcggtcaatgtggcgggtgtaacggagctgacggcaggatatatttcgaactacctctcgttcttcaaggtattgaatcccgaattggttatctgtcatctggcacccggtactaaaatgcaactcacgctcaccatcggcaaaggacgcggttacgtgcctgccgaggagaatactcccgccgattgtgagttcggtacgcttccgatcgactcgattttcacgcccatcaagaacgtgaaatattcgatcgagaactaccgtgtcgaacagaaaaccgactacgagaagttgaatttggagattactaccgacggatcaattcacccgacggatgctttgaaggaagcagccaagattctcatccaacatttcatgctcttctccgacgagaagatcaccgtgaatatggaggatacgaacggtgcggaggagttcgacgaggatatcctgcacatgcgccaactcctcaagacgaaactttcggatcaggatctgagcgttcgtgctttgaactgtctgaaagccgccgatgtggatacggtgggtgacctggtgaaactcaatcgcaacgatctgctcaaattccgcaacttcggtaagaagtcgctgacggagctcgacgagctgctcgcgtcgctcaatctgaagttcggcatggatgtatctatctacaaacttgataaagactaacttaaatgagacacaataagaatttcaatcacctgggcagacaggccggccatcgcaaggctatgttgtcgaatatggcgtcgtcgctgattctgcacaagcgtatcgagaccaccgttgccaaggcgaaggctgtgaagcagttcgtggagccgctggtgaccaagtcgaaagaggacacgacccattcgcgtcgtatcgtattctcgtatctgaagcagaaggaggccgtgacggagttgttccgcacgatcgctccgaaaatcgccgatcgtccgggcggttacacccgcatcctgaagaccggattccggttgggcgatgccgccgatatgtgcatcatcgaatttgtcgatttcaacgaggcttacacgttgggtattcttccgacggctgccgaggcgaaacccaagacccgtcgctcgcgcggtaagaaggctgccgatgctgctgccgaagcagctccggccactgaaggcggcgaggagaagaaagctgcgaaaccggctgccaagaaagctgcggctgcgaagccggctgcttccaaggctgcggccggtgcgaagaaagtcgctgctccgaaggttgccaagaagaccaacgtgggcaagaagatgtaattccgaataacgttggaagaaaaaggacggtgtttcgacatcgtcctttttctatggtgccgtcggacctgaattcattttttcgtttcggatcattcggaaaaatcgaagcggcatagatctcttttcaggccgatttcgacgcgcctttccatatctttttttcgttgtgatggctccttgttcccggtttcgtttcacgcccggttcgtatctgtttttcggatgcatggcgcttttggccgctgaaactgattccgttgcttggtattcccaggactgtcgttattttggttcgtaacggtttcacaactttaacccgatcgaaatcgctatagttttttcatttattcggttgtcattctggtttgcacggaattttgtgcaagggaatttaataatctataccgtgtcggtgccaatgcgattcttgtacggaccgttcggcgggcggagggtaaatctggggtaaaggtgataccggttctgtcggcgttcactgcatcggtaatggtaggactcgactccaggttactccttcattacgtggtgttgcgagggtttcgttttaggagttactgtcgatgagacgtatcgtattgcttgttacagccggttggacagacgattttctataaaagagggatagcggaccgcatcgggaggaggtgaagacttgcgggcgcggaagctctttgttcagttttttgtggatgaatggacagatcgaggatgaaaaagctgcggatgaaatatttcatccgcagctttcgttaaaatttagtaacaaaaagttacgctgttagataattttgtccagctcgttgagcgtactgcggatttcgttgtccgaaatttcataatcccgaagttttccggcgaaatactgctcgtatgcgtataggtcgatctgtccgtgccccgagaggttgaagaggatcgttttggaaacgccttcctccttcgcccgtttcgcttcgcggatcgcctgtgcgatggcgtgagccgattccggagccgggatgataccttccgtacgggcgaagagaacgcctgcggccagagtttccgtctgcggcacggactgggcttcgatgaccttgtctttcagcagttggctcacgatcgaaccggctccgtgatagcgcagacctccggcgtgaatgtccgacgggtggaagttgtgtcccagcgtatacatcgggagcagcggagtgaagcctgccacgtcgccgaagtcgtactggaactcaccgcgcgtcagcttgggacacgattggggttcgacggcgattacgcgggtatttttacctttggtcaggttatcgcgcaggaacgagaagctgatgccggcgaagttgctgcctcctccgaagcaaccgatcaccacgtccgggtactccccgaacagctccatctgtttcacggcctcctcgccgatgatcgtctggtgcaacagtacgtggttcaaaacagaacccaaacagtaacgggtatcctgaggattttgcagcgccatttctacggcttcggagatcgccatgcccagactgcccgaatcgttggggttctttgcaagggcggcccgtccggcggctgtaatttcgctcggcgaggcatacacgtctgcgccccaggtgttcatcatcagcttgcggtagggtttctggttgaagctcaccttgaccatgaagactttcaggtcgatgccgaagtgctgcgtagccattgacatcgcggctccccactgtcctgctccggtttcggtggtcagatggcggattccctgcttgtagttgtagtaagcctgcggaatcgcggtgttggtcttgtgcgagccgacgggcgatacgctctcgttcttaaagtagatcttggccggggtgtcgagagccttttccaggccgtaggcacgtaccagcggggtagagcggtagatcttgtatagatcctgcacctcttccggaatgtcgatgtagcgttcggtggacatctcctgtttcatcagctcctcggcgaagagggcgctcatctgttcgagcgtcaccggctctttggtcgccgggttcagcggcggcagcggtcggttcttcatgtcgctgacgatgttataccattgggtcggcatctgggattcgggtaggataatttttttcgttttcataatcgtttgtttttattatgattgtaattttcagtgttgcgtggaagttacgaaaaaagcgttgtctgctcggcaaacaacgcttttgatatttttgactgtatggatcggattttctcggcttatttcatacaaataccaatggactcattgtttaccttaaacaaagagtgccaccaccagttctgcgtcgaaaatcttgtcatttctactgttctttggatgcaaatgtacgcgtttttttcacaatgcaacttttttttgattttttttcagcgagagatttcggataaaataaaaacagaccggatattatccggtctgtcaatactttaagacacaaaattatttttgcggaaaacctttgccgatagccaggaaatcggcggccttcagcgccgctcctccgatcaggccgccgtccacgtcctctttggcgaagagttccggggcgttcgacggtttgcaggaacctccgtagaggataggagtttcatcggccgccgcaccgaatttctcgcgcaggatcgtgcggatgtaggcgtggatttcctgtgcctgctctgccgtcgcggtcttgcccgtgccgatggcccagacgggctcgtaggcgattacggttcgggcgaactgggccggcgtgaggttgtagataacctcttcgatctgtgtctttactacgtcgaagtggcggtccgcttcgcgttcctcgaggttctcgcccacgcagtagatcggttgcagaccgttggcgaatgcctgcgccatctttttgttgagcgtcgccgaggtttcgccgtagtactggcggcgttccgagtgacccaggatgacgtaacggcagcccaaggctgcgagcatcgcggcagatacttcgcccgtataggcgcctttgtcttcggccgcgcagttctgggcgccgacttcgatgtccgaaccccgaagtgcctcgatgactccgccgaggtgggtgaagggcggacatacgatgaaattcacgcaggaacaaacctggtttctgtcggcccggatgttttcggccaattcgacgccttcggcgggaagtgtattcatcttccagttgccggcaacgattttctttctcatatttttgtttttaagatagattagacgatagatgcaggcgagaaccgctccggtcgcagcagcggccagaaatcgctggtccacgggaacgacgtcgtcggagaggctggccagcgtcgggatggcgaccagcacgggaagtgcatagttccaaaagaggaaccaggggcgctgccgttgccgcaaccgatgccacacctgctgcccgaggcggagccagatcgtacccagcgccaacgtgcaaagtgtgcggaatacccagccaggtacgatgtcgccgagccggagtcccgcagcgagtacgcttgcggcgcagatgcctgcgagccagatgtttcttcccgatgtcattaccttccggagtttactcctgttcgcaccattttttaacctcttccatcgaaggagccttcagccccagtttgttctttttgttaaaaccgcacaggtcgttgaagaacttgcccggagagagctttttgagcgaatcggctgtcaggtagcccattttctgtatgacgggaacccactcttcgggaataccgagggcggtgtatttctcggcaggatcgtttacggccttcttttcggggcgcatttgcgggaagaagagcacgtcctggatcgaactgttgcccgtcatgaacatcgtcaggcggtcgataccgatacccatacccgaacaggtcggcataccgtattcgagggcgcggacgaagtccatatcgatgaacatagcctcgtcgtcgcccttctccgagaggcgcaactgctcctggaagcgctccaactggtcgatcgggtcgttcagctcggagtaggcgttgcagagctccttgccgttgacgaagagctcgaaacgctccgtgaggtcgggattcgaccgatggcgcttgcacaggggggacatctcgcatgggtagtccatgatgaaggtgggctgtatcaactcctcctcgcagtattggccgaagatggcatcgatcagcttgcccttgcccatggtgtcgtcgatctcgacttcgaggcgtttgcaggcttcgcggagctgctcttcgctctgccccgtgatgtcgtagccggtcttttcgcggatggcgtctgtcatcgtcaggcggcggaacggggctttgaacgaaatctcccggccgtcgatctgcacggtcgtggtcccgtgcagggccagggcgaccttttcgagcatccgttcggtgaactccatcatccagaggtagtccttgtaggctacgtaaatctccataacggtaaattcggggttgtgcgtgcggtccatgccttcgttgcggaagttcttgccgaattcatacacgccgtcgaagcctcctacgatcagcttcttgaggtacagctcgctggcgatgcgcaggtattggtcgatgtcgagcgcgttgtggtgggtaatgaacggacgtgccgccgcaccgcccggaataggctgcagaatcggggtttcgacttcgacgtacccgaactggttgaaatattcgcgcatcgtggagatgatcttcgaacgcttgatgaaaacctcgcgtacgtggggattcacgatcagatcgacgtagcgctggcggtaacggatttcggggtcggtgaaggcgtcgaaggtctgtccgtccttctctttcacgacgggcaggggccgcagcgatttggagagcagggtcagcttctggcagtgtaccgacagttcgccggtgttggtgcggaatgcgaaaccctcgactccgacgatgtcgccgatgtcgagcagcttcttgaacaccgtgttgtaaagcgtcggatctccttcgggacagatgtcgtcgcgccggatatagacctggatgcggcccgtgtggtcctgcagttcgaagaaggaggcgctgcccatgatgcggcgcgacatgatgcgtccggcgatgcggatgccctggaaattattcttcgccggatcgaaattctcggcgatttcgcgtgccgtggccgtcacctcgtagcgggcggcgggataggggtcgatgccgagttcccgcagtgcggcgagcgattggcgtcgtaactgttcctgttcactgagttcgatgctcatattgaatgtttttgggtgttgatttcgagtttgcaaagataagaaaaggagggcgataagccaaacttgacttcgaacttctgtcttcgtccgctacgttcggcaaagaccgtttgcaggctgtgcttccggtcgtcgaaaattttcgacttcctgtctgcgtgcggggcgaagtccgcgagtgtaccgcgcgtccgctgcggtcgtcggtcggctgaaattgtccgggccgcctcctatcttctacaaagatagtgaaagccccgggcagtgccaaatttatttgcggtggatcgaagattattttgtccggggcggatttcccggcgaaactgcggaaaggatggggcgtttcggcaagttatctgcaggggcttgcaggacgggctgataccgggaaaaaacgatgcgggatactcttttttcgggcaataatgtactttttgcgaggaattatgtatggaatgcgagaaacgataagctaaaaaggcgttatttttatcctatcaattcattcaaccaaattattttgcctatgacctccaattttactgcttttttgcggccttttcgggctgcctgtctgtttgttctgctgactgtgtgctgcggcgggtgcagcgacagcggttcggtggacgaaacacctccggcggatcagttggctttgtcgccgtcgagtcttgttttcgacgagcaggatcctgcaaaaaacgagttcacggtcactgtgaccgacggactgacctgggtgctccaggtgaagccgtcggctgccggatgtaagttcagtgcatcgtccggccggggcagcggctcttttcgggtcgaacagatgcccgatgatagcagcatcgaaatcgaagcggtccatacttataataacggtacgcaactgaagagtaattcggtgcggataacccgtggaaaagccgtgctcgagccgaccctcgaacttgctcccgagaaactgacgttcgatcccgacgacgcttcggccaataccgttcaggtgcggtcgaataccgtgtggagcgccgttgcgagcgacgaagggctggtgttttctccggcatcgggcgagaacgacggggcgattaccgttacggcggctcctgcgggtaaaacatccgtaattacagtgaccgccggcgaaggcgagcagaccgtgacgcggcaggtcgagattacatgcgagaaccagattcccgttccggaggagacgatttattacgacgacttcgatcagacgcctttttcgggatgggccgatgcgagcgccgcatggcagaatccgaccggtccgggggcggcaggggtgacctatacctccgcccggactcgtatcaataacgataatttcggatcgtcgggccgctatccgggagcttcgggtgcgaactacgtccgtatctggttcgacaacggtccgtatttcatcgtgaatgacatcgcgcttacgcccgaccaggtcgatctgaccctctctttgggcgcttcgttcacggcggccgactgtctgatcgagttgagcggcgacggctcctattggcagcggatcgattataccggatcgagggcttataatatctgggaacagatctccgtcgattttaccctggctgttcccgtacagcggctcttcatccgctttacgccgcaaggttcgcagagctacggcgtcaatttcgacgacttgaagctcacgaccgggccgggcggacagacggtcgatttggacggcggcgactaccggttccccgagctgccgtccaattggaccgctccgacttcgtcccaggctgtcgtttcgggcgattatgccttctttacgcattggacgcagaccgtcaatacgcggaaaaccgtgcggaattactcctattgttacgatacgcggcgccataacccgatttgggtcgcctatccgatgcatgcctgctaccgcgagggcggcttcggacgtacggatcccgatccgtggacggcggatccgtcgctcgatgtggcgtatcagtcgaagatttaccgcaaggacggtccctccggttcggatccctatcagtattggacgagcaatacgatggcttatctccagcggtcgggatattgggggaagggacatctctgcatgtcgagcgaacgcggcggtgcgaaccagcagatcaacatgcagacgttctatccgaccaacatcgctccgcagccgagtgccaaagccggtacgttcggaacagtctgggggtatgtcgaggcgctctttgccgggacgcggaacagcgaaaacgatattgtagccgacgacggcgtgcaaaatatgaacatcgtttccgatacgcttttcgtggtggcgggctgttactacgagcatgattactggcaggagtacgactcttcggactccaatcaggccgagccggacccggcgcagaaactctgtacgatgccgacccatcagttcaagatggcgttgcgtacgaagtcgggcagcacgggtaaacggattcagcagtgtacggccgatgagttgcaggccgtcggtttctggatcgagaccttcaccgacagtccggaaaccagcgcccgcgcggaattgcgccgtatcgcggtgccggtcagcttcatcgaggagaagatgggcatgaccttcttccccgaggttcccgaagaggtgaagacacggatccccgtgcccgaagagtggggattctgagtttggagtgataactgtttcggggagggacgcattctgcaaggatgcgtccctcgtttttcggatttgaaacgggtgaaccccggaagtttcggaacctgccggacgagaaaatcgggatgggacggacaaaacggcaaaatatcggttatttttgccccgctgaaaaagtatgcgccggatgtactgtccgcatcggacggttcctgaatctcctttgcggggggcggatcggattctgtccgaacagggtggcgcagttttgctccggagcgatccgatatgcgtttgtggccgtctgttgctgcggccgggacgaacccgcagacaggatccgtgagcggcggggctttgcccgggcgacacccggtatttttcagtattgactgctttgagtaattgactatgctgaagagaaacggatggacccgcagccgtatcgccctgcgggagtggatgccggttatcgtgttgatgtgttgtactttcgtgttcaatacgtcggagtttattcccatcggcctgttgagcgacatcgcggccgatttcgggattaccgaggcccgggccggattgttgattacggtctatgcctgggtcgtggcgctggtttcgctgccgttgatgctcgcggtagcgaggatggagtgccggcggctgatgctcggggtgctggggcttttcattgcgagccacgtgttgtcaggactttcgtcttcctatgcgatgctgatggcttcgcggatcggtgtggcttgtgcgcatgcggtgttctggtcgatcgtttcgccgctggcggtccgcgtcgcaccgaagggagcgcaatcggctgcattgggattgattatcacgggaacgtcgattgccatgatcgtcggtctgccgctgggtcgcgtgatcggactttacgtgggatggcggacgaccttcttcttcattgctgcggtcgcggcggccgtttggctgtttctggcggcgatctttccccgggtcccgagccgcgacaccatttcgctgcgcaaggtgccctctctgctgggaaaccccgctctcgtgggcctctatgtgcttaccgttctcatggtaacgggccactatacggggtacagttacatcgaaccgttcctggcacaggtggccgggctggacaacgactggataacttgggtgctgacggcgttcggattggtggggatcgtcggaagcttatggttttcgcgcgattatgaaaaacgtccctacgccttcatgcggtttgccgtcgtgggtattgcgtttttcctgctgttgctgcgcctttcggctttcgggcactttccggttgtcgccctgtgtatctgctgggggttggccattacgattttcaacctggtttttcagtcggagatcattcgtctggctcccgaggcgacggcgatcgccatgtccgtctattcggggatttacaacgtcggaatcggtgccggggcactcgtaggaggattcgtctgtacgcacgcttcgattgcccggatcggttatgccgggggtacgatcgcattgttggcggcgctcttttgcttggtgcggttggtgccgttattgaaaaggagccggggctgatttcgaacgaagaaccggaaacgccctgccatcggagaggtggcagggcgctgtgtctttcggggtgccgaccggagcggtcggatcagcggtgcaagctggtcgggagctattcagcctgttgcttcccgctcggatcgaggggcttgaaaaagcctcttcccgattttttatagagccagagcatgaaaagacccgtcaggatgcctacgccggtgccgagcaacagatcgacggggaagtgtttggccaggtagatgcgcgagtagcagatcagcagcgctgcggcgatcccgagccatgtgaaccagcggcggcggatgacggcggccgacattacgacgactgccgcgatcgtcgcggcgtgggaggatacggtgccgtatttcccggcgacggctccggcgggaacgtgtacgaggctgttcggtgtggggagcccggcatgccgccaggcgaagagcgagtcggccggaatgtcgagtccttcgagggccggagagaacatcgggcgccagcggggaggaaaatcggcccaaaggtgtttcaggggacccgagtgcttgaagatgccgcagagcatgtccgagagcaccagggcgagagccagcgccgcgaggaaaagcagcgtgttgcgccatccgtagcgccggcagaccagccagagtatcagcaggtaaaagggaatccagatcgccatgcccgagatgagggtcatgatccggtccaggcagggaccgccgtcgaaattgagagccagaaacagggattcgtcgcaggagtgcataggtcgtttagaattggaagtagatgaaaggctggatatcgctcgacttgacctgcatcaccagccagatgacgcacgcggccaggagaacctgtacgaccgtcggcagggaggtgacgaatcgttgcgcccagcggtcgcagcggtcgggaagcatgtgcagcaggtagccgatgccgacgagcaggaagatgccggcataaccttcgagcacctgggggatgaccgaaggattgaagttcgtgaaaatttggtggagcatcagctgcacggttttcatcgattcggcacggaacatcagccatccgaagcagaccagattgaaggtgaagaaaatgcccggaatacgccagaaccaccgcatttcggctcctgtggctttggagccgggaacgacgctcagccagagcttgtgcagggccagcgctatgccgtgcagcgctccccaaaggatgaagcgcacggccgccccgtgccacagaccgccgagcagcatggtgacgagcaggttgaaataggtgcggatacgccccttgcggttgccgcccagcgagatatagagataatcgcgcagccacgtggagagcgagatgtgccaccggcgccagaattcggtgatcgtggccgatttgtagggggcgtcgaagttcttcggaaagcggaagcccagcagcagggcgatgccgatggccatatccgagtaacccgagaagtcgcaatagatttgcagggcgtagccgtaaattcccatcaggcattcgaacccggagtagagcagcggctcgtcgaagatacgatcgacgaagttgagtgagatatagtccgaaatgacggcttttttgaataagccgatgaggatcaggaatacgcccatgccgaacatttcgcgcgtgacccgcagcggattttgtcggatctggggaatgaagtctttggcccggacgatcgggccggctaccagttgtgggaagaacgagagatagaacaggtaatcggcccagttgtttaggggtttgagttgtccccggcagatgtcgatcgtatagctcatcgactggaatacgaagaacgaaataccgaccggcaggaagatgttctggaagttgaggaacccttgtccgaagaggttgttggcgatttcgatcaggaaattcgtgtacttgaaatagcccaacatgcccagattgaccaacacgctcaatcccacgagccagtatttcgcccgttgcgtccgtactttgtagatggcatgggcgatccagtagtcgctcaccgaagcgaagacgagcagcaggaagtagatgccgctcgacttgtaatagaagtagagcgaaaagaggatgacatagacgatgcgggccatcggagcccggcgggtgaatccgtagaagaagaggaatccggcgaagaggaaaaggaacagcccgctgctgaagatcaacggctgcgatgcgtcgtacgtgagcatcgaaaccagcttttccccgatattttccaccgtctggatcatgtccgggcgttagggtttttgcatacggggcctggctgcctggcgcagcatcatttccaggtgcgagattttccgggtgtcgatgacgttgtcatgcgcaacgggcgtgaagggaggatgttgttcggcacctcggttgatggcgtcgtacagagcccaggctacgcgacgaccgcccgcgaaattgatgtgggtgtagtcctttccggcccagccgttggccacgaattgcgccatgccgccgagcgattgcatggcgtcgtaggcgctccagaaggctgccccgctgttttgcgcggcctgtcgttgggccgcagccatgtagggtgccgaatccattgggacgaatcccgagtccgacttcacgctgcggtcgctgacgctcatcactaatacggcggccgtagggaagcactgccggatgtaggcgatcatcttctcgatctgttcgccgtatttggcgaaggagcggatgcccggttccaggatgttgaggccgtattgcaggatcaccaggtcgtagccgagcatttcattgatctgggcattgaccgtgggcgaggtccagaacatcgcctgtccgttgttgctgcggatcgaatagttgtccaccaccacgccgggcgccgattcgaagatcgcaccgtagccgatcgctcctgcggcacccgacagtaccttgaaactcaacgaacggatgtcgtcatggacgacgatctgtcgcacggcgggcgaaccttcgatgtcgaacgtacggttgtcccgatcattgacggtcacctcgatacggctgtcgtcacggctgacgaacaggatccgggccgtgcggcaactgtccaggcaagcccggtccgatgaaccttcccagcgaacggaggctccgtccgaaggttggcagagccagcccgagatgtaataatagtcgctgatagcggcgggggtgtttcgccgttgcatgatgttgtaggagtcccaacctttggactgggttttgatcgtgcgccggaagccggtcagcggcgaagccatcggagcgaaaccggccccggaaccgccgaaccggagctgcagcttttcacgcaggtccgaggagaggatgtcgccttcgacgaacgagtcgcccatgaccgcgatacggacaggagcgtcgcctttctgcagtttttcatagaaggccgtgaggcggctgtgtcccgtcgtgtcgaaatcttcgatcgggatcagcgtcggcgacagccggaccgaatccggaagccggggttgggcagtcgtatcgtccgcctcttcccggaggttccattcgtaggtggtcggggcgtgttgaggcaccgtgtcggcgatctggcgggcgacctgcgtcaggtcgatgtggaaatccgcatcgtccagatcgatcgctttttcggctttttcgaggtcttcttcgaaagagatgaggtcggacaggatgttagccctgcgcagactgaccccgccgagcgtttgcggcggtatcaggctcaatccgatgagaacggcgatgagcagggtgacggcgatccagctccggtgtgtgtagtccttttccggggccatcaatcacggcgtcctaaaatcatcaaaacgtaatagagcagcgacgctacggcactcaaggccgctaccaggtaggtgcgggcagcccacgagagggcttccttggcttgtccgagctgtgcgccttcgagcgtgtggctgctctggagccaggcgagggcccgctgcgaagcgttgtattccaccggcagggtgatgatcgagaagagagccgatacgccgatcatgcccacgccgatccagcagagcagttcattctgcgtggaggccaggatcaccaggccgatgatgatgacgaacattgccatacgcgaggagaactgcacgatgggtaccagctgcgaacgcaacgccagcggagcgtagccctgtgcatgctggatggcgtgcccgcattcgtggcaggcgacggctgccgccgcgacgctgcggctcgaatagaccgcgtcgctcaaattgacggtcatcgtctgcggattgaagtggtcggtcagttgtccgctgacgtgggtgatcttcacattgtggatcttgttgtcgcgcaacatcttttcggcgacttccgcaccggtgagtccgccggggaaaggcacttcggagtattttttgaagacgtgttgcaggcgggcctgcacgatgtagccgattacgccgatcacgataatcagcacgaacatgcccatcgtggcggcgtcgtaccgcgacgctacgggctccgtggtgtaataaccgctttggagcaggttgaaaatcagcagcataatttttcaatttcagtgtctgcgcttcgattcttccggacatattcggtcccggatttcgaagacggacagggttgttatttcgtattccggcaggtgtagtatgcaccggcctgttgagccggcatcagtactatatcattaacgttcatgtgggccggtaattgtacgatccaggcgatcgtttccgcaatatccgcgccggtcaaaggttcgacgccggtataggtcttgtcggctcgctcttgatcgccgtggaaacgcaccagcgaaaattcggtttcgaccatgcccggacggatctccgtgaccttgatgcggtggctcagcaggtcggcacgcatggcttgcgaaatggcgtgtacggcgtgtttcgacgcgcaatatacggcgccgttttcgtaaggctcggttccggcgatcgatccgatgttgattacgtgtcccccgcctgcggcgatcattttgggtgtgatgatgcgggtgacgtagagcagtcccttgacgttcgtgtcgatcatggcgtcccagtcggccgtggagccttggtcgatgtgttcgagtccggcggccagcccggcgttgttgagcagcagatcgacccgatcgagcggttcgaggtgtttcctgcattcggcttcgctgcgtacgtcgaagcagagcgtgcggcaactgccgccctgcgcttcgatggcggatttgagcgctgccagccgttcggcgcggcgccccgtggcgatgatgtcgtatccgagggctgcgagccgtagcgccgtagcgtgtccgatgcccgaagtggcccctgtaattaaagcttgttttttcataatggtcggtttatcgaacaaaagtaagaaaaatttatgttactttgcatgaaaaatacgtgcaaaatcggaagagggtgaatctcgaactgttcatagcgcgcagaatcgcgcataacggatccggcaaccgtccgggtgtgatggttcgtatcgccgtggtcgcggtggcgttgagcgtgacggtgatgattctggctttggccgttatcatgggtttcaagcgggaaatcacggatcgtgtcaccggcttctcggcccaggtcgaggtcgccgatctgcgaagcgccgggtcgatcgagtcggtgccggtattgcgcagcgaacaactcgagagaacgatccgctcggcaggcgaggtcgtacggctcactccctatgccgtgaaggggggcgtggtcaagatgcccgatgcgattctcggcgtgatgctcaagggggtggacggcggttacgaatggtcgttttttcgggaccatctgctcgagggcgagttgccccgtgtcggggattcgattcgcactaaggagattttgatctcccggagcgttgcccaggagatggggcttgcgcccggtgataaggtcgagatgcttttcgtcgagtcggagaagagtccgcgccgcgaccggttcaaggtgtcgggtatctatgcgactgggatggacgaattcgaccggagcgtggcgatgaccgatttgagaaacgtgcagcggttggccgactggtcgtccgacgaggtgtcgggctacgaagtgacgctcgcggatttctcgcaggcggaagatttctcccgccggctgaacgatatgttgctggattcggatcgggaggctttctgggacctgacggcccgcagtgcgcaggagcggttcccgaccgtgttcgactggctcaagacgcacgatgtcaatgctgcggtgatcctggtcatcatggtcgtcgtggccgtgttcaacatggcgaccgcgttgctgacgctcgtgctggagcgtacacgtatgatcggtctgttgaagacgatgggaatgaacaatgcgtcgctgcgccggatttttctctaccgggccttgatgctcatcgtgcgaggggccgtgtggggcaatgcgatcggtttgggaatctgtctgttgcaatattatttccacctgatcccgctcgatcccgagggttatatgctgtcggaggtgcccgttgcgttcggcgtaggatggtggttggcgctcaatgcgggagtcgtggtcgtgattttgacgttgctgatgcttccggcttcgatcatttcacaggtcaaaccggtggaggcgatccgttacgattcataaagtacataaaagatgaaaccatacgatacagagcaggacaagaaagaacaggtgcgcgagatgttcgaccgcatcgctccggcgtacgaccggttgaaccacacgctttcgtttcagatcgataaattgtggcgtcggcatgtggtgcggatcgtgcggcggatgcagccccggcggattctcgacgtggcgaccggtacgggcgacctggcattggcgatggcccgccgcatgcggggcgtgcaggtattgggcgtcgatctttcggaaaatatgcttgcggaggcccgccggaaggcgacggcctgcggactggacgaacgggtggtgctttcgctcggggatgcggagcgcctggaggtggcggatgcgtcggtggacgtggtgacggtggctttcggagtgcgtaatttcggggatctcggagcggggctccgggagatcgcccgggtgctgaagcccggcgggaaggtcgttatcctggagttttcgacccctcgcaatccgttgttccgaagggtgtacggtctttacagccatcgcctgttgcccgctatcggcgggatgatctccaaagaccgcaaggcatacgagtacctgcctgcttcggtggatgaatttccggctccggaatgttttatggcgatgatgcgcgaggcgggattcaaggattgcagggcccgttcccagagtttgggaatcgcgcagatatatacgggagaaaaataggaccttcgcgtgagaaccttgttgaaatacgtattgccggtgttgttcgccgctctcttgagcggatgcggcgcgtccctggtccgaaaggtccggatcggagaagaggtggcggtgcgtcagtacggtacggtgggtctggatttgacgttcgaagtggaaaatgcgtcccgccgcacgctgcggctcgaggaggctgaattggaatttttcaccggagcgggttcgctgggacgtgccgtgttgaggggttctgtcgaagttcccgggcggagtcgcggcccggtgtgcagtcgctggaaattcgattttcccgatgccgccgccggaatggtccttcggaagcgattggaggagggggattacgcccggctggaggtcgaagtgcggatgacgctgcgggcgggggccgtgcggcgccgtgtttctttcgaaaggatgcctttttccgaatttttgaatatctttgcagaagataggatgcggctcggataagctcaaacgaccgacgctcgaagcatgcgtcaagaacacttgtaaactctgccatgcaaggaggaggaaaacataaagttaagttcggcttgccgtgtgcctttccttatttttaccgaagataggagatacgcttcgggaaactgggagcaggttcctgccgttttcttctcggctttcactatctttgcagaagataggattcggttcagcaatctttgcgtgcaagcccgcacgattgctctcacctttcactatctttgtccgggaggagtttccgttcgaatagtgtatccgggaagttccgactggtttaagaaaatagtgactatgtataggataatcgtttcattgctgtttgttttcggattgtatggtggcgtttcggcccagtcgctcgcctctttcaaggagcgtctgtcgcagcctgcgggttcggcagccgttaccgtagtggagcacggggatgctgcgggcgtcgtgagccgggagagccagagcaacgaccgcatccggttcaaagggtatcgaatcggtattttcttcgataacggagcggaggcccgggccaatgcgcttgccgccaagcagacgttcgaaaccgcattcccggatattccggtctatctggtttatgaaaatccctatttcaaggtttctgccggaaattgcgtcacttccgaggaggcgatcgtgttgctgggcaagattcgcagccagtttccggaggcttatctaatgcgtgaagatctcacggtggccgacctgattcgttaattttccaaaagattaaaaataacgaaaaaaatttgatagattctacccgaatctatatatttgccgcgttaaaaacctttaataattaaaactatgaagaaagttttatctctgatgattgtcgttgctgccgctgccatggtaagctgcgccggcaaacaggcaaaacaggctgaaaccgttgaagttgaggctaccgaggtcgtagagactcctgcttgctgcgaggagcctgccgcttgcgagaaagccgatagctgcgcaacggcctgcgagactccggcagaaactccggctcctgctgaagctgccaagtaatttcccttttcggaacttacgggagtatccccaaaggatactctttttttatgcctcttccccggcgggagaggtattttttatgaagcggtgttgtccggtgtcagatcttgcgggcacgccagttgccgtaacgcatataaagataggaagccgtgagggtgcagccgtaatagacgtggtcggcggtccagcaaagtgcgacatcggcatgcagtccgtaaaccagcagcgccgtataagcgacatagacgatgctggtgcaggcgacgatcgtgagggccgtgcgggtgttgcccgtacccgatacgctgaattgatagatgaaggcggccgtgcagggaatgttggtagtcagcattacccagagcgaagggatggcgtattcgatcagagatacgtcgtccgtatagatgcggagcgtccagtaaggaatcgcggctgccaggatgcaaagcgggaggacgaagcagaaacagaggcggatcatcttccggcagaggggcatgatctgttcggcatagcctgcgccgagcaggttgcttaccagggagctggctgtcgaggcgaaggcgttgatgaacatgaagatcagcgacgatacggcccgcacgatgttcgtggcggccaagtcgcgcttgcccaggtgttcgatgcagaggaagaagaggaaccacgcgaggaaagccacgccctgttggatcatcacccagaccgaaaggctcaggatttgtttcagcagggaaaagtcgaatcctgtgaatcggaatttatagcggcgccagtcggtccgatagcgggtgtagagtatgtagaagagggcggatacgccttccgaaatagaagaggcgatcgcagcgccggcgatgcccatttcggggaatccgaattttccgaagatcagcaggtagttcaatacgacattggtgagtaccatgacgatcgagttgatcgtcaggatgcgcgtgcgggtcgtgccgacatagaatgcccggaacatcgacccgacgtaggcgaagaagaaaccgtaaacccggtagtcgaggtaccggacggcggcttcccgtacatcgggagcttcgatcagggctcccatgatgcgggctgcgaagactttcgagaggatgaacagcacgagggccatcaacagcaggaacgccgtactttgcatgaacagagggccgatctgcgaatactccttggctccgttgcggcgggcgatgagaatctgggcgccgatgctgaacccgaatcccagcatgaagatcatcaggtagaagatacccgccagggccgaagcccccaattccgcctctccgacgcgtcccagataggccgtatctgtcagtccgatcaactgctccatcagcaggcagaccagcaccgggaaggtgattttcaggattttcttgttcgtatagcgcattggaaacgtcggtttcagtgcacaaaaatactcttttttccgcaatcgtatttataacgggctgtttttggaaatttgcaggacaataccccctcgagtgttgtccggaacaaaatattttatagttttgtggtgtcggtttcgtccgacagacatattttgatgaaagtgtttcgcttttatccttgataagaaatctgacagtttcaagcaagacgaggataacgacaacactcatcatctgtttcggtatgtgtatattattccaatcgctccatactgaacaggtgtggggtattgtgttggtttattcgtcttgggttttgtcagaacctcttatcagataaacgaacggctccacactttcttttttatcccctaattataacccgccatgtcggagccgggtggcaacagacttttataattatgaaaaaaatgcttgctttattggccgcctgtctatggttggcggggtgtagtggtgatggaccggatggagggtcggggaatttgaatattgtattcgactgttcaatgccgctgcaggttgttgccggtgaaacctgtgaggttggatatacgttggaaggggcgagtgaaaatgcacgagtgagggttgtcgctccggacggctattgggttgatgtcatcgaaacgaatcactggtcggggaaaatcgttatctatctgcccgatactgcgacggacgagcggattgtcgtaatcctctccgatgaagggaacgagacagtaagccgttatatcgatttagaggtcaaggcgaaatcggatgttgtttttgatctttccgccaactcctaccttatcgaggctgaaggcacctctttgcaagtaacgcttattacgaacatcgattacacggttgagattgctgagaaagatcggacgtggatcagagtggagacctcccgtaccgatcagcgagaagagtcgctcgtattctctttccgccccaattccgatgtgaaaagccgccaggctacggttagactggtggattccgaggggaatttactggacagtatctgttttacacaggctacttcgggctctgtcaacgtcagactcgaacgtgccgatgtctggacccaggtgatttggttgtccggctcgtgtgcatccgatgttgcgcaggcgggcttccgttatcggaaacaaggtgataaagagtgggtggaagttgccggagcgggttcgagcaacggtttttctgcacacgtagaagccgaaccagagacgacctacgagataatggcctgctggcgagatgaggagagtcggattcatatcgtgactacgctgcccgcattgaaactcccgaacggcgactttgaagagtggaatttctcggaggagggggcgttttgggcaacttcaatcgtgaggggttacccagagatgggattgccccaaccgacgattcgccccgggagttctgggaaatatgccgtgaaactccagaaagaagagtgggatagtatagtaaaagatttatatggagggcatatttttactgggataaatgtagatcctgctgctggtagtggtgttattggggtgctttcaatgctttggaatatttacggacagcttttcgaagcgacaccgactgctttgcgggggtggttgcaatgcaggaacgtgatgagtacagatacgaaggagcaggaggcgacaattaggatcgcattgggaacatggtctccggtaccagatcatgacgttaaaatcccggagcatcctgttgttgatcaatatcttgaagaggccttggatccatcctgttccgatttgattgcttacggtgaattgcaagtggctgaggatgtcgattggcagcaatttacgattcctctggagtatttgcgaacagaccggaagccgactcacctgataattacctgtgatgcaggctccagaatcctttgcctggatgatttcgagctgctttacgattataatttttaactcgaaaataaaaaactatggaacagaaaaacggacaatcggtttatgaagtaatgaccaagtatgccggagaggtgattgcggagatggcgggtgaaatttttacgacccgcaattttatcgaggcatttgccgataaacatgaaattatctatgtcgagttattatttgcggcctataaaaacgatcggtcgcgtgtatttcatcgggttcattcccaaatcggagcgtatttgtccgagaatcaggagaaactcgacataaagaagacacgacggttgatgactcgtaatccgttcggacgggagaatgaagtgcaggagtggcggaagaaggagtgattttagtgaaatagtgggtgttttaggcttgaagcaggcttctaattaaattgctaaaagtgtttaatacgatggatgcttttgtggaaattttacttgggttaacacttgcgggaatagttgtgttacttgtatggcggaggcacttgaagaagaaaaaggataatatgcgaaaggaatccttgtcaaacgatgaatgtgcgtcggcggttgatttgactttatttccggaggtaaaagataattccgaagagtcgttgttgatccattgtcctgcttgcggattggaggtgtcgcgttatgctccgacatgtccccgatgcggacattcgatttacttgataaggcctctccaacaggaaacggtgataaaggttattccgacggatcagaggaaacccgaatcgacccgggaaaccactggatgtctctcttcttttttcggttatgtttctttggtagtaggagccgttttgtttaattttatcggttattttatcgttctcgttattttaaccctttgtggggtatttagtttcggagaagcggtgtttttattgctcgttggaattgtgttggcttttctgttttggccgcttgtcgcgtcatttgcattgctgaattttctcgattgatataatacgatggaattttacggataaaatgaggtgaataaatgcatagcggcgaccttttaaggtcgccgctatgcattaccataacattattctatttttcgagccggcccttgtacttgtcgatctggcgtttgagcgcttcgatcgagagatcgaccgcctcctcgaaacttttgccccggctctcggccaccaggtcgtctcccggaatatggaggttgatcgtggcgactttatttccgagttcgtggtctttatccagtttcaatatgacgtcggctccgatagcccgttcgacaaaacggtcgagtttgtccattttgtgctctacgaattcgaccaacttcctgtcggcgtcgaattttacggattgaatttgtacgttcataatactatgttttataaggttcgttatctgcggaactgtgctccggccgatcaattctgttgttttgtttgctccgctccgtttttctcgcgcgggtgagctttggaatagatctcctgcaacttggcgatgctgttgtgcgtatagacctgcgtcgcctgcagggacgcatgtccgagcaattcttgtatcgccctcatgtcggcgccgttgttgagcaattcggtggcgaaggtgtgccggagtacgtgcggactctttttgccctgaacgccgccctgtcgcaattggctctgtacggtccgatagacggtgctgcgggagattcgttttccttgctgatttaaaaatagtgctttttctttagaaatgcaaattccctgccggtcaatttcgtccaaatagtgcaaaattttttcccggacgggcggcaggatcgggacgatacgctctttatcgcccttgccgcggactttgagtgcggtatagtcgcccgagaaatcgtcgcggtcgatacctacgagttccgcaagccgcagtccgcaactgtaaaacaggagaacgatgagcgaatttcggacaaatttgaattccggactttcgctctcccggtccagttcgtcgagaatcccctccatgcgtgtcgagggaacgaatgccgggattcgccgggaggttttcagtgcgtggatgcggtacatgacctctttgtcgattcgccccgtacggtggaggtaacggaagaaactccgcagggaggagagctcccggttcatcgaggcggctcccagatgttttgtttccgtacggtgcacgatccattcgcggacgtcttccacggtgattcgccggggatcgaaatccgcttccggaacatcgagccactcaaggaagtttgtcacgtcacggcggtaattctgcaccgtcaatggggaaaagcggcggaccgtcgctaagtattgcagaaattcttggagcatgaaacaaagatactgtttttctgtcgcatttatagaacgcgatcggagaagaaatgcgtacggacccaatgggaaaattttgtcatccggaaaagaggagcgtcgtcggacagtgcgaaggggtgtgtcggagtattgcgttcgtcagggatgacgccttgtatggaaaaagcaaaaccccgtcagaggaaactctgacggggtttctggtgcccaggacaggagtcgaacctgcacgcctctcgacacacgcacctgaaacgtgcgcgtctaccaattccgccacctgggcatcatggaattacggtgtgcaaaagtaatacttttttcttaaatgcaaatattttggggcgattttttcgaaaaaaactacttgttgaagtatttatagtgaaaaatcagcagataaaccacggctaccgagatataagcatcggccaggttgaaaactgcaccgaagaagtagttgcggctatcgaccaggaaatcgaggaatccgggaacgctgttccactgaaagagcggaaagtagaacatatccacgactttgcccatcatgaatcctgcgtagtggcctccgaaatgggcgaccgtgtcgggtgtggaggccgagaagatcagcccgtaaaaggcgctgtcgatgatgttgccgatcgctccggccagaatcagcccgaatccgatcaacactcctttgggcgcttttttgcgcatgaaatggcgaatcagccagatcagtgcgacgaccatgccgatccggaaaagacctaaaagcagcttgccccagtccatcgttcccggcgtggcgatgtgcatgccgaaggccgcacctttgttttcgatgaagtagagctgaaaccagtccgggatgagtatgatggcctctcccagagtcatgtgggttttcacccatatcttgagggcctgatcgaggatcagcagcagaatgacaaggagtgtgagtttttttccgttcatgacgcttgttttggataggggcaaatttacttaaaaaaatcggttcttgacaaaaaagatagtttgcgggtttcgattattcgtatttcctaaaaaaatacttacctttaatggctgaatttgccatcttatagtatctgccgtgtgaaaatccattcgggatatttttgaaatcctattcgaaatgaagtggaaaatggatggcgggttctgagagcaggattgttgaatgtattaatttaatggttatgaaaaaagtttattggactcttgtcgcaattttcgttgcggccgctttaggtggatgtgtaaatgatccgaccgaaatggagaatgcgccggacatgagcgccggaagtcgtaaaattcttacctcggcggaagcggaggcgggtgagttacttgtgaaattttcgaaggagtcgatcgctgctgtcgaggcgggagtgacgcgttccgaatctacgcgtacgggtattcaaccttttgatgcggctctgaaagaaattagtgccgtatccgttgagcgggtaatccctgtggttgagcaacatgaggccgacgctcgggcttcggggttgcaccgttggtatcgggtgaggttcaacgatcaggtgtcgctggacgaagcagctcgcaaattggccgctgtcgaagatgtagaggttgttcaatatgacggatatgttgcccggaattttacggaaatgtcggctgtaccttataataatgtatggagttcggatcgggaccaaattaatacgcgtagcggagaaactcccaaattcaacgatccgatgttgaataagcagtggcattataagaatacgggagatgaaacgctggtgagtcctattaaggagggatgcgatatcaatgtcgaacccgcatgggaattttgtacgggcgatccttcgatcatcgtcgccgtcatggatgagggggtaatgtatgagcatgaggaccttgcagccaatatgtgggtcaatcaggcggaattgaacggtcagaagggagtggatgacgacggtaacggatatgtcgatgacgtctatggctataattttgccaaagaccaaggggatataacgtggacggatcccgaggatagcggtcatggaacgcatgtggcggggacgatctctgccgtgaacaacaatggtatcggcgtctgcggtatcgcgggcggcagcggaaacaacgacggggtgaagattatgtctattcaaatttttgccggacggtatcagagtacgataagccggaatgttgatgcgatctattatgcaaccagtatgggggcttctatcctgcagtgcagttgggggttgatgagtggtgcgatcaattcggatgaacagtatttggacgaaagaagtattgaagccaatgcgttcgcccattttattaatacgaaacgtccgggtagtccgctcaacggcggtattatcatttttgcggctggtaatgaagcaggagcctgtggttatcctgcggcatatccttcggtggtttgtgtgacttcgctcagtacggattttacgccttcggtctttacgaattacgggatgccggcagatattgctgcgccgggcggtgatctgtattatcacaaaaatcacagtgatgccggtcaggttctttcgacggttctgaaattggatggtatgtatgcctacatgtccggcacgtcgatgtcctgcccgcatgtttccggtgtcgcggccttgggtctttcgtatgccaaacagttgggtaagacgttcgaaccggatgagttccgtgatatggtactggcttcggtgaacgatttggatccgtatctgaccggtgtcaagaaacataacaacggtacgatgaacctagtcgagtataaggggaaaatgggttcgggtatgatcgacgcctacaagatgctgatggctgtacggggtactccggcgatcacggtcgagcaggacaagccgacgacgatttcgctgtcgaaatattacggggatgttactgcactttcttgtatgctggaggtgagcgatgcggtgaaagataagttggggcttacgttcactgtcgagggtaacaatgctacgattacttgctcaaagcagagcgccggtcttgtgacggttaagagctctgtcggtggaacgtcgatgagccgcgaggttgcgatcatttgccgtgcgaaggcggcttcgaacggcggttggctgtaagcctctcgttgattgaaaaatggcggagcgactgtatggtcgctccgttttttttgattatatattcaaaatgcaaccggctctgtgctgggccgactgcgatgtatgcttcgacctttcctcgatgctcccttcttgaagattgaggtagaaccgaataacggcctgtgggttgtgggttatcgttgaaatcgaaaatatttcaatgtatcggtatccgacggttgcttattcgccgcatgcggctatgtgtgtaattcgactctccctaaatttttcttcggagggaatttgtccgttatactttcaatgagggacacaagcggatataattatatctattataaataggtatctggatgtaaatggagaaaaattacatttttcgatataaaaatcattaaaacatttgcagattccaaaataatccctacctttgcatccgcatttgagaaaaacagttgctcgaatagaagtttaatccggttttcggatgacggagcaaaaaaggaaaatgcaaaagttcttgaaaaaagatttggtggattgaaaaagattacatatctttgcagtccgaaacgtgatggaaaatcacggctctttttgagattggttctttgaattactggtaatattgagagaaaaagaaatgtagtatttatctgtcaaattcctttaaggaaattaagtagtcaggactctaacaaaacattattctttatacaatggagagtttgatcctggctcaggatgaacgctagcggcaggcttaacacatgcaagtcgaggggcagcataatggatagcaatatcta

SEQ ID NO: 10413 - DNA, 15464 bp, Unknown
  gut microbiota DNA sequence
tttagataggaggcgcctcggcaacgctcaaataaatttggcgctgcgctcggctttcactatctttgcatcagatagaagacggttcggacaagctcgaacgagttcggctcgtcgttcccttttgctatctttacaaaaaatttcgctctgataggctgcatccggatataagtcggctcgatccggcttcatcatgcgccagcactatctcggcctgtccaatcgctgaaaaccatgaaaaccgattttctggtcatcggatccggcgccgccggactgagtttcgccctcaaagccgcagaacacggccacgttacactggtaacgaaagggaaaatggacgagtgcaacaccaactatgcccagggaggcatctgttcggtgacctatgcgcccgacacgttcgaaaaacatattcacgacaccctggtctgcggtgccggcaaatgcgaccccgcagccgtcgaactggtagttcgccgggccccggagctgatccgcgacctgatcgcctggggcacgaaattcgacaagacacccgacggacgcttcgaactcaaccgcgaaggcggacataccgaacatcgtatcctccaccacgaggacctcacgggcgccgagatcgaacgggccctgataacctcggtacgcaagcaccccaacatcacggttctcgaacaccatttcgccatcgacctgctgacacagcatcacctgggcgaattcgtcacccgccacacgcgcggcctggcctgcttcggagcttacgtactgaacctggagagcaacgagatcgaaaccgtgctggccaaattcaccgtcgtcgctgcaggcggctgcggcaacgtctattcttcgacgaccaatccgagcgtcgccacaggcgacggcatcgccatgtgccaccgcgccaaggcgatcaccgaaaacatggagttcatccaattccatcccacctcgctctaccatccggccgaaaagcccaatttcctcatcacggaggcgatgcggggttacggcgcgatcctgcgtctgcaaaacggcgaagagttcatggacaaataccacccgatgaaatcgctcgcaccgcgcgacgtgacggcccgggccatctataccgaaatgacccgccggggcgaggacttcgtctatctcgacgtgcggcacaaagatccggagcagacgcgccggcatttcccgaacatctacgaaaaatgcctctcgctcggcatcgacatcacccgcgacctgatccccgtcacgccggcggcgcactactgctgcggcggggtgaaagtagatctcaacggcgaaacctcgatccggcggctctatgcgctgggagaaacctcctgcacgggactgcacggcgccaaccggctggcttcgaactccctgatcgaagcggtcgtctatgccgaccaggccgccaaacatgccgcctcgcggctctcctcggtcgagatccaggaaggtattcccgactgggatttcgaaggtacccagcacaccgaggagatgctgatgatcatccagtccaagcgcgagatgcaggccatcatgtccaattacgtcggcatcgtccgttcgaacctctcgctcgaacgcgccctgcgccgcctgtcgatcatctacgaagagaccgaagagctgcacaacaagatcaagcccaaccgcgagctgtgcgaactgcgcaacatgatcgccgtggcctacctggtcatcaaacagggcagcgcattgaaagaatcggtcggctgccactacaactccgactaccccaaaccggacaataaataatccgcaagcaaacctatccacaacctttattaccatctatgaccttacaggaagagatcacccgccggcggacgttcgccgtcatcgcgcacccggacgccggtaaaacgaccctgaccgaaaaactgctgctcttcggcggcgccatccacgtcgcgggagcggtcaaaagcaataaaatcaagaagggagccacctccgacttcatggagatcgaacgtcagcgcggtatttcggtcgctacgtccgtcatgggcttcgaataccagggccgcaagatcaacattctcgataccccgggccacgaagacttcgccgaagatacctaccgcacgctgacggcggtggactccgtaatcatcgtcatcgacggcgccaaaggcgtcgagtcccagacccgcaagctgatggacgtctgccgcatgcggcagaccccggtgatcgtcttcgtcaacaagctcgaccgcccctgcaaggatcccttcgacctgctggacgaaatcgagaaggaactccgcatccgggtacgtcccctctcattcccgatttcgagcggcgacaccttcaagggcgtttacaacatctacgagaagaacctcacgctctttacgagcgacgaacggcagacggccgacgcttcgaccgtagagatcaacgacctcgcctcgcccgaactggacgaatacatctccgaacgctacgccaagcaactgcgcgaagacaccgaactggtcgaaggcgtgtacgacgctttcgaccgcgacgcttacctgcgggctgagctggccccggtcttcttcggctcggcggtcaataatttcggcgtgaaggagttgctggagtgtttcatccgcatcgccccctcgccgcgccctgcgccgaccgaaacccggatcgtggagcctgccgaggagaaaatgacaggcttcgtcttcaagatccacgccaacatggatccgaaccaccgcgaccgcatcgccttcctgaagatctgctccggcacgttcgaacgtaacaagaatttcctgcacgtgcgcagcggcaaacagatgaaattctcctcgccgacggctttcatggccgagaaaaagtcgatcatcgacttcgcctacccgggcgacatcgtcggcctgcacgacacgggcaacttcaagatcggcgacaccttcaccgaaggcgaaaagctcaaattcacaggcattccctccttcgcacccgaacagttccgttatatcgagaatgccgatccgctgaaattcaagcaactggccaaaggcatcgatcagctcatggacgaaggcgtggcgcagctcttcacctcgtcgctcaacggccgcaaaatcatcggcacggtgggcgccctgcaattcgaggtgatcgaataccgcctggcgcacgaatacaacgccgcctgccgctgggagccgatctccatctacaaagcctgctggatcgagagcgacaacgccgagcagctggccgacttcaaacggcgcaaacatacgaacatggccatcgacaagcacggccgcgatgtatttctggccgacaccagctatgccctggccctggcgcaggaaaacttcaaggacatcagattttacttcacctcggagttctgatcccgttacaagcaagttctgatcccgccagcaatcatcaaaatataaaccacccgtgctaccattgcacgggtggttttattgtcaaaataactactcttctccgcacaaacgattcgcgcgacataccacatccgttctcgatcgtcccggtcttctatacactcacacgaaaagggctgcctctgtaggcagccctttcgattttcaggatgggaaacccacgccgacaacaactctatttttcgagccccatcttttcgatcagagccttggtttcgggcttgtgtccccggaaattcacatagagcgtcatcggatgttcgtgaccgcccttcgagagaatttcgcggcggaaagcctccgccacttcgggattgaaaatacccttctccttgaacagcgagaaggcatcggccgccagcacctcggcccacttgtaaccgtaatagcccgcagcatatccgccggcaaaaatgtggctgaaagccggcgacatcgcagcaccctcgacaaccgggagtacctgagccggagccatcgccgtccgttcaaacagttcgacatcgccctcgaacggcttgtcgatcgaatgccatgccatgtcgttgagcccgtacagcaactggcggacattgaaataagccgcctgatagttctctgcggcgacgatcttggcaatcaggtcggcaggaatcggttctccggtcttgtaattcacggcccacaagtcgaggaactctttctcggtcgcccaattctccatgatctgcgaaggcagctcgacgaaatcctgatatacgtgcgtaccgctgatcgactcgtgctctccctccgaaagaatggcgtgcagcgcgtgtccgaactcatgcaggaaagtttcgaattcactgaaagtaagcagtgaaggagtcgtatcggtcggcttggtgaagttcatcaccagcgacaccagcgggcgggtttcgtgttcctcgacgattgaaacgctccggaactcggtttcccaagccccgccgcgtttggtagcccgggggaagaagtcgaggtaaagttccgccaggaagcgaccgtccttgtcggtcacgtcgtaagccgtcacctcgggatgatagaccgggacttcgggattcggcgtgaaattaaggccgtagagcttattggcaagcaggaataccccccgcttcacactgtccaactgcaagtaaggcttcaccaactcctcgttgagctcgtatttctcatggcggtacttctccgagtaataagccatatcccagggcatgacctcgccttcgaaaccctgcgagcgggcatactccccgatcgtattgtaatccttcacggcatactccttggtctgggcaagcaattcatccaggaaagcattgaccgtctgcgcgttttcagccattcggtcggccagcacgtaatcggcgtacgtcggataccccaacaggttggcgatcttcaaacgcagattgaccatccgcttgatgttctccgtattgtcgaactcaccgcccaagcagagggagttgctggctctccaaagcttctccttcagctcgcggttggtcgaatactccatgaaagggacgtaactcggcgcctgaagcgtcaccgtccatccctgctcgccacgggccttggcttcggcggccataccgtcccgcacgaaatcgggaagctcggccacctgcgccggatccgtgatattgatcgtaaaggcattcgtggcagccagcacattgtggctgaaccggagcgaaagctccgaaagttcggtcgaatattgccggtacagttccttgtcctcatcggaaaggttcgcaccgctgcgcacgaaaccgttataggtttcctccagcaatttcttgtcctctttcgaaaggaaccaccccggatgttcatagacggccttcacacgctcgaagagctgcgggttgagcgatatgtcgttggacagggccgtcaatttgggctgtacgttctcggccacctgctgcatctcgggcgtagcatccgcttcgagcaggttgaaaaaaataccttcgacccgcgaaagcagccggccctgacgatcgagcgccacgatcgtattattgaaggtcggcttggctggattgtttacgatcgcgtcgatttcggcacgcgacacagcgatcgcggcatcgaacgccggttcgtaatcggacacccggatccggtcgaacggcggggtttcgtgcggcgtattccactccgcgagcaaggggttgttcgtatcaatttcaggcagctgggcaacgggcatcgtatggtccgcgcatccggctgccaaagcggttaaaaatgtcataacaatctttttcatcggttaaattagattttaggcttttcattcggttcgagggtcacgacgggcacggcaaggctgtcggcaggttcttcgggcagctcctccatcaggccacaggccacgagcatcgcccgtttatcaggatcggccccgcgaaaatcccggtagagggtcataccgtccgccgaaccgccccgagaaagcagcgtccggaatttccgggcggtcgcacggtcgaatacgtcgccggtctgttcgaaggcccggaaagcgtctttgtcgaggacctgcgcccagatatagaaatagtatcccgacgcatagcccccatcgaaaatatgcaggaaatagggatagcggtagcggggctgtatctgcgggatcaatccccggcgaccgtacacggcatcggcttcgaactcgttcacatcgaaaggttcgtactccgtaatagcgtgaatatccatatcggtaagagcggcagctaccagttcggtgacaatgaagccctggttgaacttgccgctttcgcggatgcgcttgatcaagcgttcgggaatcacctctcccgtcgtataattgatcgcatagtggcgcagcacttcgggttcggtcgcccaattctccatgatctgcgaagggagctccacgaaatcgccctccaccctgccgagcgaccgatatttcacgtcggcgaaaagcgcatgcagcccgtgcccaaactcatgaaaaagggtctggacctcatcgagcgtaagcagcgaaggcgtcaatttggtcggcggagtaaaattgcatacgatggcgaccacaggagcgatgcgttcgtcgccttcgtagcgctggctgcggaacgcggtacaccacgcaccgctgctcttgccgctgcgcggaaaaaagtcgaaatagagcacgcccaaatgagtcccgtccacgtcgagcacctcatataccgagcaatccttgtggtaaaccggtgcgaccaacggacggaacgtaatcccgtaaagccggttcgccagcgaaaaagcgccttcccgaacattttcgagcgaaaaatagggccgcagcgtagcatcgtcgagcgcatatttgtccttgcgcaccttttcggcgtaataccaccaatcccagggttcgaacgtcgcccccggcacatcccgctgcaacatcgtattcatctcggccatctcttccttggcgcgatcgagcgccggcgtccacacttcgttcaacaactcataaacggcagcgggcgttccggccatctcatcggccgtcacataagccgcataggagggatagcccagcaagcgggctttctcgttacgcaggcgggcgaaatcgttcaccagagagcggttatcgtactcgctgccttcgttgcaacggtcgatatatgctttgtacaactgctcccgcaagtcgcgctgagtagaatacgtgagaaacggaatccggctgggagcgtcgagcgtaacgacccacgcatcgttcaatcccaactccgcagccttctcccgggccatcccctgcacgcttgcaggcagcccgtcgagctgtttctccgtcagtttcaacataaaatcattcgtcgcccggaggacattattgccgaatttcacgggcagcagcgccaattcgccgttaatttgacgcaaccgctccttctgctgcggatcgagcagcgctcccgcccgcacgaacttaccgtaaatcttctccaccaggcgcgtctgcacggcatcgaggccgaggctgccgcgacggtcgtaaacggctttgatcttgtcgaaaagcacctcgtcgagcagaatattgtcccgatgggcggccagcaacggcatcgcctgctctttcgccgccaataactgatcgttcacgtcggccgaacagagcatgttgaaaaccagccccacctgctccagcatcaaacccgaacggtcgtaagccagaatgacattctcgaaagagggctgatcgccgttggatttgatagcgtcgatctcggcttcctgaatcgacatcgcccgctggaaggcaggcagaaagtgttcgggccggatccggtcgaaaggaggcacgccgtagggcgtttcccactcctcgaagaacggattctccgccacctctttacgctggttgcatcccgtagtcataagcagaatcaatgaaattaaaaataaagaatatcgcttcatcggttcgttggattttatttacctttgcaaaggtaaacaatttataaaaaatgcaactgttttacgcccccgatatcgttcctccggaatatacgctcagcgaggaagagtcgaaacactgcatccgcgtgcttcgcatggcctgcggcgaagagctgcacatcaccgacggccgcggtaacctctaccgctgtgaaatcgtggacgacaatcccaaacgctgccgggtgcgggtgcgcgacaccaacagcgaattcggcaagctgccctaccgcctgacgatggccgtcgccccgacgaaaaacaacgaccggttcgaatggttcctcgaaaaagccacggaaatcggggtcgcggagatcatccccctcgccacggagcatagcgagcgacgcacgctcaagcccgaacgggagaacaaggtcatcacggctgccgtgaaacagtcgctcaaagcctaccacccccgcctgcacgaaataactccgctgcgacaggtcatcaagcagcccttcgacggacagaaattcatcgcccactgcgacgctccccgttcggccctgggcaaggcatttctgccccacatcctgcacaaaggaggcgacgtactggttctgatcgggccggaaggggacttctcgcccgaagagatcgacctggccgtccggggaggtttccgcgaaatcacgctcggctcgcagcgcctgcgcacggaaacggccgccgtcatggcgaccgcattggtggctgccgccaacgaatccgaaatcggaacggacgacagacaaccgtcttcaaaaccggtacaatgaaacaactttgggaaatattctggtcgtttttcaaaatcggactcttcaccttcggaggcggctacgccatgatcccgctgatccaacgcgaggtgatcgaccaccgcaagtggatccccgcttcggaatttctcgacctgctgaccctggcacaatcggtccccggccctattgcgatcaacacggccgtcttcgtcggatacaaacgctcggggctccgaggcgcctgcgcatcgctgctgggcgccgtgctgccgtcgttcctcatcatcctggcgatcgccctcttcttcgcgggcatccgtcagaaccccgtcgtcgatgcagccttcaaaggaatgcgcccggcggtcgttgccctgatcatcgctccgctggtcaccctcacgcggggcatgcactggagcatgatcgtgctggccgccgcactggccggactgatctggtggctgggtctttcaccggtactgattcttgccgccggtgcaggtgcaggcatcgtctgggaattgtctatcgcaaaaaagagtaagcaatgatattctgggaactgttcgtcagctatctgaaaatcggattcttcggcttcggcggcggttatgccatgctgtcgctgatccagaacgaagtggtcgtccagcacgcctggatgaccaacgccgaattcgccgacatcgtggccgtatcgcagatcacgcccggccccatcgccatcaattcggcgacttacgtgggttacacagttggaatgcaaagcggcagcgtatggtacggtattctgggctcggtcattgcgactttcgcggtctgcctgccgtcaatgacgctgatgattctagtcgcccgctacatcgcccgactcaagggcaatccgctggtaagcggcgccatgcggggactccgcccggtagtgatcggcatgattggggcggccgcgctcctgctgatgtttccgcaggacgcaggcgacgccagcttcatcgacttctggagttggattctcttcggcggcgtactcgcaggctcctacttcaaactcaatccgatcctgctgatcgtcctctcggctgccgcaggcatcgcgatctatctttaaccgcgcttactctcctccggcgacgaagaagatgccgcccgtaaagagcactaccaggaaagagatcagggccaatgccgtaagcaccatgaatccgatgtgcacgaagccccatttctcgcctccgtgcggcagtctcggcgaggtcagagccgcgataaggcccacgacaggcgtaaggatcagacttaaaacgaacgtccaggcgaatccgatcttgcggcggctgccgacgagcccgatcagtacggaaataagacaccaggtcaggatacccagtacaatagagagcgtagtcataatttcataagtttttcaaaaccgctctgccccgtaccggcaaaccgatcgtcggctacctgacaaaacgacagtacgtccccaggggaagccgcttgccggcccggtcgtcgaagcagagttctccgaattgttcctcaaacggcgtgccgaaggcctgtcgcacggcggtcgaagcgagcgttgccgacaaccccatcgaatagaggttcaacaccagaaacgctccgcgcggctccaacaaccgggcgcaacattcgagcatctcgccgatgttatcctccagaatccacttttcgccgttggcaccccgtccgtaagccgggggatcgaggataattccgttgtagcggttacctcgccgcacttcgcgctgcacgaatttgagcgcgtcttcgacgatccagcgcaccccctccaaaccgctctgctccatattctcccgcgcccaggtcacgacctgtttgaccgaatccacgtgggtcgtatcggctcccgccgcccgggccgcgagcgtcgctccgcccgtataggcaaagagattcaggaccttcggcgtccgttcctccgctctcatccgcacacagttgtcgtagatgaaattccagttggccgcctgctccggaaaaagccccacgtgtttgaacgaagtgaggcccaagcgcatgcgcagccgcatcccttcgtaggcgtagtccaccgtccaccgggacggcatcccggaccgcaaccgccactccccgcgttcttcgctgcgtccgtcgcgcaggaacgaggcgtcggccaggcggcgccactcctgctccgtaagactccgccgccaaatggcctgcggctcaggccggcgcacgacataacggccgaagcgttcgagtttctcgaaatcgccggaatcgatcagttcgtagtcggggaatcggggaatcagggcttcaaacatggaattatctttaatcatacatcatataacgaattatccggttcgtacacggcatactgccgacatcctacttcttttaccggcctgcggcgaacaggtgcaagccgaacaaatttcaccgagccgcccgcagaaacggaactcgcccgcaacttccaccgccgaaataatcagaccgatccggccaatcgaaagcacgggactcttttgttattttcgatcgctctcgtcgatcaggctcatttcgcaccgggcacagtcgaaccggagccggtatcggaaccggccgcgcatcagaaacagctctcctttcagcgtcggatgctccttcaggcactgtccgatctcacgccgaatgcaataggccgaacgcatgaccggatgccctgccgtcgcaggttccagatcgagtccgcgtgcaatccgcgtcacaccgtgatcgcggtaaaactcctcggccagacgattcgtcacattctcctcggccgtcaggactttcgacggatagggcgcagaacgatcctcgggcaaaatcgcatggacgacaggacggtcgagccgtgcccggcgcaaacgctccagcccctcgcggcgcagctccgccagcagcgataccggcacgaaacggtcgcacccttcggagcgaacttcccgcacgtcgaaaatcgtatctccgctgcgggaaagttgtgcggcgacggtttccgacatcttccgggaatctttcgccggttcgaacgccccgtcacgcgtaacctcggctacaaccccctcgcaatcggtaaaacgcaccgttactcgctgcggcgttatcgccgcgtcggcacgcacgggaatcacgcgccgcgtacggctgcggtcgagcgccaacgaaaagcggcggtcgaaattgcggaacacctccgccccggggacgacgccctccatccggttgggcacgatccgatttccggcgacctcattgacattggtacccgccaacccgttccaggtccggaaacagatgccgtccccgggcgccaggtcgtgcggcccggccaacgtgaagttccggccatcaacccgggctactcggcccacgaactcgccgacggacttgggcgtatcgaacgacgcgactcccgcccggcgaccgtcgaagaaatactccgattcgccccgcgtgaagctcttcgaaggatccggctgaaagtccggcctgctctcccccacggacgagcggcagaatcccggccgcgacgcgagcgcccgatcgatccgctggcggtaatggctcacgacatttttaatatatccgacatccttcaggcgtccttcgatcttgaacgaggtaatccccgcatcgatcagctcgcctatacggtccgacaaattcaaatcccgcaccgacagcaaatgccgccccttgacgaccgtacgcccggactcgtccaccagatcgtaggtcaggcggcagggctggctgcaagcgccccggttaccgctgcgttcgctcatcgaacgcgacaggaaacagcggccgctgtaccccacgcagatcgccccgtggacgaaacactccagatcgcccccgcaggcggcacggatcgtccggatctcgtcgagcgacaaggcccgctccagaatcacgcgggcaaagccgcagcgctccagaaaaagcgcctgctccggcgtacgtgtggccgcctgcgtcgaagcgtgcagctcgaccggcagattcatccgccgcagcgccatgtcctgcacgatcagggcgtccaccccggcggcgatcagctccctggcctgccgctcggcttcggccaactcgccgtcatagagcaacgtattgagcgtagcatgcacccgtacaccgtattgatgggcatactctaccgctcgggcgatctcctccgcagaattgcccgccgcgtggcgcgcaccgaagcgggcgcctccgatatagagggcgtcggcgccgtaatcgaccgcagcgacggccgcctgcaaatctttggcgggagcgagtaattcgatggatttcacggtgctttgtcggaaaatatgccgaagaaaaaacccgaaacgacatccggttccctcgggccgcgtcgaggcgtgtcttatctcggggcaaaagtaaaaaataatcggcaaatgtgcttgcgattggggtttgttttgtaattttgctttccgaacacgtaatatttcaagaccatgcttacgatcaagcaactcagggacgaccgcgaggcggccatccgccgtctggcaaaaaagggagtggacgccgctccggtaatcgccgaaatcgaaaaactggacgaccgccgcaaggcgatccagcacgaactggacgaatgtctggccacacagaaccaggcggccaaacagatcggtgcattgatgggtcagggacggcgcgacgaagccgaagccaaaaaagcggaagtcgcgtccctcaaggagcggtcgaacgcgctgaatgccgaattcaaagaggtttcggatgctcttcaggccgcgatcgtcaccctgccgaacttcccggccgacatcgtgcccgaaggcaaaacggcggaagacaatctggttgtgaaactggtcgaaagctatacgcaattgcccgaaaacccgctgccccactgggagctggcccgcaaatacgacatcatcgacttcgacctgggcgtaaagctcaccggcgcggggttccccgtttataagggacagggcgcccggttgcagcgtgcgctcatcaacttcttcctcgactgcaacacgcgggccgggtatctggaagtggagcctccggtcatggtcaatgaagcctccggcttcggcacgggacaactgcccgacaaggagggacagatgtaccatgccacggcggacaacttctacctcgttccgacggccgaagtgcccgtgacgaacatctaccgcgacgtgattctcgacgagaaggattttccggtgaagatgaccgcctacaccccctgtttccgccgcgaagccgggtcgtatggcaaggatgtgcgcggactgaaccgtctgcaccagttcgacaaggtggagatcgtacagttgagccttcccgaaaagagttacgaggcgctggacgggatggtggcccacgtcgaaagcatcgtcaaggcactggagctgccctaccgcatcctccgactctgcggcggcgacatgtccttcacctcggcgctgacttacgatttcgaggtatattccgaagcgcagaaacgctggctcgaagtgtcgtccgtgtcgaatttcgagtcgttccaggccaaccgcctgaaactccgctacaaggatgccgacaaaaagacgcggctggcacacacgctcaacggctcctcgctggccctgccccgcatcgtggcggccctgctggagaacaaccagacgcccgacggcatccggattcccgaagcgttaattccttatacgggctttgatatgattaaataaatttttatatttgcaccgtcaacacacaacttaaacaatacaaaaaaatggcttacaaaattagtcccgatttgtgcgtagcttgcggcacatgtatcgacgaatgtccggtagaggcaatctcggccggtgatgtttatgtaatcgatcctgacaagtgcatcgactgcggcacctgcgcaggcgtttgcccgagcgaagcgatcaagcccgaataattttacaagaaggcataaaaaagctcttccctcgaaaggaagagcttttttattgtctattcccaagtggatctgccgacacgcccgaaacccggggccgatccacccatacggcctgccgccggtcagggattcacaacagttttccagccgatttcaacggcagatcacgattccgccgaccgttaattcgatacgccccgaagcaccctcgaaagggatttcgcggaaaggtcgaaatacatcggacgatagcggcggggccgtgcatcacaggacatcgaaagacacgtgtacagggattttgccgcaaacgaacctttccgtttgcagaatctatctattatacttaatttagagcacagaaacatcgcgggagaagcgtagcccgcaatgtctaatgcctgtttcagcccgtgaaaggggaagctcgcggtacaatggccgcaagcattccggaagaggcgcgtggaaaaagatcgaaggcataccgttgcaggcgacgatcgttcaacctaaaacctacctgattatgaaagcacgtgcctatttatcgttaggagccttgctcctgttcttggccccgctgggctgttccgacaaagcggaaagtccggcaccggaagctccgcccacgccggagcccgaaaaaccggagtt

SEQ ID NO: 10414 - DNA, 17273 bp, Unknown
  gut microbiota DNA sequence
tatacagttcgatttcacaaggacagttcggattccgctcccaccgtttcagatcgttcaaccgttcttccaatgttttgtcgccgattcgttcggcataacgcactacttcgtcgtagtgctcctgacacataattttcatattgagttaaattacagggtgaatatttgaaaatcctattttagtttttccgccaagcgatcgatcaattcacggcatccgcacaatgacggggtacggaaacctcggctcacgcctttgcaatggatctgcgttcgggataaatcggcaatccgtctttgcagcatgccgagcgtccgggggtggatattgataccatatttgccgcacaaggcaataaagagttccgtttcgacgaatcctccctcccgaaaagcagcctcggcccgtttcaacgacgttctcagccgcgcttcctcttgccgctgtcgtcgtttttcccgttcgatccgcacttgttcccgtcttcggtcttccgcagcatacagttcgcgcatacgggcgcgatgccccttcaacggccgggcatcccaacccagcgcttcgtaggctgccacgtaagacgacggaatccattggcggctcgccatacggcgttgcacggcggctcgcaggttgcgagcttccgcagtccgcgcttcgatatattccttgcggagcattcctctgcgaaacatacttccggcttcgaaacaaacgtcgccgacacgcagtatgatgacaactatatcgttcgccttacggaaccggtcttttataatgggataccatccgacgtgttcgttcaggaaggtcacatcttcataggccgcgacgatccggtcatcccgacctgcggcctgacgcaataatttcactcgcatagtcgtatcgaggttttataggttcggcaattcgaccgtcaaaggttcgagataggtggccaaatgtctgataaactcccgtcggaacgatacgtcccgatcgcatcgtttccagagttcgtaaacatccatccgctcctgctcgatagcgcgggcgacagcacggccgtgccgcagatcgttctgccagacccccagaaaaaagagatagaggatttcctcctccaggcgttcgtagccctccttgcgcagcagtgtggtcaaaggtccgtattcctcctcatgaaaaatctgcggttggatattgctggacgcatggcagacgatcacccgccggtcggcggtgacgaagatgtttttgatgatttcgtggctcataatcggtaaattttatggtaaaacaaatgcgccccgtaatcgtcgctgattacggggcaaacggggcggaatgatattcagaggtcttgcagcatcatccgcaagacatcgaaaagctgtccgacttcgaggtcctgcaccggcacgcagcgatcccctccgtagtcgtacgacagacaggcatacaacacagcatgttttatctggaaagctgtgacatagcatttatcctggcgttcgtccgatgccggatattcgttgcccgaatcgaggctttggcccgtcatttcggaaacgattcctgtcatcagatcgacgaggcgtcggcggtgtattcggtcgatcgcctcgtatcgttccagtatcttatctctttccgtcgcggttcggctgtcggaaagtttcgcatcctccgttcggaggttctcgttcgggatttcctctcccgtgtagggattgaacagcgggctgtaggcgagcggttcggcttcgacagcgaagattccgcgctcggagtcgcagaaaagctccatcggaacgggcgtcgtcgcaacgacatgccgcgcttcggattcggaaagtccgcttcccgtcagcgaagcggcccggcgtcgaaaggtttcgggcgtcgaagactccgagagctgcaagtcgaacgtatcgccctcggtttcggtaacgatcagtgtgtcgtcattcataatgttatagggatttaatggatatggagtgtgggcggaacgtaacagacgatccgttcgtgccgaagatcgtcgtagagaatcttcacgggttgcgggacgttgtagatatggcaattggcgatcggcgcgtcgagcgcatcccactgctcctgcaacagaggtctctccgcagggcggtagcaccagacgaccagctgccggggcgaacgtcccggaaatacggtagctttgtagtcgtgcaggaacgtctggaacgctgcttcgtcgccgatctcccggccgttcgtgcggtaaagatcgctgccgtacggccgttcgatccgatagacatagagcctgcgccacgcctcggtcgtaaagtcgccatagagcggatcgggttcgcggtagctccaccccgcgacttcggcttcgaagcggatcgacccgttgccgcaaggtccgtcgtgaccccagattttgaaagaaccccgtcgggggccctcatagcggaatgcggcagccgcgacatgggtataggggcctccgctgctacagcactgtacgccgtctttcgtccgcgaggcgaagggatcgtaaggatagatacagacggtgagcatatcgtttctgtcgtaggcgatcaatgcactgccggcatagtcgccgtggcgggaaacgtatcgcacccgatcgccgcaatgcggcctgtcggcgctgcgtgtcgattcgatgtatttcttcatggcattgaccgcttcgacgtcctgctgtgtcaggccgtgttcgtggtcgtaaagcggattcaatgcccgtaacgtgtcgagggtataacagcccttcgtcggatcatgtgtcatggttcgttatcggtttagagattcgtaaacgaaaagcgaagaccggagcgtcgcggaacaacctcgaccgcctccgaatctgtcgggcagacgatctgtattatcccggacgtaccggttgcctcgggaagaacaccggtgcgcgacggcggcgcagcgacgggaaaataccgcaaggcggaggtatgccgacgccgaggatgattttcccgtccgcagccgacgagggcgcggcagcggccgtgcgcgtgccgagattccccgcaggcaaccggaggcgaaggaaaatcgaaaattacgtgttcttttcggtgtcttatcgctatatttgcaggcacccgaaacagaatctcgcaatggcactctaccgtttggaatccgaccgtacgcaaatcggaatcgatctcgatacgaaaacgcgcgacaacaacctgcgacaccccgactatgcccggcacgcgcagatcatgcgtcttgtttatgtccagtcgctgttaagcggccaaagcatcctgcaaacgattccctcgcttgccgaccactttccgcagctcgaccctttcaatccggagcatcaggcgtgcgtctgctgcatctgggatgcggcattcgatttgcaccgtcctccgcacgtgcgtatcggtcgcaccgactgcgcctatttcttcacggagagagcgtcctgcgaatattacaggaattacagcggcatgtcctcggcacagctatgcgaagtgcaagtcctcgaaacatacgaccgttttacaggggacatgcgctggctcgacgccatagacgagcgtacggccacggcccgcgacatagccgccgcagccgtgcgctactgggccggagagatgtccgccgatccgctccccgaggtgctgtttcaaggccggtacagactcacacctgttccgtaaaatgtagaagaatggataaaaaaacactgcgaatctttcgtccgggcctgtctactccgtgcgaagttcctctgtcgggcggcacggtcagggcggggttcccgtcgccggcggacgactttttggacatgccgctcgacctgaaccgtgagctggtgccgaatcctgcctcgacatttttcgtgcgtgtcgagggcgacagcatgacgggcgacggtatcggcgacggcgacctgctgatcgtcgatcgtgccgtcgagccttacgacggatgcatcgccgtctgttacgtggacggggagttcaccgtcaaacgggtcaagctggaagctgcgggggcctggctcctgccgtccaatcccgcatatccgcccattcgcgtcgatgccgacaacgaattctcgatctggggcgtggtgcgtcacgtcgtcaaaaccttcaaataacaccttcgatgtacggcctttgcgactgcaacaacttctacgcctcctgccagcgggtctttcgtcccgatcttgtcgggcgacccgtggttgtgctgtcgaacaacgacggctgcatcatcgcccgctcgaacgaagccaaagccctcggcatcggcatggggcagccgctctatcaggtacaggggcttatcgaccggcacggcgtggccgtcttttcggccaacttcgccctctacggcgatatgtcgcgccgtgtgatggcgacactccgcacgctcgtcccctccgtcgaggtgtactccatcgacgaggcatttttcgacctgcacggcatcgccgagccgttagacgactacggacgtcgcatcggccgcacgatacgccgcaacacgggcattcccgtgagcatcggcatcgcgccgaccaagactctggccaagatcgcctcgaagctggccaagcgctacccgaagctggacggctgctgttacatgcatcggcccgaggacatcgaaaaggtacttgcgacctttcccctgcacgaggtctggggtatcggacgccgctacggcaagctcttcgattcgatgcgcatcacgaccgcgcggcagttcgtcgagctgcccgaagagtggatacacaggcgcatggggattacgggtctgcggacgtggcgcgagttacagggcatcgagtgcatcggcttcgagcagatgccgcagcagaagcagcagatcaccgtttcgcgcagtttccccaaggagatttacgagcgggaggagctcgaacgcatcgtcgcggagttcgcttcgatgtgcgccgagaagctccgcgcccagcgtgctctctgcgggcagatacacggattcattttcaccaaccgccaccgggacgaccagccccagcgctatgaaacggccgtgctgaccttaaccgaacctaccgacagcacgctggagatcgtccggcaggcccgtgcagcgctgcggcaaatttatcgtccagggttcgggtacaaaaaagccggtgtgacactcgcgcagatcgtaccggcaacgggcgtgcagggcactctgttcgcaccgcccgacaaggggaagcacgcacgactgatggaggctctggatcgggtgaacaaggtctatggccggggcagcatcgtcatcgcggcacagggaaccgagccgttccgtatgaaccgcgaacatctctcgccgcgctatacgaccgactggcgggagctgctgaccgtaaagacgaaataggatggatcgcatcgaacgggaaaaacggacggtagagcggatgatacgcctttattgccgtcgcaaggagcacaacgcggagctgtgcgaggcgtgccgcagcctgttgtcctacgcctgccggcggttggaaacctgccgctacggccctctcaaaggctcctgcaaacagtgcacggttcattgctacgctccggcacagcgggaaaagattcgggccgtgatgcgctatgccgggccccggatgctgctgtatcatcccctcgaagccctgcggcatctgctgcggtaagtgatccgatccgtcgtcgaaaggcgatcgcccggatcacgtgttcaaggcggggttcagccgctccttgagtttggtattgcgtttcagcacggcctgattccggatggcgcaggcaagggctttcgtcgcaccgatcagaacgcagatcttcttggcccgtgtgatacccgtgtagatcaggttgcgctggagcatcacgtaatgggtcatcagcaccggcaggaccacgatcggatactccgatccctgcgccttgtggatcgtcgtggcgtaggccagcgtcagctcgtcgagctccgttacgtcgtactccacgctgcgaccgtcgaaatccaccgtcagcgtccggtcttccgtattcacgctctcgacatatcccaggtcgccgttgaaaacctccttatcgtagttgttgcgcacctgcatcacccggtctgcctggcggtaggtatagcctccgcgattcaggctcggccccgaagggttcagggccttctgcaacgacaggttcaggttggcggcacccacgatgccccgctgcatcggcgtgagaacctgaatcttgtccggccgctgtccataggcacgcggcaggcgctccttcaccagccgaacgaccgtggctgccacctgttcggggtcttcctccttcataaagaagaaatccgtatcgcggccgttgctcgtatcgggaaaacggccctgattgatggcgtgggcgctcatcacgatccggctcttctgtgcctgccggaagattcgcgtcaagcgcacgacgggaatcttctgcgagtcgatgatgtcgcggaggacattgcccgcaccgacgctcggcagctggtcgatgtcgcccacgagcaccagacgcatcgtcaccggaacggctttcatcaggttgttcatcagcaggatgtcgatcatcgagcattcgtccacgatcagggcgtcgccgtccagcggattttcgtcgccacgcttatagccgtcctgcggattgtattccagcagccggtggatggtcttggcatccatccccgtcgcttcgctcatgcgtttggccgcacgtcccgtaggcgccgccagcagaacgcgcagccccgccttctttaacgccgcgatgatgccctgcgtagtggtcgtcttacccgtgccggggccgcccgtgagcacaatgaccttggaggtcacggcctgccggatcgcggcgagctgcacgtcgtcgtagccgatgcccgtttctgcggtaagaacgccggggtcaagctccgtagtgaacaacgtgcggcccgcactctccgcgagctctttcagccgccgtgccgcgccgcactccgcatgatagaacgccggcaggtagatcgcctcccgctccgttatcaactcctcggagaggatcatccgctccaacgcttcgcagacgggtgccgcgtcggcttcgagcagcgtgcaggccgcttgcacgagttgttcccgttcggcatagacgtgtccctcgtccgagagttggccgagcgtgtaaaggatcccgctccggcaccggcgggcatcgttcttcccgtagcccatcttgccggcgatgccgtcggcggtcttgaagccgatgccccagatgtcgtcggcgaggcggtaaggattctcccgaaccttgtcgatactctccgagccgtactctcggtagatcttggcggcataggccgtgcttacgccgtagctttggagaaacagcatcacgttcttgatctccttctgccgctcccagctctcgcggatcttctccacgcgcttgcggccgatctgcggcacctcgtagagccgttcgatgtcggtttcgatcacttcgatcgtcgccgcaccgaatcgctggacgatcgcacgggcaaaacgggggccgatgcctttcaccagtccgctgccgaggtatttctcgatgccgtaaaccgtggcaggtatcgtctcctcccacgttgcggcaacgaactggctgccgtaacgtttgtccactttccactcgccccggcacagcaggacactccccacgggaacttccagcaggttgcccacgagcgtaaccagatcatcgtagccctttactttgactttcaataccgaatacccgttttcgggattctgataggtgatgcgttccaccacgcagcgaagagtcgtcataggcgtcttgcttacatcatcgaacaatgccaatactctgtaaaaatacgaaaaatcgcggaaacggcaataccgcaaccgctcccgatcccgacctgaaatgcagaaccgggagcgagcggcctgccggaatgcttcgcaatggatgctatcgtcgcgccagaacgactatttcagccgcgacatttgtccgcgcgaaccgctcctgcataggcgtacggtacagaacctcgaattgccgcagcgtttcctgtatgcccttggggcgctgtttgtcgatgaaaccgtgcggaagcagcaacacactccggtcgcccggctgttgtaccttcgcaagccacgaaaggaaatcgacgacctccgtcgtttcgaagggagggttggcaacgacgttctcgcaacggaaatcgatgtcccgatatggcccgatcagcgtttgcgtcacaggatacaggcgtgcgtaaaagtccgccagctcccggtcgacttccaatcccacgatctgcgagggatgcacgcttgcggcgatcaaggcccgggtgagctgtcccgtaccgcagcagacgtccatgatacggctgtcattctcgaaataccgcacggcaagggcggcgatccgccgggccgtagcatcgggcgtaaggtactgcgacaggcggacaccgcgtcgcttctgccgctcgcacagtgcgtcgtagggccagttatccccgtcgtagcggaacggcagttcaccgtgttgttgcaggtaatcgtgaatttcgcaaagcgtatccggccagataagcagccggtttttgaaatagctgttcgcaagcgcatagcgcttagcaattttttcaaatcgtttcataggtcttaattcaatttagcgtttcgttcgtttccgatgtcggaccgttgtcggcgatcatccggtaattgtcgtcgtctacactgtggattcggaccgtagcacgaccctcgttctcggacggagcgatctctcggatcgtttcgtagtgcgtttcgctctcctcgatttcgatcgcagcgtcgtcgcacgccgcagcgtaaagggacctgtgagcgatcgccgcagcttgcgcctccgctgtctcgatcgttgcggcctcgatggaaaagtagatgcgctcccacaccgagaccttcctgtcctcataaaatctgtacttggtcatagattagttcgtattgataattttaagccttctgctccggcatctcgatcggttcgacgtttcctatccgtgtgtcgggatgtataggaaagtcccaatccggacacgtgagctcgtcgagcgtcgtatggatgtcgccgcacgtcaggccgcatcgtcgtaaaacaagccgggcggcttccttgtcggaaaccgcccgaacggtgtaggctccttcgaacgtgtagcgtacacctactcgaaaattccgtttcatcctattaaaagctattccacatgccgttgtcgtagatatgcgcttcgaggtattgcatccccggctcacaggagacgatctcgatatgaagcgtcggatccttctccaacgtcttcatcatcgctgcgatcgcctcctcggggtagcaccatttcgagtcgaactccccgcgcatccagttatcgcggccgtcgaggtcgtacaggtcgaaccgatcgccgaggccgtagagaatcttttcgtagttcgcttcattgtccgtcgaacaatagaagcggttgatacatatattcgccatcgtaaaacaggtttgcgttcccgccgctttcaggcgggaacaggttacagtcgaatgttatgccaccggccgtcacaatagacgttccctttcagatagagcgtatagaagtcggtggagattatccgcagacacagcgaggagtccttgcgaaaatcctcggtcagcgtcataaagagcaggggcgggaaccgttcccgcgaaaggtagcgtcccgtagtttcagcatccgcagggtggtagtcatagacgtggaaatgcagaaacagccagcggacgatccggcggcgcgtgtcagcgctccggctcgacagccggaagcgatggacatacaggttgcgtatgaaatattccggaaagggtatcattcccgattcggaatcgttttgaaaaaggttcagcatttcggtctgtagcggttatctgaaagggccaggaagtcgtcgagcgtacaggggccgtaatcgagcgataccttttcctgaatcgtgcccgtttcgtagcggaaactgtagcagagaccgttacgctcgatagatcctctgtcccgatctttgttccacttgacatccgggagtttgtccaaccgcgatcgatgggcggcgatatgggcattgcgttctcgatcgaggtgttccaggtcgtgccatatcttagtcaggtagtccacccaaatattgaccttatgctcggataggacaccgatgcggtgcggtgccggatatttatcccggatatgagcctgcatatgaagatctacgtgcttgaaatccgaggtgtcgatgtcgatcgcataggtcggtttgggagaatactgcttattgatccgaaagaggattccgttgcgtcggaaacagatacggctctgttcgaacgtgcagtattccgtattttcattatagaaaacgccgtacaacagttccgcatcgggaatagtgggcaaaacttcctccaacaagccttgtgccctctgtatctccgaagtagttcgatagtcgggagtaagcgtcaagcgtgtaaagctcttctggtccatccagcatatcatcgcgcagacacccgcgtacggcaggattcgatttcccgtacatggtcgttcagaggaagtgtttccataacgcgacagttcccggccgctatgccgagcagcactgcgagcttcatacaggcggcagcttgtgtacgcgccgcaacgcggaagagatacatggcgtagccttccgccgaaatccgatagatgttcatggttcgaaacaatttggtgaatattcttattgtgtcgccagaccgaatgtcctgcatggtcggacgacggggcggaaactgcggcaggcggcccgtgcgacttttccgcgtgcgataccgttcgaagaagggaagatcgtgcgcggaaaaggcgataagggactgtgagcctgccgctaacttgccccgcgtccgaccgggacgatcctgtatcatgcataaaaaagcggacaaagagtccgacagcagccgattttgcctatatttgtttcataacgacccaataaaaatcgatatggaaaaattactcgaacagatcaacgatcgcatcgcagcatttcagaaggatgcatatcttcagtggttcaaaggcaacaattaggtaaacactattataatgtaaagaagcggttggaatatattatgttccagccgcttcctaattattttctttacataattttaggatttgtcatggatttcaaccactctttaatagatgtgttgtttacccaaatagcatcttctggtggaacaatttctttactggccgcttcaatagcttttattcgacgagaagcggataatcttgcatatatttcagttgtttgaatactggagtgacctaaaaaatcccgtataacgattagatccgttccattctcaaccatagccattgcagtagaatgtctgatcttatgagggctgcaatcctttgggatgagagatgaattcaccgtcctcgctttattcgcatattttgttagtaaatgattgatcccttgtcttgtaaacatttcatccgaatgatttacaaaaattggtttatccagattttgcgggagcatggatcggctttcttccaagtatttttcaagaatagatgccaagtgctgtacgattggcacatgccttattttatttccctttccatgtatagttatatgctttggagaactcattgaaatatcccgtccccttattttgattaattcactaactctgatgcctgttgcatacaacaatgagaacattgcataatctcttttccctttgtacgaagacctatctatctgagatagtaacagtttaatcccctccggtttaagataagatacgtctttaacaaaagattttttcattttaatattctgaatttgtattacattatcaaggcattcaggaagatcgtacttcaaaaaagaagagaaactcttaaaagcagcgagccgctggttacgtgtagacgttgatactttcttttcgcgctccagccacaagagaaatgattgcagattttgaacattgatatgcgttagttctattttctccggtcgtatattaaggtgattttccatgtagtcaataaattgtataaaagcatagcgatatgtttctattgtacgtgcagaacaacctcgatcattaactaaataatcacggaaataacggtaaagcgcaccggcaaaatcagttcgtttcatattagctatttttcaaatatttcatcaagatttttttcgaatttttccttgagatatggatacatgctgatagtcaatctcagataaccttccgtagcatagatactgtcatgtcccaggtaaacagacataattggcaaagcagcatacatatccatccctgaatcaataagttgtttaaaagactttacggcaaaagtgtggcgccaatcatgcactcgttttccgtatcgtccactacctctattcggtatgcctgcatgccgaagaatatcgtgatgtattgccgcaactgttgaagcagaaatattcttgccgtataaagaggagaatatatagtcatcatccaataaagcgtagaacgttttgtcggcaaatgctctcataagttctattaaactgtcggacataaccacataacgctgttttgagtttttagtctcggataattttatgatacctgcatctaaatcgacatcctttttctgaatctttatcgtttcggtcatacgtgttccacagcataacataattctgaataatacaggtaattggatcttatgctttctattttttatcggttcatatcgatccaatgcaacgaaatatttttcaatttcttcgtccgtataaatatgaggagtgaattttgatttagggtgtttgatgtctttaaattggaataccggaaatccttgtatgaacagatattcaaaaaatcgttttgttatattaattctgtcatattgtgtgctttttgattcattctcaagttgttgtttccatttgacggcttgatctctggaaaaagagatgttcgtaattccttcttggataaagaagttatcgaggttcttgagatgcacataatccggatacatatattttatcccgctattctctctataatctaagaacttggaaatatgttctgcaaaggctgaataataattaggtctacccatatgccacctcctttccttaatatgccatatggttataatagatactgcgtacaactggaatctgtaaactgcattttcttaattggtcaaagtcgatttgcaaatatgttttggttgtttcagcataactgtgccccatggtcatactgattatatagtatccagctccatgctttaacagatttgaagcaaagctatgccgaagagaatgaggaccatgtttctttttctgccaattcgaaatattcgaattcttaaaagcgccttccactatggaataaatcccgccggatgaaagccgtaaccctttacgtttagagtcatgtcgtacaataatcacatcatctccacccggaggccgtccgtatttcaaatattcaataatggcattaccgatagacggaataagaggataagaaaccggaatatctgttttttgttggttaaacaatatcgtgttcgattcccaatcgatgtgtttcaaactcaaactccggatatccgatgctctcataccatattctgaagccaatagtaaaataagataattccgtttccccaacggtgtacttctgtcaacggatgagattagatttttaatttcttcttcggtatatgttgtaggcagctttgatgcagcacgaatataaggctctttgagtatgaatattgataaatcccctttcgtaatacctgtttcatacaggtatcggtaaatgttgcgaagaacgcctttgtaccttactcggttggattttgattcggacgtaataaaatcttcaaaaagcgatgatgagacttccgccaaattaactcctcgtgcccataaaaaagaatcgaatttagttgcaacccgtttgtgggtttccactgtggacggtgtgaatttgagtgtcgatatgcaccagtcgatatacggataaaagacatcaccaagttttgtcttaaaaattttttggtgagagggtgtataattttcgaaatcttcatctctatatatcgacagaagcattcgaataacccgcagtttacgcctctgttctgatgttaaagatggggccagataacgtgtccctataaattcgtcacaaaattggaaggcattttcttcgttaaattctttaagaccttttttatcccaccatttttgtatgatacgacagattttcgaataatcataaaaagttccctgactataacctctgtcaatcaattcacatcgatatgcatcgataatttccgagatggatttattcgttttacacataacttgtagatttagaatttactaaagctacaaataattatgtaaagaaaataattaggaagcggctggaacataatatattccaaccgcttctttacattataatagtgtttacctaattgttgttatgtaaatattgacataacaacaaggcagccggacggagggctcgtaaagccgcattggagttgatggcgctgctcaaagagttccgcaaggcttccctcgaagcgggccggtagatcggatatatggtatttgtctatacctcctttcttcctgctgtcgtttcgtcgcttttacgaaatcggagaaaaagaccggccgcaaacggccggtcttgataagctgagatacaatgcgaatcacaggcgttggcccgtcgcatcgaagcggggagctttcgagagcctgtaccggatcttatggcgcacgagacgttcggcgagaagtaccagatcgtagaggctgtacatcatctgccgctggaaaactttcgccttgatctgtcgtttcaggcggtgctcgtccagctcgtcgcgcgtaatgccgagcacttcgcacacgccctcggctgacaggtacatcggacggtcgctgtgaccgcagagatattcgaaagccagaagccccttgccgagaatataatagctgcgcagaagacgttcgaactcctcttccccgatcagcagatacttcgtttcattgggattgttcggtcgatccataatcactgttccattgactgttcgggatgtttgaagttttctctctccaaacgggagaggtagtcatagatctccgtctgaaagtacaagcgccggcggcccacgttgaacccgacgagttctttgcgctcacgaaggcgctgcacctgacgggcactcaggtgaagcaccgagcaaacctcgttgaactccagaaccggtgtcccgaaaagcacgttgcgatggcgtctcaaaaattgaaggtccacggaaagcgtcttgaccattgcatgaatttccgcaaggcggagtttgtcgtctttatccataatcgagatagttggttacggtgcaaaggtgacaactcccgaccgatattctttgtaacttacactgttacttacatgaaatttccttgcggtgaatgatttttataatgattacgctatactgcgaatttgccgcccagccgggattcgacacgatcgatcgcatcctcgatcattatcggtgtagtctgcgcatagatctgtgtcgtggtgatctgtttatgtcccagcatcttggaaactgttgacaaaggaataccctgtgaaaggcagagtgtcgtggcaaacgtatgacgtgcgcagtgaaaggttatgtgccgtgagataccgcactgtttggtaatacgacgcaaggagcaattgatactgctaagtttcggcatgtcgaatgcaagcggtgacggagctgttccgcgatatttttccagaagacgcaaagccgcagggagaaatttgaccatatattctccacccgtcttgcaacggttaccgtgtatccacaggtgccccttggtgtccggtatgatttgttcacaggtcagatagcgcatgtctttgtagcagattcccgtaaaacaggaaaagagaaacaggtcgcggtggtattcgtgtttggcattcttcaatcgtgtcgtctgaaaaatccgcagttccttctcgctgagaaaagttctcggttccttcggagcggaataactgtagaaagcgaacggattacgcggcataagaccgttgttgaacgaaattttcaccacgttgttcaaacaatctatgtagcggcatgcgctgcccgccttcaaatggcagacagttttcaaatagacgtggtattgctcgatgaacgactgttccaattcgagcagcggaatatcgtggaggttgtactcgtgtttcagaaaggctcggagatgacccagcgacgcccgatagcgccaccaggtactttccgagcgatctacgccgatacgtttgaaaagatcattcgtgtaatgttcgaaaacatccacaagagtccggtatcgttcgcccatacccagccaggcattcttgaccttttcagccgtgacgtaggcatcgtgatcgcaaatcgactgatagtgtttgccgatctggatgcggatattgtccagatggcggttgatgcgttccgactcgacgcttttgcctttggctcggccgcctttaacctcccacagttgttccggaacgttgatcttggcactgaactgtgaaatcgtgccgttgaccgtgatgcggcccataaccggatagactgcacgcggggtgctctttgttcgtttgaggtagaacaagaccttgaaagtactgcgcataaactctgcttttttaagttggacaaaaataatttcggcagagtcgtccgacaagatgaatataaacgtaatagactgtaaataaccgttgtatgtaaccgcaagcatcccaaaacgaggtaatgatttggaaacgcaactctcggttatttatgcagaaagattcacattctctcgatatttcaataccgatatgatgaataacaatctgaatatcagttattatactttgatttgctttttatagatagccgttgtacttttgcagtgaaaagagcgtgcggaaactcaaacagatga

SEQ ID NO: 10415 - DNA, 7347 bp, Unknown
  gut microbiota DNA sequence
aaaagattgtgtgaacgtctcggaatgagacatgaaggatgtatgaaggaatttatctcgtttgtatgccatcccgacggcgcaccacgctatgaggacacctgcatctatgcgatattaaataaagaatggaaaagtaacagacaaagatgatgaatagacgaacatggattgccggcatcacggcaacaaccctgctggctgcttcattggcagcctgcaaacaggaacagcaaggagaggaaacgggacaggcattgcccgtcatggtggtttcttcccaacccattgaattggaagaaacctattccgcttcgattcgcggacgacaggatgtggacatcatacctcaagtatcgggtcgcatcatccgcctgtgcgtgaaagagggagagcaagtagcgacagggcaagtgctggctgtcattgaccaaacgccctatcaggctgcactgcgcatcgcaatcgccaatgtcagcgcggcacgggcaaaagtggaaacagcgcgtatcgagttgaacggcaaacagtcgctgttcgatgaaaaagtcatatccgattacgaactgtctgttgcccgaaaccaattagtagtggcacaggcagagctggaacaagcaaaagctcaggaagcaaatgcccggaacgagctgtcatacaccgaaatcaagagtccgagtaacggggttataggcacgctcccttaccgcgtcggcgcactcgtcggtcccaccatcgaacaaccgtttacagtggtgtcggacaattcggaaatgtatgcctatttctccatttcggaaaacaaacttaggcagttcgaggccagatatggttcgattgacagaatcatatgtgaaatgcctccgattagcctccaacttaacaatggttccgtctatgggaaacaagggaaaatagagaccatcagcggaatagtcaatcccacgaccggtgccgtacagataaaggccctgtttcccaacatcaacaggcatctgctgagcggaaccatcggcaacgtcatcctgcaagtgctgaatacggatgccatcctgattcccatgaccgccaccgtggaactacaggacaagattatcgcctaccgccttaaaaacggaaaggccgaagctgcctacctgaccgtagaccgcctgaacgacggcaaccacttcgttgtagagcagggcttgtccgtcggcgacaccctcatcaccgaaggtgtggggcagctaaaggaaggaatgattgtcacacctaaaaccacaaaaccatgaacctgcgtttcttcatagaccgaccggtattttcgggtgtcatctccgtggtgattgtcctgatgggcgttatcgccatacaagccctccccgtggagcaatatcccgacatcgccccgcccaccatcaacgtatgggctacctatcccggcgcgaatgccgagacggtgcagaaagccgtgattgttcctctggaagaggccatcaacggcgtggaggacatgacctacatgacctccacggcatccaatacaggcgatgcttccatcaacatctatttcaagcagggtgccaacgccgacatggcggcggtcaatgtgcagaaccgggtgaacggcgtgttgagccagcttccggcagaagcgaccaagaccggcgtcaccaccgagaagcagcagaacgccgagttgctgacattcgccctctatagccccgacaaccgtttcgaccagacctttctcaacaattacgtgaagattaacgtggagccgcgattgaaacgtatcggcggtgtgggaaaggcacaactgttcggttccaactacagtatgcgcctctggttgcgccccgacaagatggcacagtacggactgattcccgatgacatctcctccgtgctggcgaagcagaacatcgaggcggcaaccggttcgttcggagccaatcaccccacggcaaacgaatacacgatgaagtatcgcggccgcctctccacagcggaagagttcggcgagctggtcatcaagtccctgcccgggggtgatgtgttgcggctgaaagatgtcgccgacgtggagttgggcgatgaatactacagctattccaccgaagtgaacggacatccggctgccttcatgctcatcaaccagaaagcgggctccaacgcttcaagcaccatcaatgagattcacgaggtgctcgatgaaattgaacgcgacctgccggaaggtgcggagtttgtggtgctgaccgataccaacaagttcctgtatgcctccatcaattctgtcatacggacgcttatcgaggcgatacttctggttatcgtggtggtgtatgtgttcttgcaggacatcaagtccacgctcattcccacggtttccatcttcgtctccatcatcggcacgtttgccgtgatgtcgctgataggcttttccatcaacctgctcacgcttttcgcccttgtgcttgccatcggcacggtggtggacgatgccatcgtggtggtggaggcggtgcaggcgaagttcgacgaaggctaccagtcgccggtacttgccgccgatgatgccatgaagggcgtttcgtccgccattctcacctctaccattatctttatggcggtgtttatccctgtggcaatgatgggcggcacttccggggcgttctatgcccagttcggtatcacgatggcggttgccgtgggcatatcggctatcaatgcgttcaccctttctccggcgttgtgtgctttgttcctgaaaccttatatcgacgagcacggaaacacgaagaacaattttgcggcacgcttccgtaaggcatttaatgccgtattcgagcgtctgagccgccgttatgtgcgtggtgtactgtatatcatccattgccgatggttgctgtggggaacgattgccgcctcgttcgggttgctggtcttgctggtcaatatcacgaagacaggacttattccgcaggaagacaccggcacggtgatggtaagcatgaacacaaagcccggctcctccatggcgcagaccaacaaggtgatggcgcgtatcaacaaccgtcttgacagcatctctgagattgagtacagcggagcggtcggaggattctcattcagcggttccggtccttcacaggcaatgtatttcatgacacttaaagattggaaccaacgcaaggatgaagggcaatcggtggatgacgtgataggcaagatttatgccgctaccgctgatgttcccgatgccacggtgtttgccatgtcaccgccgatgattgccggctacggcatgggcaacggttttgaactctacttgcaggacaaaacgggcggagacgttgccgcattcaagaaggaggctgataaatttgtagaggcactgtcccgccgtcccgaaatcggagaggtctattcgtcttttgccgcagactatcctcagtattgggtggatattgacgcggcgaaatgcgagcagtcgggcgtatctcctgccgatgtgttgtccacgctttccgggtattataccgggtcgtatgtatcggacttcaaccgtttctccaaactctatcacgtcactatgcaggcaccggcggagtaccgcatcaatacggagtcgctcaacctgatgtacgtgcgtacttccgatggcagcatggcaccgctgagccagttcgtgcgcctgaccaagaccaacggaccttccgaccttacgcgcttcaaccttttcaatgccatcgccatcaacggctctccggcatcgggctacagttccggtcaggccatcaaggcgattggcgagacggcacgtgaggtgcttcctgccacttgcagctacgagttcgggggattatcgcgtgaggagagcaagaccaccaacaatgccgcaatgatattcatgctctgtatggtcttgatatacctgatactgtgcgccctctacgaaagcgtgttcatcccgtttgccgtgttgctgtccgtgccttgcggactgatgggcagcttcctgttcgcatggatgttcggattggagaacaacatttatatgcagaccggactgatcatgattatcggactgcttgccaagaccgccattctgctgaccgaatatgctggtaagcgacggtcggaaggcatgacattggcacaggcggcatacagcgcggcaaaggttcgcctgcgccctatcctgatgaccgtcttgtcgatggtgttcggtcttattccgctgatgatggcccatggcgtgggtgccaatggcagccgctcgcttgccacaggtgtaataggcggcatgatagtgggtacattggcattgctgttcctcgtgccgtcgctgttcatcacatttcaatacattcaagaacgagttaaacgtaattaaatgaagaagacaaccatatttatattatcaactttgatgcttaccggctgcggcacatacagccggtatcatcgggctggcatccggacagaaaatctgtattggaacttatctgttgatattgatacaacaaacatcgcctccatgtcatggcgggagatgttcaccgaccgggaacttcagtctttgattgaggcaggacttgagcaaaatacagacctcaatgtggcacgcctgcgggttgaagcggctgaggcagctttgatgacggcaaaactgtcctatctcccttcattgggaatcaatgccgaaggtggtggtagccgctacgatggggcgaccgcaaagacatacaatgtcggggcgaccgcaagttgggaactggatatattcggtaaattcacggctgcgaagcgtggcgcggttgtcgcatggcagggaagtcgtgactatcagcaagccgtacagacacaactcatcgccacgatagcagacagttattatacacttgccttgcttgacgaacaaatgtctataaacaatcggactttggaaaactggcgggctaccgtgcgcacactcgaagcgttgaaaaaggtgggcaaggcgaatgaagccggggtattgcaggcaaaggcaaacgtgatgcaacttgaatcatcgcaactggctatatgcaaaagtgtctctgaaacagagaatgctttgtctgcgatacttgccatgccttcgcaaccgattgaacggagtagcctggacgaagcatccttccctgatactatctctatcggagttcctttgcagttgctttccaatcgtcccgatgtgcgtcaggctgaaatggaactggcacaagcgttttacgccacccatgtagcccgctctgccttctaccccaatatcactctttcgggcacattgggttggactaacaatggaggtggagcaatcaccaatcccggacaatggttgttcaacgccatcggttccctgacacaaccgctattcaaccgtggcacgaatatcgccaacttgaagattgcacaaactaaacaggaagaagccaaattattattccaacagtcattgctgaacgcaggaaaggaggtgaacgatgcattaaccacctggcagacggctaagtcgcaatatgagataaacacccggcaggttgaaaccttgcgtgaagctgtgcgaaagacagaactgctgatgagccattcttccaccagctatctggaagtgcttacaacacaacaatccctgctgagcgcagaacaagcacaggcgcaggacaggtttggcgagatacagggaatcatcaacctctaccatgctttgggtggaggatgcaggtaaaaaacgaagcggcgcttcgcaattatcaaagtcagacattgacaaatcaagggtgaaagaaaaggaaataagaggcactgcccatgagtcaaagaaatttgcgggctgtttgataaaaagaatatatgaatgaaactgaatttcatgagtacgagatttctccgcatactggttgccgctggttacctgttgatgtgcctgttggcaggtgggatcatgtatctgtggcattatgaatggaaagagattgaggcattggaaacggagaaccaacggataaacaacttccgccaagaaatacatcatgtttacggtgaaatgaccgggctttctcttttgggcgaaagtgtgttggagtgggaagacgaggatttggagcattaccatattcggcgtatggcagtggacagtatgctatgccgtttcaaaacggtttatccagcaagacaaatagacagtgtgcgccacttgttggaaagcaaggaaaggttacttcagggcattgtggaagtattagatgaacaggaaagtttgaaccagaggattgccgagcgtgtacccgtcattgcggcaagaagcgcacaggaacaaccacagaagtcgaaacgtaaaggtttcttaggtttgtttggcaaaaaagaaaagccgaaaacaaccgccacgactaacatgctccatgcactgaacagcaaggagatagcacaacaacaggcacaaagccgccgtttagcagcacaaaccaacagcctcgccatgcgtaacaataagctgaaccgacaactgcaatcgcttatcgggcagatggacaggaaaatagaaagtgacttgcaagggcgtgagatggaaataaccgccatgcgtgaacgttcgttcctgcaaatcggcagtctgacaggttgtctctttcttcttttggttgtttcttatatcattattcacagggatatacgccgtattatacggtataaatcaaagacagtcagcctgataaagcaactctatgaatcagatatgcaaaacaaggaactgatttcctcccgcaagaaagccatgcacaccattacccatgaactgcgcacaccgctgacagccatacacggctatgcggaactgatacaaggacacgatacggacaacataagccgctatgcagaaagtatcttacaggcagccggtaggatgattgccatgttgaacacattacttgactttttccggctggatagtggaaaggagaatgcgaatagcgccccgtttcgattgcagggcatggcagacgctttattgacagaatttattcctttggcggaagcaaaagacttgcgttttacggtggaatgttgcgatgatgttatcctgatgggtgacaaggagcgcatcatgcaggtctgcggcaatcttttatccaatgctgtcaagttcacgcaaagcggaaacgtatcgtttcgtatggaatataacggtagtgttctttctattgtagttgaagatacaggcaacggaatgagtggagaagaacagcaacgtgtgtttggtgcatttgaacgtctctccaatgccgccacacaggacggtttcggattgggcttgtcgatagtgaaacg

SEQ ID NO: 10416 - DNA, 560 bp, Unknown
  gut microbiota DNA sequence
tgtatcttcacccagaccagcttgtcctgcattttctccaggacggcttctttgaaacaggagcgcaggatgtccggaaggtttttcttccaggaactgtcaaatggaaaggattgcgataccttcaagaaatgtttgctgtaaatatccatgacttccctgtctatgacggacatcacatcgtagttctggaaaaaggcacgggtcggctcttccggtatggttgtcctttcatggatgcctcgttccatcacaaccggcttcccctctacggaccattccgtacaggggagcaggagcagatattcatagctctccatgaggtttgggaaatccagatagaaggaaaagtcctcaaggtcggaaatggattcatccaccgccacccctaaccagacggtacgtggaggcatccttgtttccgtacgggcaatcatggtcttttccaaggttggggctatccggtagagaaggtcgtcgcagaccatatatttcacatcggctttgtgcagaagggtatcgcaggcaggataaaacgacacgcttccggtcgatagttt

SEQ ID NO: 10417 - DNA, 120994 bp, Unknown
  gut microbiota DNA sequence
agccgatgatataaaaaacgatgagtatgatcggaaaaataagggaaagtctgctggttaactcaaattgaaggaattaaatgactatccctaatatagctgataatctgaataattcatttgtcgggttagtgttcatatcatttgaggcttgttgtctacaaagataatgaattgcaattaattatttaggaaagcacttacatatttctcacaaaatcccgctaacgggaatctcactacctcgtcccgtccatcgggtgtgacgtattggaataggattgtatcggctttcacgtggtagtcaaacaaattcaccttttcgcccgttccctcaatttgtgcctcgttagccgtcattgtgccgattattccgtccatatcttcgagttcgcattttcatccgaatatgtattgtcggttctttgtaaggataatttcgacgggctttgttatgtctgccatattaggggcaaacaggtaaataaatgtttcgggaaatatttcgtctttgggttttcctacaagcaggactattccctctgtttggctccatttaaccgccttttgaattatctgcttatcctctcatgcgtcggtctttcattctgttttaggttgtttgtatctgttcattttagctaaaatttaattgttatttatctttataaagataagattattagcggaataaacaaaataagaaagtgacaaactctgcaaaagggtcttataaattaaccttttcacaaagtctgtcactattagaaacctttgttattttgctgcttcaaggcaagcaatcagaaatttattcgcatagatgaagttatccttttgtatcggcaatgatgcgatggctttttctccatgaaatagattgttacggtatctgtaaataatcatgatgatggctttaataatatcacatgaattattggtttgccctaataaaacacgctgaacagaggtcgtatcatcattatttctcaatcgcaatctcttgaatcgctcgtttgtagaaccgttcgttatatatctcctttgtaagtattgtagtgtttgattaacaatatcggacgctaaatgtatgttttggatattgcacttatttcttccgaaattacatttgaaccatttcgcttcaaatatattccataatattaagaaattccgaacttccacgtattcctcggtattgatagaaatgtgtaaataattgtcaatccattgtgatatttcagacgtatttttacttttattttccataatgccgaaatgcttttattcatctaatcccgtaatgcttgcaaagtttttccatcctgttgcggctttataagcattggcacaacccgaaggcactttcagtaccgaataaggatttatgccgacaaaagcattgttttcacaagttggtggcgtttccgtgctgactttgaataatcgcagttcgggatcattgtaaaaggcacattcttcgattatctcaacctgtgtacaagcagacatatcgacggtcattagattcttcaattcactgaaagcaccataaatataacgatacccaacattagtatcaaatcctcccccgataattttcaactgagaacctttttcaaaggttacggttgtcaatttggaacaacgcttgaatgctgtcgcttcaatcgtttctacacttgcaggaatctcaatggaggtcaaggaagaacaacccaagaaagcgccataataataagaagaagaataacctcccccgataattttcaactgagaacctttctcaaaggttacggttgccaatttggaacaaactctgaatgctgtcgcttcaatagtttctacacttgcaggaatctcgatagaagtcaatgccgtacaatccgagaaagcgccatcataagaatcaccagcgatagttttcagttgagaacctttctcaaaggttactgtcgctaatgacgaacaatgcatgaatgccttcttttcaatagtttctacacttgcaggaatctcaatagaggtcaaggatgtgcatctataataagcattattgccgatggttttaagtcgagaccctttctcaaaagttacggttgctaaagatgaacaatctgagaatgccgtatttccaatcgtttccacacttgctggaatctcaatagaggtcaatgcagtacaatccgagaaagcaccataataataatcgccaccgatagttttcagttgagactctttttcaaaggttacagttgttagagaggaacatctcttgaatgcagaatatccaactgttgttacatttgtagggattacaacacttctgaggtcgctttgataaaacatttcttccccaatcgttattaatgtatttgggagaatcagatgctcgacattttttgaattataaaatgcctgtgtcggcaatgccgtaatatttacctctgcaatatcgaggtttttcagattgggcatcatgcgatagataaacaagaaatcgacatcattcagcacacccgtgattttcaacgattcgatattggcataatcataatccgccaattcattttccagttcacctttcgtttcgacatgtatttcggtacacattcccaattgtcgaaagataatcgtttgcaggatattcccttgttcatcctttaaggcaaccgttgcatagcgttgaatcccttcgttagcagttacctcaaaaacaatcgtatcttcccgcatggctcgtgtttcgggagccaacgacaaccatgattttgcattgtcgggaatctcaacggtataatccaaattcgttgtcaatttgatttcctgtgtacccccagcaggagtagcatcaatagagttatctgctatattgatttgcccctgcatacaattcaaagataccataacagtacgataggaaccgtcattagcaaacacaaggatttcgctctcaacaatcggattaggagcggtaatcgtaatcgtccccttatccgtggaggtagcatttactttgactttccaaccatcctgtgcaatggctttgacaaccgtattttcggttgcatccgtaatcgtgtaggagattgttttgctctctcctccattaagaatggctatatccgttgtatcgaatgcaattgcaaactttgaattatcgcttttaggaatcgtgataacagaatcgtcctccaatgtgaaatagacattatcatcatcttctcttacacttttgaagatgccattcgttccgtccttgccatcgacaccatcttctccatccgtcccgtcttctccatcttctccgtcttttccatcggctcccgttgcttgccctatatccgtccaagttttaccattatccattgaaagcatccagcgaccattttctattttcagttgcggtgtaattccatcctttccgtcttttccattcgttccatctacaccatcttctccgtccacaccgtcatttccatcctcgccatcaactccgtccttgccgtctgttccttgtgcctttaccttatttcccttttcatcggtcagccattcaccatcaagtgtccaataatagatgccgtccgtgtctttcttcacaccaataataggagcgtcctcgctatttttcccgtttttaattgtagcagtagaaccatctgaaaagtggataatgtaaccatcggatatttgttcaactttggaaatagacaaattatcctgcaatgcttctacaatcttctgcaacgatgaaatattcgtgttcatctgtttgcagagttcctccaatttcgttacacgattttcgaggtcattcaaatcattgcgcaatgcgctgtcgtcgtacttatcgctacacccaaatagcaacaagccgcaaaacacaagagatagtagttttttcataaatagaaaacattaaatgaaagggcgacagagattctgcaaaccttgttggccgtgcgggctaaaaaactgaaaatcaaaaatgcaagccagacaatccatgtgaaactgactgactgcatcggaaagtacaaccttatttcgctgacacagcacatcgaaataaatggcgttcttttccgtgaccccgaagtgatttttgcttttaacaccattaaacggcagtttatcccttaccactacatcaacgatttttttgaaatcgagaaatgttgcgccacaccgacggtagagggattaatacctcgcaacgaaatagaccaacacaatttaacatgtttcgtaaaccgttggctgttgcaactaacctcaaaactggaaatccaatggatgcacaacgaatagtacagaattgtgttttgaagaatcaaagcacggttatcgaggaaatgatacgggcaaaccttatttccgaagaatatctttatccgttcgtggatgatgttatggaatggtggctgattgattcttggctggccgaacgactgaaagagcagggcgaggttatcatcgaggaatacggttgctactggtggggcagacaatccagcggacaggctatttacatggacggcgtaatacaagaaatctgcgggaacgattaacccaacttacaactaacaaagtttcgattccatactccccactattggatagaaactttgtttttcagaaatttgatacggcaacaatcccgaaaagcgggataaggtcattgcgttttcagaatatgttttttacctttgtggatgacatattgaaatttacggaagcgtaagtttattctcggatagtgaacgtaggaaattcattgaacatgagaataggcagaccttatctcccgtcatatcctttacggatacggcgcggggttgttgcttatttgaatgttcgggcaatcctacggcctactatcctcaaatgagctttcagccctgcgctttcttattaccattaacttgccgtttgagggatgggacggcacatatatttttctattatgtgtcaaatgccaactgaatttgtaatccaaaagattgtgaattgtaactcagagtcacaaacactaaatgccatactttgtaaacggcatgatcctacacgtgtttttaatgcgataatccaactatcggaggctaatgggaatgaggtaaatattgtttcatctaatgaaaacttttccgatgtgacaggccattttgtcccatgctatttacctgatgggaaatcattctcagatttatccgtcaaagaaatattaacagctatctttcatttatgacaagccataataaaaatcacaagacatgaaatctttgttgttacttataatattaatgtttcaggcattcattttacatgctcaaacagaaaccattgatggttttgaattaggaggtagtagaattactgcgattggagccattggtcaaaaatcgggatacaaatatcaaaattcaagcacctatgataatggtgtaaaatggattgaatatgtaagaggcgatgttcgaaaacccccacattctacttatgatttatatttcatagatgataaattgaccaaactcgaatattatacatctggattcaacagtaacatggttgaagataaatatatggatttagttgtgacttatggagaaccgctaataacaggcaattcttctgttttatggaaaacacctacactaaaaattaagttctcatacggcacaggtgataatagcactccatttgcagcggccacatatcaatattattactactcgatagcatacgaatacatagcttcaacacaaacacaatctaaacaacagcgaccaatatcctcaggaacggaaaaacaatacacctcgtcgggtagcggttttgttattgccacaaatggcattatcgtcactaatttccatgttgtagacggagccaatggaatcgacgtgttcgtaaatagaaacggagaggttaaaacgtacaatgctaaagtactcatttcagataaagcaaacgatattagcattctaaaaatcgaggataaatcatttacaaattttgcacaactcccatatgcagtaaaaacacctatccttgatgtcggaacaagtgtgtttgcattaggttatcccatgtcagatatattaggagaagaaataaaagttacggatggcattataagttcaaaaacaggctatcaaggcgatgttgtaacttatcaaatttctgttcccatacagcctggcaatagtggcggcccattgtttgataaaaacggcaatttagttggcatcacaaatgcgggtgttcccgatgctcaaaatgttggatatgcaatcaaagtttcttatttaaagaatttattagattctgccccgacaccgattattctaccatctgttaataaaataaatatttcataaaaaaaggcaatacaaaatcactatttatatataatgtacttcttcacctgcggccaaccccgaaaaaaaacagacagacatgttaccggagagaaagagaaaagcggcaaaaaagagagggtacgacgtaagaacagattcccgcctccgccataacaattcgacgcggagtatccccgcgcatatccggagctacgacaacaacggccggagcggggctgtaacaccctcgaacacggagccgcaacaaaagacccgattacaggttatacattacatcgggaccagaaacggtcatagcaaagaatccgaccaatatgatcggactccaatatttttcgcaaagacaatagagatgagtttacatatccatcccgaaccctaacacttgcggcagaacagtcgaagcggtagtaaatatatcgaccgaagttcccgcgatccgcagcagaaaacacggccgacgcgaccgattttcagcttgcacccacgttcagccccttcctgcgccgaacaagagcaagagaacatgcacggaaaatcctattttccgcttttcgactctatattcggcaaaaaaccggtgataacacccaacaggggcaacagcgtgctgacctgaaaaataaactcgatactcgtccggtccgccagccagccgaaaaacgccgaaccgagaccgcccagcccgaacatcaggccgaaaaagactccggcgatcatccccaccttgccgggcatcagatcggtggcataaaccagaatggcggaaaaggccgacgaaatgaccagcccgatcactacggacagcacgacggtcgcagccaaaccgacgtagggtagcagcagggtaaaaggcgcagcccccagaatcgaaccccaaatcacatatttgcgtccgatgcggtcgcccagcggtcctccgatgaacgtacccgcagccgaagccgcaagaaaagcgaaaagacaatattgcgcaccttgcaccgatacggcgaacttgtccatcaggaaaaacgtaaagtaactcgtcatcgaagcgatgtagaaatacttcgaaaagaccagaatgcccagaatgacgagggccgtgtggattttccgccgcggcaggctgtgcgcgaaagccgtttccgcagcgtcgggcctgcgaaccgcgatcgccagccggcgtttgtaccagtcgccgatccttacgaggataaaaatcgccagcaatgccgtcagagcgaaccaaccgatcgacgactgtccgaacggaatgacgatcaacgcggccaacaggggccccatagcgcttccggcatttccgccgacctggaagatcgactgtgccagtcccttacggccgcccgaggcaagttgcgccacccgcgaggattcgggatggaacaccgacgaaccgcagccgatcagccccaccgcaatcagaatccagacaaaacccggcgcgaaggcaagcaccagcagcccggccagcgtgaaacacataccgccggccagcgagtaggggcggggatgacggtcggcgagcagaccggccaccggctgcaacagcgacgaagtgagttgaaagaccaatgtaatgaggccgatctgggcgaacgtaaaatcgaacttctccttgagaagcggataaaccgccgggatcaccgactgcatcatatcgttcaacagatgggtgatactgaccatcaacaaaatagggtaaaccgtccggctcgtcagggagcggtatgatcgtacggatttggctgcggtattcataggttacggttcttgcaggatgacagcgatcgtttccaacgctttccgaggctcttgggcgacgacattccgcaacagccgttcatgcgtggattgggaggcgagcagacaaccggtatccgtataaatgtgttcgagtcgtttctgcaaatgcacggaggccgcacgatagagttcgtgcaatatttcgttatgcgtagcctcggacagagccacgtggaaatcgacatcggccgcgatacagtcgttcaatcgtccggctgcggcggccgcaccgcgccgggcgaggtgtgtcccgatcttttcgatatccgcctgcgtacgtcgctgcgcggcccgttcgacaatggcgacctccagaatccgccggacctcctccagatcgccgatgtcggcacgttgcatgcaccgctccatcgactcgttccgtgccgtccggctttcgacgaacgtcccggccccctgctgcactttcagcaaccccatgttggccaagatcttcacggcttcgcgcaccgtcgaacggccgaccccgaaaattttcatcaattcggattcggtcggcaacttcccgccgacctcgaaccgtccctgcgcgatctgctcctgcaaccggacggccatctcttcggccaacgatctttttcgaatcgtcgtatccgtactctctatcatcacatcatctgatgtttgtgcaaaaataacggatttttcaaaaataaaaaaattatttgcatattcgaatattgttcgtatatttacgaacacaagatccgaaaatatgtccccaaaagcctataccgaacaagaggaacagctggcccgtttcgccaaagcgatggggcatccggcacgcatggcgattctgcggttcctcgccggacaggatagctgttttttcggagacatacacgaagtgctgcccatcgccaaagccaccgtatcgcaacacctcaaagagttgaaagccgccggattgatccagggagaaatcgaagctccgaaagtacgttattgcatcaatcgggagaattgggcgaaagcccgtgaatcgttcgcggattttttctgcgaatacagaaagaaaggttcctgttgcggttgaaaccgctttttttagggaaaatgttcgtaattcgtcgaactacatttaataatagaaacagatatggagatcaaagtattgggaacggggtgtaccggatgtcggacactctacgaaacggtaacgcaggccatagccgaattgggtatttcggccgcaatagttaaggaagaagacattacagaaatcctctcttacggtgtaatgacactgcccggattggtcgtggatggcagggtggtttcggccggacgcaagctttcgctcgcagaggtcaaagagttgttgaaccgatgaaagcggccactcttctcctcgccgcagcgctgttgtacgcatgcggcggttcccggcaccgcataacggttgaagctgtcgccgacgactgcgtacagattctctatttccacgggaaacagcgttgtgccacctgtaccgccatcgaacggctgacccgggaggtcatcgacagtatcggaagcgaaaaagtggtccttcggatcatcgacatcgccgagaacgaagccttggccgaccgataccaagccgggtggtcggcgctgatcctcgaccgaaacggccgggtggaaaacctgacccgcatgggattcagctatgccaaagaccgacccgccacattcaaagcccggcttaacgatgcaataacccgaatgtcaaaataatcttatggaatggattcaacgactgctcgagagcggcacgacaccgatcgttacggcattccttctgggtttgctcaccgcaatcagcccctgtccgctggcgacgaacatcgccgccgtcggattcatcggcaaggatatcgacgacaaacaccgtgttttctgcaacggattgctctacactgccgggcgaattctcacgtatgcaggaatcgggttggcattcattcccttgctgcgcgaaggggcaaacacctacgccctgcaaaaaatcatcggcaaatacggcgatgcgatcgtcgctccggcacttattctgatcgggctgttcatgcttttcggccacaggttgaacctgccgaaattcggattttcgggccattgcgaaaagatcggccgtcacggaagctggggtgcattgctgttaggtattctcttttcgctggcattctgtccctcgagcggagttttctacttcggaatgttgatcccgatggcggcagccgaaccgggcggctggtttctgcctgtcgtatttgctattgcgaccggtatgccggtggtcatcgcagcctgggtactggcttacagcgcggcaggagtgggcctcttctacgggcgaatgcagataatccgaaaatggctcgcacgcaccgtcgggatgctgtttatcgctgtgggtatctattattggataatatattttttctaaaaagattatgaaaaaggaagatgaactcaaagagctggtcaagcggcgttacgacgaactcgctttgaacagcgacagtctgaaatgcggatgctgccgcagcacggctccggcacaaccctcgcagaacgtttttaccatcatgagcgaagactactcccgtctgaacggttatgaacccgatgcggatctgggggtaggatgcggactacccacccgatatgcccggatcaaaccaggcgatacggtcatcgacctgggatcaggggcaggaaacgactgtttcatagcccgagccgaaacaggcgcggacggcaaagtcatcggaatagacttttccccgcaaatgctcgccaaagcccgggccaatgccgcgaagcggggctgcgacaatgtcgaattcagggaaggcgacatcgaaaacatgccggtacgaaacgacacggcagatgtcgtggtcagcaattgcgttctgaaccttctaccgaggaaagaccgcattttcaaagagatccggcgagttctgaaacccggcggacatttctgcgtttccgatgtggtattacagggaatcttcccgaaagaatttaccgacaatgccgcgatgtatgccggctgtatcgcaagcgccatccaacaggaagattacctgaccgagatccgcaaggccggcttcgcggacatacggatcgaaagaaccaagaaaatcgccattccggacgaggtgctccaggcacatctggatgcagacacgattcaaaaatacaaggccggaaatgtgggaatctattcaatcacggtcacggggcaaaaacggacctgactcttctgaataactcggacggacacagaccatacggaagagtatcggccgacgcaatacgggcactccgctgacggtttcccggacacgaatacgaatccccgcatcgttcgcttcgaatccggcacgccgtaagttcggtccgacgaaggcccgggcaacagtgcagcgacagttgcccgtggacatcgacgattcggccccacacgctgatcggacaacataaaccccgcccagccctggaaaacaaaagccgggtgccttttacagcatccggctcgaatggatatcgttcgggacctttcggacgaacggcagggcagcggcatttctcgtacacgctatcccgcaacggatcattcgtaattgatcagatattcgaccgtttcaggatcgtaatgcgacaggaaaaggctctccttccgatcgagaaccgcaatggagtgtatatcctcggcggataattcgaaatcgaatacatcgaaattttcagccatacgctccgcatgcgtcgatttcggaataacgacgatcccgcgctgaatcaggaaacgcagcgccgtctgggctacggttttaccatacttttccccgatcgtccgaagcgttccgttcgtaaagaatccgttgcggccctcggcgaacgggccccacgacataagctgcgtcccgtacctgcgcatgatctcctgcaaaacgacctgctggcagaaaacatgagtttccatctgattgacagccggctttatttcacagaacgcagccagatcgacataacggtcggggtaaaagttcgaaactccgatcgccctcgccttgccgacccgacaagcctcttccatcgcccgataagtgccgtaatagtcgttgaaaggctggtgaataagcaacaggtccacatacgaggtctgtaacttgcgcagcgactcgtcgatggacgctttcgccttttcatagccgccgttggttatccacactttggtcgtgatgaaaaactcctcgcggggaatcccgctcttccggacggcacggcctacaccttcctcattgtggtaagcctgtgccgtatcgatcgaacggtagccgatcttaatggcatccgaaacgcaacgctcgcactcctcgggagtcacctgatagacgccgtaacccagaatgggcatctcgacgccgttgtttaattttacatattccatatcaccacaattattgaaactaacctcgttccggaatcacttcgttcaggcaggcgatcgcattgagcgtacggggataaccgatatagggcaatagctgcgttacaaccgccagcagcacgtctttgtcgttgccgacattcacattaccccgaatatgtcccttgacctgcggctcgcaaccgcccaacgacacgagcatcgaaaaagtcagcaattcacgcgttcggacatccaatccggtgcgtgtctgatagtcgccgaaacagttgccggaaagcgcacgttgaatatgcagttggttggccggagaggtttcatacatccgttcgatttcgtctccgaaaatctccttttgcagagccaaccccttctccattctcgtttcgggcgtagtaatggcctgcggctccaaaggcggttcgacaccgtttttccggaaaaaatcgttcgtcaatgcaatataatcgaccactttggccataccgacataagggacggcctgatagagtacttcccgaatcgcaacgggtgcgaccccgttggccaatgccgcccgcagcgtcatttcataggtggcggcagcctgctgcgcaagggaggaggccatcgtcaccagaacacgggttttgacatccagtttcccgtaacgctgcacttcgtcgaaagcgaaattaccgaatacttcggccagttcggggtccgtcttcacaaatgcaggcgcctcgccgggaaaccacatctccgcgttttttacggcagcggccgaaagtccgggccggcaccaggacatcgccgtagccgcttcatactccgcatcgccgaccggttccagccatgtattcacattggcagcgggattgcactcgaccgcgaggtgcgaaaaccaactgtccggagccgctccgtgccagtggacgacatcggccggaatctcgaccacgtcacccggccgcaactcacgggcaggctctcccttttcctgataatacccccgtccggcggtcaccagcaatagctgaccgcccgtgtgactgtgccagttattgcggcagcccggctcgaaagtcacattcgaaatatgcgttcccaatgcctcgttgttacttatcgaagccagataagcctgccccgtaaaatagcgggagaattcttcgggcagtctatcgccctgcgggaagatctgcggaaaaatcgtttcgtttttcatattcagaacattcgtactttgtgcttggcaacaaccgaacgacaatatcgtcacgaaggccgccaatatagataaccgtactttcatcggaccggacgattaaatgttacgccccatttcataggcttgtttcatagccggttttccttggatatcccccttgtgccaggccccgacaccatagacgacacccttctcctgcggattgtccagacagtcgaggaatccccgaaaaccgtcgatcgtacgttccatagccgcaacgctggtttcggcggccgcgacgataaaatagaactccttgtcgcggatttccagatatccggcgcagcagcggtcgatcagcgtcttcatctgggccgacatggtgtagaaatagaccggcgtagccagcacgatcacgtcggccgcgaccattttccgtacgatctccggcgcatcgtctttctgcggacagggcttgccttcgttgcatacgccgcagcccgtgcaatagtgaatggttttatctttcagaaaaatcttttcgacttcgtgtccggcctcctgcgctccgcgcagaaattcgtcgcacaacgtgtccgaattcccgcctcggcggggactggacgaaaggatcaatacttttttgctcataatcgttaaattttattcgtgaatatctcgatcgtgtgaatcatccctctcaacgaaccccgggctgcattttccgaccgaggcccgatccggaaccaaccccttaccgatacgacgccctgtaaatggcttcgcactcctcgtccgaaagcggctcccggtcgaacggaaacaggaagcccatcgtttccctggcattgcggaccatcgccggaaattcgtcgggcgaaataccgtaatcggacatccgcaaatccgccacaccgcacgcccgctgcagagcctcgagcgcccgaatgaaatccatcggctcccgggcatcttccacgcccaacgcacgggccatcgccacgaaacgctcgtcgcaaacgtgccgttcgatgaaatgggcgtagtaggctttcgaaatcataatcagaccggcgccgtacggcagctcctggtggtaggccgacatcgcatgttcgagcgaatgttcgctcgtgcagcgccccacgcacatcaccgaacccgaaagggtattgccccacgctacacgggtgcgggcctcgaggtcgctgccgtcggccacggcacgaggcaggtagcgggccacattctcaatagcgttgagcgcgtacatatcgctcatcaaattggcagcattggagatataggcctcggtcgaatggaacagcgcatcgaacccctggaaagccgtgaatttcggcggaacggtaagcatcagctccggatcgatgacggcgagcaccggaaacagccccggatgtacgaagcccgtcttttcgtgggtttcggcattggtaatcacgcatcccgcatcggtttcggaacctgtaccggccgtggtggtgatcgccacgatcggcagcggcgtctcggcaactgccttgcccttacccgttccacaaggaatataatcccaataatctccgccgttggacgcaacgaccgcaatagccttcgcagcgtccatcacgctgccgccgcccagagcgacgatcatatcgcatccgttttcacgagccatggcacctcccgccataacggtcgattttaacggattggcctctacgcgatcgaacaataccgtttccactccggccatacgaagctgctcttccgtgcgtgacaaataactgttggcccgggtagaacgtccgttggaaataaccaacaacgccttgcggcccggcatcggctgggcgtgcaattcgttcagagttccagcaccgaacaacgttcgcgtcggaacgaacatgtcgtaattcaaattcgtcttcatacctattaaatttaactgtttattttcgtcccgaagcggattttttcgaacatcccgatttttcgaacgacgggactcgaattttcctctcctcgtttttgcaaaaataggatattccgcacgaaaaaagaggaaacaaattaccggagaaattacccgaattacagattccgcacccgtaattcggggctggtcgatcgttccctgacacagattacggagcttcttaccaaaattacggtttttgccggacgaagcgtccgggaagcgaataaagcgcttatctttgcagaagataggacacgcctcggaaaactgtgaacaagctcccgttttcttctcggctttcactatctttgcagaagagaagatgcggctcggacaagctcgaacgaccgacgctcgaagcatacgcagaggacactggtgaactctgctatgcaaggaggaggaaaacagaacgttaaatttggcttgccgcctgcctttcactatccttgcaatagtaaggatgcgtcccggacgaacacggaagaatcggattttgccgttcacgttcttcgtttcgaacaagcgacagaaccgcagactccgctcggcaacctgaaacagcatcgcttccatgcaaaaaaacgaaccgactatggaaaagggaatccactatatcgaaaacgtcttcgaatacaacgacctgctgggtgtcgaaaccctgcatccgctggtcagcgtgatcgatctctcgaaagcgcatccgatgaagcacgtccgtcatattttcggcttctacgccatctttctgaaagaagtgaagtgcggcgacctgctttacgggcgtcagcgctacgactatcaggaagggacgctggtctgcctggcgccggggcaggttatcggcatcgaagacaacggcgaagtctatcagccgaaaggatgggcgttagtcttccatcccgacctgattcgcggcacgtcgctcggacgcaacatccgcgaatattcattcttctcgtacgaagtgaacgaggcgctgcacctctcggagcgagagcgcgaaatggtcgtcggctgcttcctcaagatccggcaggagctggaacacgctatcgaccgccacagcaaacggctcatcgccatcaacatcgaaatgctgctcgactactgtctgcgcttctacgagcggcagttcatcacccgttcgaacgtcaatcatgacattctggcccggttcgaacggctgctcgacgactattttgcgggggatcgcgcccagcgcgaagggctgccttcggtaaaatggtgcgccggagaattgtgcctttccccgaactatttcggcgatctgatcaagaaggaaaccggcaaatcggcccaggagtacatccaactcaagttgatcgccacggccaaggaacggattctggcacccaacaagacgatcggacaggtcgcctacgaactcggcttccaatatccgcagcacttcacccgtctgttcaagaaaatcacaggccttacccccaacgaataccggtcggcggaacatccggcgtcgtaaccgcctgcattcaatcgaaaaatagcgctgcaaagtcgggttgcagcgctatttttatccgtaatcccgaaatttcaaaaacaggctttgcatccgatatccgtacatcatcgtacaaaacctcgaaaagtgaccaagctgcatagctgcagcttcaggaaaccgcttttccgaatatcacccgttttcgaccattcaccgtaacgcgttacaggaacgggaaattcgtcaattcgagatcaaaattatccaatccaagacttttccgccggacaaaagagaacatctaacaggaaaaaggttatctttgtggccggaaaaaagaatcggaatggccggaaaaataggatactttttattcgccttgctggtactgacgacaggaacgctctgccgccagcaacttccggtgcaatacgcctccggcggcgattccgtcggcagcctgacgcagcacgttccgcctcaggaaaagagcggcctgcactatttccaccattcgttcatcgcgtccgaaaccgtaagcgaggtcatcgcaccgatgctgcatataaactgcagacaactcgcatcagcgactccttctctccggccttcggaaaaaagtccgctcccttgcagcaatcgtccggcgaatccccatcccgacgcggtggattactacgtcttttcgctgggcaaaatccggatttgaccgcttcgattgctcccatgcgcatcttccgaccgaagaggcgcaccactcttgtttaaccgaatttgcccgaaaaaacaactctttacagtatatgtatttcgtactactaatggtcgtaatcctgaccgccatcggactggtggcgatcgctctgggagtggcccgcgcgatctcgccccgttcgtacaacccgcagaaaggcgaggcgtacgagtgcggcattcccacgcgcggcaagtcgtggatgcagttcaaagtagggtactacctctttgcgatcctgttcctgatgttcgacgtcgaaacggtattcctcttcgcgtgggccgtcgtggtgcaggagatcggcgtcttcggccttgtcagcgccctgttcttcctgttgatacttacgtttggcctggcctacgcctggcggaaaggagccttggaatggaagtaagaaaaccgaaaatcaagtcgatgaaatacgaagatttcaccgacaacgaatacctcgagaagatgatcgaggagttgcgtgccaacggcacgaacgtcgtcatgggctgcctggacgaagttatcaactggggccgcagcaacagcctctggccgcttacgttcgccacgagctgttgcggtatcgaatttatggcggtcggtgccgcacgctacgattttgcccgcttcgggtttgaagtagcccgcgccagcccgcgccaggccgatttcatcatggtcgccggcacgatcacgcacaagatggcgccggtgctgcgccgtctgtacgaccagatggccgaccccaagtatgtgatcgctacgggaagctgcgccgtaagcggcggcccgttcaagaaatcctatcacgtagtgaacggcgtggacaagatcctgcccgtcgatgtctatatccccggctgtccgccccgtcccgaagcgatgctttacggtatgatgcagctgcagcgtaaagtcaagctacaaaaattcttcggcgacgtcaatcggcagatcgacaagaaagagtacgaaaaacgactccgcgaggacctcacagcggagcgtcccgaactgaatgtggaacccgaagagaagaaaaacgtatgaacctgcaagagataattacggcaaaagtacccggggccgtctatacggaggccggcgacgggatgttcaccatcccggtcgaacagttccacgatctggcccggtatctgcacgacgatccggcgctgcgcttcgattttctgcgcagcctgacgggtatggactggggcgaagaggggctgggtgccgtctatcacctcgaatcgaccgcgacgggagaaaacgtcgtactgaaagtcctcaccccgagccgcgagcaatgcggtttgccgacggtcagcgacatctggaagggggccgagttgaacgagcgcgaagtgttcgacttcttcggtatcggcttcatcaaccatcccgacatgcggcgcctctacctgcgcgacgactgggtggggtatccgctccgcaaggactacgaccagagcggggaaaccaatccgctccgtatgaccaacgaagtggcgcacgacagttcgccgagctacgagctccagcccgacggcagcatcatccgccgccgcaacgtgctcttcgaggaggacgagtacgtcatcaacatcggtcctcagcacccggccacgcacggcgtgctccgcttccgcgtatcgctcgaaggcgaaatcatcaaaaagctcgacgtacactgcggctacatccaccggggcatcgaaaagctgtgcgaaagcctgacctatccccaaacgctcgctcttaccgaccgtctggattacctcggcgcttcgcagaaccgccatgcgctctgcatgtgcatcgagaagggactcggcgtggaggtgtcggaacgcgtacagtacatccgcaccatcatggacgaattgcagcgtatcgattcgcacctgctcttcttctcctgtctctgtatggatatgggtgcgctgacggccttcttctacggtttccgcgaccgcgagaaggtgctcgacatcctcgaacaaaccactggcggacgcctgatccaggcctacaacaccatcggcggcgtacaggcggacatccatccggagttcgtaaaaaaggtcaaagaactgatcaaatacctgcgtcccgtcctgaaggagtatcacgaaatcttcaccggcaacgtcatcgcccagcaacgactcaaaggcacgggcgtgctgacgcgcgaagacgccgtttcgttcggtgctacgggcggcacgggccgtgcatcgggctgggcctgcgacgtgcgcaagcggcatccctatgccatgtacggcaaagtggatttccgtgaggtactcttcaccgagggcgactgcttcgcccgctatatggtccgcatggaggagatcctggaaagcctgcgcatcatcgagcagcttatcgacaatatccccgagggtgaatatcaacttaagatgaaacccgtaatacgtgttcccgaaggaagttactatgcagccgtagaaggcagccgcggagaattcggcgtctatctcgaaagccggggcgacaaatcgccgtaccgcctgaaattccgttcgacgggcctgccgctcgtttcgtgtatggacaccattacgcggggtgcgaagatcgccgacctgattgccatcggaggtacgctcgactacgtggttccggatatagaccgttaaattaacagatcagataaaacagatcaatatgtttgatttcagcatagtaacaagttgggtacatgaactgctcacttctttcatgccgctcggactggcgattttcatcgaatgcgtgatcgtcgggctctgcatcctgttgatgtacgtagtggtggcgatcctgatgatcttcatggaacgcaaggtctgcgctgcgttccaatgccgtctgggtcccatgcgcgtcgggccctggggtactctccaggtcttcgccgacgtattcaaaatgctcaccaaggagatcatcacgatccggcgctcggacaagttcctctacaacctcgcaccgtacatcgtcatcctcgcctcggtactggcgttctcctgcctgcctttcaataagggtatggagattttggacttcaacgtgggcgtcttcttcatgatggccgcctcgtcgatcggtatcgtgggcatcctgctggcagggtggagcagcaacaacaagtactcgctcatcggcgccatgcgaagcggtgcgcagatgatttcatatgagctttcgatcggactctcgatcctcacgatcatcgtactgaccgatacgatgcagttctccgagatcgtcgcccgacaggccgacggctggttcatcttcaaggggcacatcccggccatgatcgctttcgtgatttatctgatcgccggcaacgccgaggtgaaccgggggccgttcgaccttcccgaagccgaatcggagctgacggccggttaccacaccgagtattcgggtatgcatttcggtctgttctacgtggccgaattcgtcaatctgttcatcatcgcgggtgtagcctccacgatcttcctcggcggctggatgccgttgcacatctccggctgggagggtttcaataccgtcatggactacattccgggcttcgtctggttcttcggcaagacgctcttcgtcatctggctgctgatgtggatcaaatggaccttcccgcgcctgcgcgtggaccagattctgacgctggagtggaaatacctggtaccgatcgggctggtcaatctgctgctgatggtcgtcatcgtcgtattcaaactgcatttttaagtatggcaaattatatccaaggactctttcacggcatccgcaccctgctcacgggcctcaaggtaacgggcaaagagttcgtcaccccgaaaatcacggagcagtatcccgaaaaccgggcgacgctcaaaatgaacgaacgcttctgcggaacgctcacgatgccccacgacgccgagggcaaaaacaagtgcgtcgcctgcggactctgccaggcagcctgtccgaacggtacgataaagatcaccaccgaaaccgtcacggacgaagagacgggcaagccccggcgtcgtctggtcaaatacgaatacgacctgggagcctgtatgttctgccacctgtgcgtgaacgcctgtccgcacgacgcgatccgtttcgacacggctttcgaacacgcggtctatacccgcgacaaattagtaaaaaccctgaacaaataacgtcatggagataacactcgacctgatcgtctttaccgtgctggccgtcttcacgctggcgagcgccgtactggccgtaaccaccaaacgcatcctgcgtgcggcgacgttcctgctgttcgtcctcttcggcacggcaggcatctatttccagctcaactattcgttcctgggtgccgtccagctgcttatctatgcgggcggtatcacggttctatacgtcttttcgatcctgctgacctcttccgagggagacaaggccgaaaaactgcgcggctacaaattcgtcgtgggcatcctggcaaccctcgcaggactggcgatctgcctgttcgtcaccctgcgccaccagttcctgccggaacacttcgagcacggtgaactggccgtccgggagatcggattcgcgttgatgagtcccgaaaaacagggctacctgctgccgttcgaagtcatcagtttattgctgctggcctgcatcgtcggcggtatcctgatcgcccgcaaacgataataaaaaggtaccagaaagagtaaaaaagagagaccggccgcattcgtccattttaccgtataacggctcctccggcggaggagccgggcagggggcgaggaaacagcgaaacgtcgtgcatgaaggctgcggcaaagcgatgcggtcgatggaaagtgtacaaaacaaattactgctatgatacacatggagtattacctgatcgtttcgacgatcatgatgttcgtgggaatctacgggttcgtcacgcgccgcaacctgctggcgatgctgatctcggtggaactgatcctcaattcggtagatatcaatttcgtggtattcaaccgtttcctgtttccgggtcagttggagggcttcttcttcgccctgttcgccatcggcatcagcgctgcggaaacggccgtggctatcgccatcatcatcaacatctaccgcaacctgcgccacatccaggtcaaagatttgaagaaactcaaatggtaacggattaaaacgcatcgactatggattttaccattctaattctcgtattgccgctgttgagtttcctggtactcggactggccggcaccaaactcaaaccgggagcggcgggcgccatcggtacggtcgtgctgggtgcggtcaccgtgttgagctacctcacggccattctctatttcggcgccgggcgtaacgcggagggcattttcccgacgctgatgccctacaacgccgtttggctcccgatcagccagacgctgcatatcgatatgggcatcctgctcgatccgatctcggtgatgatgctcgtcgtcatctcgaccgtgtcgctcatggtccatatctattcgttcggctacatgaaaggggagcggggcttccagcgttattacgccttcctgtcgctcttcacgatgagtatgctgggactggtggtcgccaccaacatcttccagatgtatctgttttgggagctggtgggcgtgagctcctacctgctgatcggcttctactacaccaagcccgaagcgatcgcggcatcgaagaaagccttcatcgtcacccgcttcgccgatctgggcttcctcatcggcatcctcttctacggctattatgccgggacattctccttcacgcccgacgcacaactgctggccgccgccgggacaatgatcccgctggccctcggacttatgttcatcggcggagcgggcaagagcgccatgttcccgctccatatctggttgccggacgccatggagggtccgacccccgtatcggccctgattcatgcggcgacgatggtcgtcgcgggcgtctatctggtcgcccgcatgttcccgctctacatcggctatgctccggacgtgcttcactgggttgcctacatcggcgctttcaccgcgctctatgcggcggtcgtcgcctgcgtgcagagcgacatcaagcgcgtgctcgcgttcagtacgatctcgcagatcggttttatgctcgtggcgctgggtgtctgcacctcatccgatccccacacgggcggactgggttacatggcttcgatgttccacctcttcacccacgccatgttcaaggcgctgctgttcctctgcgccggctgcatcatccacgcggtacactccaacgagatgtcggcgatgggcggcatgcgcaaatacatgcccgtcacgcacatcaccttcctcgtcgcctgtctggccatcgccggtatctggccgttgagcggtttcttctccaaagacgaaatcctgaccgcctgcttcgcattcagtcctctgatgggctgggtgatgacgggtatcgcaggactgacggccttctatatgttccggctctactacggtatcttctggggcaaggagaacaaggaactgcatgcacatcacacgccgcacgaagctccggccacgatgaccgttcctctcgtcgtcctggccgtgatcacctgcgtcgcgggattcattcccttcggcgatttcatatcgagcgacggagaagcctatacgatccacctcgacggcggggtagtggccatcagcctcaccgtcgccatcgctgcgatcgccctggcgacctggatgtacctgcgggccaaacagcccgtcgccgaccggctcgccacgaccttcagcggcctgcacaaggcggcctaccaccgcttctacatcgacgaggcgtatcagttcgtcacgcaccggatcatcttcggctgcatttcgcgtccgatcgcctggttcgaccgtcacgtggtggacggcttcatgaacctactggcccggacaacccagagcgccgcactggggatccgcttcatgcagagcggcagcgtacagcgctactgcatctggttctttgccgggacgctcggcctgacccttttgttactcatcctccgataatccgaacgctatgaatatactttctctgtttccgctgatccccctggtgatgatgctggggctgtggatttcgaaaaatacgcggcagatccatgccgtcatggtcgccggctcctcggcactgctcgcgctggcgatttatcttgtgttccattacctcggcctgcgggaagcaggcgctacggacgcgatgctccttacggacagcgtcgtctggtacgctccactcaacatccattacgcagtgggcgtggacggtatctcggtagccatgctgctactgtcggccatcatcgtcttcacgggcacgttcgcctcgtggcagatgaagagcgacgtcaaagcctacttcctctggttctgcctgctctcggtcggtgtcttcggattcttcatcaccgtcgatctcttctcgatgttcatgttctacgaagtggcactgatcccgatgtacctgctcatcggcgtctggggcagcggccgcaaggagtattcggccatgaagctgacgctgatgctcatgggcgggtcggccctgctgctctgcggcatcctgggcatctacttcggtgccggggcgcagacgatgaacctgcacgagatcgccgcgctgcacaacattcccctctcgcaacagtacatctggttcccgatggtcttcgtcggcttcggcgtgctgggcgccctcttcccgttccacacctggagccccgacggtcacgcatcggcaccgaccgccgtgtcgatgctccacgccggcgtgctgatgaagctgggcggctacggctgcttccgcgtggcgatgtacctgatgcccgaagcggcgcacgaattgagctggattttcatcatcctcacgacgatttcggtcgtgtacggcgctttctcggcctgcgtgcagaccgacctcaaatatatcaacgcctactcctcggtatcgcactgcggactggtcctgttcgctatcctgatgatgaatactacggccggcacgggcgccattctgcagatgttgagccacggcctgatgacggccctcttcttcgccctgatcggtatgatctacggccgcacgcacacgcgcgacatccgcgagttgagcggcctgatgaaggtgatgcccttcctggcggtagggtacgtaatcgcaggtctggcgaacctcggactgccgggtctgagcggtttcgtcgccgaaatgacgatcttcaacggcgctttcatgaataacgacacgttccaccgcgtcgtgacgatcatcgcctgcacatcgatcgtgattacggcggtctatatcctgcgcgtcatcggccgcatcctctacggcacctgccgcaacgaggcgcacctgaaactcaccgacgccacgtgggacgaacgactcacggtcatctgcctgatcgccgctatcgccggcatgggtacgatgccactctggatcagcgatatggtaagcggcagcgtttccacgatcatctcacagctaatgaactaatccgactatgaattacagcgaaatattccacttcatgcgacccgaattgacgctcatcgtcacgatcgcgctgcttttcctgttcgacctgttcgctccggagcggctccgcagatatttccaccctctggcctgcgtcctcctgacggtacagatcctcgtcaatatcgttccgacaccggactcggggcagctgttcggcggtatgtaccagtacgaaccgatgcagagcatcgtcaaaagcatgctggctatcggcacgcttatcgtcttcctgcaatcgaacgaatggctgcggcgcgaggacaccgcccataaacggggagaattctatctgctgaccctctccacgctgctgggcatgtacttcatgatcagtgtgggcaacttcctgatgttcttcctcggaatggagctggcatcgatcccgatggcctgtctgatcgcttttgacaaataccgccacaactcggccgaagcgggcgccaaatacatcctctgcgccctgttttcgagcggtctgatgctctacggcatctcgttcatctacggcacggccggtacgctctatttcgacgacattcgtctggacggctcaccgcttcaaattatggcgctggtgttcttcttctccggtttaggcttcaagctctcgctcgtaccgttccacctctggacggccgacgcttaccagggagcgcccacgaccgtcacttcctatctttcggtcatatcgaaaggctcggccgctttcgtgctgatgaccattctaatcaaggttttcgcaccgatggtgcaggagtggcgaacgattttgttcgtagtcatcatcctgagtatcacggtggcaaacctcttcgccatccgccagcagaacctcaaacgcttcctggccttctcatccatctcgcaggcgggctacatcatgctgggcgtgatcggcggttcggccctgggcatgacttcgctggtttactacatcctggtctatatggcagccaacctgtcgattttcggcatcgtttcggccgtcgaacaacatacggacgggaaagtttgcatcgaggactacaacggtttctaccgcaccaaccccaagctggccgtgctgatgaccctctcgctcttctcgctggcaggcattccgcccttcgcaggctttttctcgaagttcttcatcttcgcggccgctttcaaggagggatttcatctgctggttttcatcgccctgctcaacacggtgatctcgctctactactacctgctggtagtcaaagccatgttcatcacccccggcgaacaccccgtcccgaccttccgcagcgaccggggcacccgtttgagcctggcgctctgtactgccggtgtgctgttgttgggtatcgccagtgtagtgtacgattcgatcggagcgttcgccttcggcatgtaagcgacgcatccgcagcatattatccggcggacggctctttcgggctgtccgcttttttggaaccgggagcagggttgcagaaacgccgaaatctgcgtatctttggtcacatctaataaaacgacgactatgaaccgaatcaacactctcttcggaatcgaatacccgatcgttcagggcggcatggtgtggtgcagcggctggcggctggcctcggccgtaagcaacgccggcggactgggcctgctgggagcaggctccatgcatcccgaaacactgcgggaacatatccgcaaatgccggcaggcgaccgacaaaccgttcggcatcaacgtaccgctgatgtacccccaactcgatgaagtcatgcaactgatagtggacgaaggggtcaagatcgtctttacttcggccggaaatccgaagctctggacaggctttctcaaatcgcacggcatcacggtcgtccatgtggtttcctcctcgaaattcgcccgcaaatgcgaagaggcgggagtcgatgccatcgtagccgaaggtttcgaagccggcggtcataacggacgcgaagagaccaccaccttatgcctgattccggccgtacgacgtgtcacctcgctgccgctgatcgctgcgggaggcatcgctacgggcgccgggatgctggcagccatgaccctcggggccgaaggcgcgcagatcggaacccgcttcgcattcgccgcagaaagctcggcacacgaaaacttcaaaaaccgctgcctgagtctggaagagggcgatacgatgctgatgctcaaaaaagtttctcccacgcgcttggtcaagggcggtttcttccgcgaggtcgaagaggccgagaaccgaggagctacggccgaagagctgaaaacgcttctcggaaaaggacgcgccaaaaaaggtatgttcgaaggcgacctcgataacggagagcttgaaatagggcaggtggcctcgcttttccgcgagcagcaaactgcggcagaaatcgtgcacgacatcgtgacagaataccgcaacctactgaatgaaagcaaagagaaactgtccatctaaaccgacgcacaaagaatgatcaactacctccaagtcgaaaatctgaccaagtcgtacggcgatctggtgcttttcgacaatatctctttcacgatcggcgaggggcagcgcatcgctttgatcgggcgcaacggttccggtaaaacgaccctgctgaatattctcgcaggcaaagatacggccgacagcggaacgatcacgccccgccgtgacctgcgtatcgcttatctggaacaaaacccggaatatgctgcggatctaaccgtactggaagcctgtttccgttccgacaatccggccttgcgagccatcgcagcctacgaacaagccgtcgccgatcctgcgcaggacgggttgcaggaggccatgagccgtatggacgccctcgctgcctgggactacgaacagcgggccaaggagattctgtcccgactaaagatcaacgatttcgacaaaaagataggccagctttccggcggacagctcaaacgtgtggcattggcagcggtgctaatcagcgaagccgacctgctgatcctcgacgagccgaccaaccacctggataccgacatgaccgaatggctcgaagagtacctcacgcgaaacaaggcagccttgctgatggtcacccacgaccgctatttcctcgaccgggtgtgcagcgacatcctggaggtggaccaacggtcggtctgcttatacaaaggaaattacgcttactacgtcgagaagaagcaggagcgggccgaggccgccgaagcccggcgcgagagcgacctgaatctctaccgccgcgagctggagtggatgcgccgccagccccaggcgcgggcgaccaaagcccgagcccgcatcgactcctttcacgaactggacgccaggctgaaaagcacccgcacgcaggcgtcgctgaagctcgacgttcaggctacgcgcatcggtaccaagatattcgaagccaaagagctctgcaagcgtttcggggatctggtgatcctcgaccgtttcaactacaacttcgcccggtatgacaaactgggtatcgtcggggacaacggctgcggcaaatcgaccttcctgaagctgctcaccggcatcatacagcccgacagcggcacgatcgaagtgggcgaaagcgtccgcttcggctattacagccaacaagggctggacttcgacgagggaaagagggtgatcgacatcgtaaccgacatcgcccacgaaatccacctgggcgacggacgccggatgagcgcatcgcaattcctgcaatatttcctcttcccgcccgaggtgcagtacagttatgtcgcaaggctcagcggcggcgagcgcaagcggttatacctctgcacgatcctgatacagagtcccaatttcctgatcctcgacgagcctacgaacgacctggacatcgtgacgctcggcgtactggaagagtacctgcaagcattcaaggggtgcgtgatcgtggtttcgcacgaccgctacttcgtcgataaggtcgccgaccatctgctcgtcttctgcggaggcggggagatccgcgaattcgccggcacctactccgactacaccgcttggaaacgcgactacgaagcggcgaaacaggctgccgtcgcccaggaaaaagccaagagcacggcatccggaagcaggggcggggagatccggaagtccgggacggccccggcaaaaacaggagcggcacgcaagctcaccttccaggaaaaacgggagatggagcatctcgaagccgaaataccggaattagaacaggagaaagccgcgatcgaagaaaaactctcgtccggcgacctgccgttcgaagagcttacggcgctttcggagcggatcacggcactcatggaccagatcgacaccaaaagcatgcgatggctggaattgagcgagatcggaggttgattccttccttgcatacactctgaaacaccagaatacgtcctaaagccgatacactcctcttttcggggagtgtatcgatatttttttctcgcaacaattttatttttcgaaaaatttttcttaattttatttccggaagtttacgataaacgaccaattccaactaaattaactctccatttttctcaagccgccttcccgggcggcttggttttaacctttccgcaagcatcctccatcccgcaagaaccgatttctatattgagcttaaaaattattcgacgaacacctccgatacatcgatggctgcaacccgatttcacgaccatttgcagcgataaaccgtcgcccccttggattcttcggaacgggaaacaaaaatccgtctgaaccacactgcgtaacaactcgcaaccgcaatagtaaacgatacacattccgcaaccgcttttcgaaaagcgaaatacccgacacttttcagcaatcggaaataacatccacaaagcaaaaccagcctccgatccggaagctggtttttacctcccaataatatactccccatttccgggaaagcggaacaatatatcgatcaatcgtcgtactctttcaacgcgaaacgcttgtcatcgaaggtcaattcgatcgtattgttcaacttcacttcccattcccggcaagtatgctcgattccgacgaggaaggttcccggaaagttccgagcgacgtaatccgcaatctgcgccggaacaacagccgacggaaccgcccgcgaacggcttttaatttctcgccacattccatttcggcgaaatttcacttgggtaccgtcggcgaaaacgactttatacgtaactgcaagttcgtcgagcgtcttgattaccaaaacgggattctcttccggataatgctgtgcgataaaagagcgggcctcaccgggcagttcctgtggcgctacggctctttcacactctatattccatgcgattgcaaagagtagagcgaatatagcaacgacacccgtgatccatacccacctttttcccgagccggatttcaaaacttcgggaattttagtcatcatagtctatgacgttgaaattcaaatcgaattcgacttccaatccgttcgacagttcgatttcccacgaataggcatcacggtcgatcttgcggataaactgaccggggtagttcatcttcgctacgaaatccgcgatctgctggggaacgatcgccgcaggaacggccgaatatttacgatcgaccgccgaccactgaccgtcggcacggaattccacttccgtgcggtcggtataagtcacctcatattccgaaccgaagtatttgctctcctcaaccgcataagctacggtcagatccttgaaatacgtagcgagaaactcctgcgcggctttaggaaggttgtcgatcgtaatcggtttctcgcgtccgtcggcctgggccgacacgatgcctgtaagcaacaatgccactgctaaaatcatctttttcataatacattgattttaatcaagtgaatattagccatacaaaaattcaaaagttgtctagccgatccatcaatcttcgtaggcctcgatatttccgttcgtatccacacgcaaatcatactctcgacggtcttttcgtgcttcgaactcataccacatcccgccggaagtttcgatgcattcaaattcgtcgtcgtcgagggtatagccagcctgctgcaccgcatccaaaatattttgcggcaaccggtggagctcccactcggtgcggagccagttgttgcgaccgtcgaaaagcacctctttcctgagattttcgtgaagaatcgtcagttcaagacatccgtcatcatagtcgcgttccacgaccttagctcccggataacgatcgttcaggaagcgctcgatctcatcctctaccggcagtccattacctcccgtgtttcccatatctattacaggacggggaatgatccgaacaggggaatcgtttacgtaaatatctacctctttatgccgtgtctccacttcgacacaccagaaaacgctgattccgtctgccgtagccttatcgagtgaccatttttcgatgtcgtcgatatcgttggggctcgacagctgctggtcggccgctaccgcattgtaaatcgcttccggcacggccgaaccaatatcccgacgtccgtattcgatctttgcatagatgcggttcccctgcgcatcgaaatagagttcatgcttgtaaccgccgcaaacaagctcgacttccgtacctccgtattcccggtccacgtctatcaccgagcctccgccgttatcatcgaggtaaccttgaatctgctgttcgatacccgccgcaggtttctctggaatatagtcttcataaccatcatccgcagcattggttacttcgttcaccaatacgccttcggtcgaaaaatacaggtccatcccggtcgttatgccgtctgccgtgcgggtgacgccgataacatagacaacggtcacaccctcgctgccaccggccccgacgacctccttgcgctcgagcttatccaccttaccagtacgggtccatccttcggcttcggtatatttgctggcatcgaaaccttcccggacagcctgcggaagtgccgcgaagtcgatattcgtttcggtcatggcccattgtccgtttgcattttcgaaccatgccgcattgttggccctggattccgtccgggcagcctcgaagaaaaagttcgccacagcatagtcgcctcgaagggaccatcgtacatcttgggcacccggataacgagcgttaaaagccgccaatacctcctgcgaaatatgtgagtcgcccggtcctccgacttcatccttgtcgcacgcagcgaacaggagagccgtcgcagccattgttaaaacagataatgtttttttcttcgtattcattgtttcgtttacttaaatgtttatcaataatttgtactgcgaaatcacagcctgaaaaatctttatcggaaacggacggggtatcaatcgtcgatacctatcaaattatgacttcgatcaaaagtcagctccattccgttattcaacttgacctcgacctcctgcttgtcgcgttcgattttgatgaccgcagcacccggatacagctcctgtactttggtttcgatcggcatcgaaacgattcctgcgggtaacgacgaataacggcaatccacctctttccacgctccgtttcgacggaactcgaccttgctgccgttcgtaaacatcacttcgtaaatgacttcgaaaaaatcgctttctttttttgcgtaggcgattttttcaccgggaaaataccgggcaatgaactcttgcgcctgtcgcggcatctgttcggttgtgaccgcacggtcgtgatcggcataagccggcgagattgtcagcagcgtgatgccgatcaaaaacgccatcatttttctcgtgttcttcattttctcaatattttttatcgggagatcacccgatcggtttgtatggtacaaaattgagaaccgattttggagcgaatttggaatttcgatattttaacaaaatattttttccgaacccgattatatatttcgataccccgatccgaaaccggccgatatgcttcgactttcctccgagaaagggatttcggacagagtcagaaccggtaacagagggttatcgccgaaatcagcaaaaaacagtcgtcatattcgaatgcagctgatcgtcgtcccaattatcgccagcttacgccaaaatggtggcggccattttcgaagtaataaattagtccgaggcgataataatccgttatggctttgaccagtgccaaaccgagccctgtcgagccttctttttgcgacccctgataaaagcgttcgaaaatatgtttctcatcaagcggcgatactccgtcgttaataaccgtcaatacatttccctcgatacgaatatctacggcggctccgtcggcactgtgaaggtaggcgttcttgatcaggttggaaaccaatatcgaacaaagcgattcatccatccggaccgagaaggtaccgggcaaatgcagacgacaacggattttatgctctccgtatatatcgtcataaagcgccttccgctcctcgaccaggggaacgagatcgatgtcggtgctctccggaaactgaccgttatctatcttggtaagcagcaacagcgttttattcagccggacgatatggtcgagcgtacgccgcatctgaataatttcgcccgtcgtttcctcgtccaggtccgcacaatcgagcagatactccatacgtccgccaagtacagccaacggagtttgcaactcgtgcgaggcattgcctataaactgtttttgacgctcgaacaactcctcggagcgatccacggcctgctgtgccgcaacattcaatcgacggaattcggtaatagaggtatcgttcggcacaggcgcgacttcgcgcccgggagcatagctatccaaccaatgcaacaactcataaagcggcagcatgcttttatggaacacccacaaggtcgttccggaaactgtcaccaaaaggaaaagatagagccacacgacccaccacatgactgtttccagcagatcgtctttttcgaaagtaggcatagccaccttcagttcataaaaattaccgtccttatcctgaaaaatagtcgccaacacccgggccggctcggtttcatccttttccggaatatacacctcggtatcgtagtagtcgatcgaaggacgggtggcgacgtatccggattcaacggggatgatcgtgtaactgttattggaaccttcgttcgaacggggcaaaggctccccggcaagcaccctcattacgatcaattccgaataatcctcgagagcatcgtccgcttcatcgtttatctcgtccatcatggtaaaataaaacacgaccgcccataaagcgatcagcgggaacaagaccagcgacaaacgaagcgatatgttatagatcaatttcataaatgcattgcttaatcaatcagtttgtaaccgaaaccgtacacagctttgatttcgatcgaggctccggcctcttcgagtttgcggcgcagatttttgacctgcgaataaacgaaatggaaattatcggattgatcgacatgatccccccatacggcttcggccaaaactgccttatcgaccacatgacgcggacgctgcatgaaatacgaaagaatatcgaactcctttttcaataaagcgacctccttgccgtctatttccactcggcaactttccgggtcgagcgttacattacccagcgcaatgccgcctttcccgccaccgcgactacggcgaatgacactctggatacgcgccgagagttccgccaaatggaacggtttaggcaggtagtcgtccgcaccttctttcagcccgaggaccttgtcttccaaagaatcccgagccgagataatgattacgttttcgcgtttatccgctcttcgaagacgctcgagaagttgcaacccgttgccgtccggcagcataatgtccaataagatacaatcatacgaataggctgccaatttgtccgaagcctcggcgtatgtactggccgtttccacgacatattgctctttgcgaagtgcacgtgccagcaactcacgcaatgaggattcgtcctccacgatcaataatttcataacgacaagtcattttaataccacaaacaaaaataccgattttgtaaagaaattgaaatgaactcgaatataataaattatattacgggaagtttttcattaggcgtctgcatatactgatctataaaactccataacttatttgctatgtttatagttatgcaacttgctaacagacaaaacattatccgaaaatgggggaacggacagccgtacggacaggttccgcctttcgtcttccgaagaaaagaaaatacattcgcaaaaagcagaggcaatacctgccgttgcatgccgtgaagcgtacgatagcctgtacacgatcgaggggaggggtgatgcccacatttcaaaatgacccgaacccggtcttccgaaatactcataacccagccacagaactacatcgagctccgtagtggaagtccataaaaacgcttcacccgcgctgatttttcagtgcgggtgaagcggggcgaccgcccgtaaaatcgttccgggcaacttgtcggcaaactatcggctctcctgccggaaagccgatggagagatcccagtatgtttcttgaaataacgccccaaataagactgatccgggaaatgcattttgtaagcgatctcctgaatcggcagggtagtgttctgaagcaatactttaatttccattactacgatcttatcgatcaactccttggccgattgatgcgtcgtccggcgcacgatggcggaaagataacgggtcgagatacagagcttgtccgcatagaaagaaacctcacgctcttcgatacaacagtcatgaactagggaaacaaagcgatgaaacagctccatctgccggttggaagtcgtgggacactggctgctgaccttacgctggatcttatcgtaaagctccagcataatattctgcaaccgatttctcacgatcgtctttcggaacatattaccccgatcctgataggtgtaatccattatttcgaaccaggtagacaatccggcagccatcctttcgtttacttgagaaatgggattttccttcaaaaagctgaaaaacgagagccccagccgaaatccggcctccccgaacaggtcgggagagaaggcgccgaacctcaccgaaaagtcggccgacgcatcgtcgaacatcaatacgctgccgggcagtaagagtacgatcgtattgagctgcaaaggtccccggcgaagatcgacggtcacctgggcatgaccgctcgtacaaagcagaaccagtgcgcaatcgcaacggcagggattattgaagaaataagcgagatcggattttccgataacaaaaggttcctcttcggaaacagctatggggtttgctgcggacataatgatttcttcttttttggacaaacgaaaagcccctgatattattatcgtacaaatatggcataaatataccgaaaagtgacaatattattcgcaagaaagaaagttacacattaaattttacggtacttttgcatgacaaaaagttttttaacgggaaaatattttttcaaagtaataataatcaaccaaaaaactatgaagcagaagttaattcaggcagtcttgttcggaagctgcatggctttcgccgtatcgtgcggccaggctccgacggcaagaggcgaggcggaatattccgtcatgacaatttcgacatcggacgtaacgattccgagcacccactcggcaaccatccgtgggcgccaggacatcgccatttacccgcaggtatcgggtaccatttccaaagtgtgcgttaaagagggtgaagtagttcgccagggacagttgttgttcattatcgaccaggtgccctacaaggcagccctgcaaaccgcaaaagccaacgtcgcagctgccgaggccagcgtagccaccgctcaattgacctacgacagcaaaaaagagctgttcgccaagaacgtcgtttcgcagttcgacctgcaaacttcccagaacaacctgctgacggcaaaatcccagttggcacaggccgaggcacagctcgtcaatgcggccaacaacctctcctataccgaagtgaaaagtccgtccaacggcgtagtcggtgtcctgccgtatcgtgtgggtgccctggtgagcgcatcgattccccaaccgctgaccaccgtatcggacaactccgatatgtacgtttatttctccctgacggagaatcaactgctcgacctgacccgtgaatacggctcgatggacaaagcgctggcggcgttgccgaacgtgcagcttgtgctcaacgacggatcgctttactcccaggagggacgcatcgaatcgatcagcggcgtgatcgacacttcgacgggcagcgtacagcttcgcgccgtattccccaatcccggacgcttgcttcacagcggtagctcgggtaatgtcctgttgccgcacatctacaaaaacgtagtcaccgttccgcaagtcgctaccttcgaattgcaggacaagaaattcgtttataaggtcgagaacggcgtagccacctcgcagaatatcaccgtatcgccccagagcgacggcaagaatttcatcgtcaccgccggactcaccccgggcgaagtcatcgtgaccgaaggcgtcggtctgatgcgcgaaggaaccccgatcaaacccaaaggagccgcaacgaccgcgaccgctcctgcagaacaacctacaaaagagcagtaaaatatgacactaaaacatttcatagaccgcccggtattggcggcggtcatttccatcgtaatcgtcctgggcggtattatcggtgttgcgacgctccccgtcgagcagtaccccgacatcgcgcccccgacggtgatggtgcatgccagctatccgggcgccagcgccgaaaccatccagaagagcgtcatcattccgcttgaggaggctatcaacggcgtggaaaatatgatgtacatcaaatccgaagcatcgaatgccggtagcggatcgatcacggtttatttcaaacagggcaccaacgcggatatggcggccgtcaacgtacagaataaagtagcgacggcaaccggatcgctccctgccgaagttacaaaaatcggtgttacgaccatgaagcgtcagtcttcgatgctgaaagttttcacgctaagcagtccagacgattcatacgatgaaaatttcttgtcgaattacctcaatatcaacatcaaaccgcgcatccagcgtatccagggcgtcggagaattctttgctctcggtggcgattatgcaatgcgtatctggatgaagccggacgtcatggcccagtacaagttgattccttcggacattacaggcgttctggcggaacaaaacatcgaatcggcagccggtatgttcggcgagaactcagataacacgttccaatataccatgaaataccgtggccgtaaaatgacacctgaagagttcggggagatcgtaatccgagctacttctgacggtcaggtactgcgtctgaaagatgtggcagacattgaattgggacaggactcctatgcttatcacggtatggtcaatggtcatcccggcgtttcggcgctcgtcttccagaccgcaggcacgaacgccacacaaaccgtcgaggaaatcgacgcgatgctcgatgaaattgcaaccgaactccctaaaggcgtagagataacccacttgatgagcgtgaatgactacctgtacgcctcgatccacgaagtgatcaaaaccctgatcgaggccatcatcctcgtcattttagtggtttacgtcttcctgcaggatatacgctcgacgctgatcccgaccatttcgatcctcgtgtcgctggtgggtacgttcgctttcctttcgttcgcgggcttctcgatcaacctgctgaccctcttcgcgctggtgctcgccatcggtacggtggtggacgacgcgatcatcgtcgtcgaagccgtccaggcacgcttcgacagcggctacaagtcatcgtacctggctacggtcgatgccatgggcggcatcacttcggccatcatcacctcgacgctggtcttcatggccgtgtttatcccggtgtcgatgatgggcggaacctcaggtacgttctatacgcaattcggtatcacgatggccgtcgccgtcggtatctccgcactcaacgcactgactctttccccggcgctctgcgccctgttgctcaaaccctatgtagatgaagacggcaatgtgaagaacaacttcgcggcccggttccgcaaggcttataatacggccttcagcgccgtgctcaagaaataccagcgcggtgtcatggtattcatcaagcacaaatggctcacctgggcaacgctgggtctggcaatgatcgggctggtgctgctgatgaacaacaccaaaaccggtctggtacccgacgaggaccagggtacgatcatgatcaacgtaacgacggctccgggtagctcgctcgccgaaaccaacaagataatgggcaaagtaggcgagcgtctgaaaagcattccccagatccgcgacttccagcaggtagccggttacggtatgatcgccggacagggaaactcgtacggtatgtgcatcgtcagactgaaagactggtcggagcgtcccgacaaggccgacgccgtgaatgccgtaatcggccaaatctatgcccggaccgccgacatcaaggacgcgcagatcttcgccgtcgctcccccgatgatcaccggttacggtacttcgaccggtttcgaaatgtatctgcaagaccagacgggcggcgacataacggacttctacaacatctatttgcaatacatctatgcgctcaaccaacggccggaaatccagatggcctattcgaccttcaacatcaacttcccgcagtatatggtggacatcgatgcggcgaaggccaagcgcgcgggtatctctccgacagagattctttcgaccctttcgggctactacggcggacagtacgtgtcgaacatcaaccgcttctcgaaagtatatcgcgtgatgatccaggccgatccgaaataccgactcgatcccgaatcgctcaacaacgtgtacgtgcggatgcagaacggcgaaatggcaccgatcagtcagttcgtcaagctcaccaaggtatatggatcggaggtattgagccgcttcaacatgtataacagtatcgccatcagcggtaccgtcgccgacggatactcgaccggcgatgcgatcaaggccatcgaggaggtagcggaacaggtgctgcccaagggttatggctacgacttcggcggacttacgcgcgaggagagtcagacaggtagcaacacggcgatcatcttcggtatttgcatcatcctgatctacctgattctgagtgctctttacgagagcttcctgattcctttcgccgtcattctggccgtaccgtgcggtctgctgggttcgttcattctggtcaagctcatcggacaggagaacaacatttacctccagacgggtcttatcatgattatcggtctgttgtcgaaaaccgcgattctgattacggagtatgcggccgaccgccgcaagtcgggcatgagtctctcgcaagccgccttctcggccgccaaagcccgtctgcgtcctattctgatgaccgtgctgacctgcgtgttcggtatgatcccgctggtaatcgcaacgggtgtaggcgccaacggtaactcgaccctcggttcgggcgtcgtcggcggtatgatcgtcggtacgttggctctgttgttccttgtgccgtccctgttcatcgtcttccagcacctgcaggagaaggtcaagccgattcaattcacgaatactcccgactggatgatcgaagctgaaatcgaagacagcaaaaaagaaaacgaagagaagaagtaaaccatgaaaaagttaatcatcatacttgccgcagccgccatggctggctgcggcatttacaagccctacacacggccggaagagatcaaaaccgacgggctctacggccagggggtcgaaacggtcgatacgatgaccttggggaacatttcctggcaggagatgttcaccgatccttacctgcaacaactcatccagcagggactggacaacaacaccgacctccagtcggcttactggcgcgtgaaagaggcggaagcgacactgaagtcggcacgcctggcatacctgccctcgttcaatttcgctccgaacggaggagtgagcagcctgactaacccttggaatgctacgtggacctacaccgtccccgtaacagccagttgggaagtcgatattttcggtaaactcaccaacagcaagcgccgggcgaaggctcttctcgcgcaaagccaggagtaccagcaggccgtccgcacgcaagtcatcgcttcggtcgccaacctctattacacgctgctgatgctcgacgcacaatacgagatctcttcggaaaccgctgaaaaatggttcgaaaccgtcaatacgatgcgggccatgaaagaggcgggcatgaccaacgaagcagcggtttcgcaggctgaagcgaactactactcgatcgaaacttcactgttcgatctggagtaccagatccgcgagatggaaaacagcctctcgtcgctgctgggcgaagctccccgcagcttcgagcgcggtacgctcgacgagcaaattcttccggagaacctggtagtcggcattcccgcacagatgctctccaaccgtcccgacgtaaaaaatgccgaatactcgctggcacaggccttttacaacacggccggagcccggtcggcgttctatccggccctcagtctgagcggtacgctgggttggaccaacgacggaggtgttacgacgctcgaccccgccaaatggattttcaatgctgcggcatcgctcgtacagcccatcttcaacgcgggcagaaaccaggcacagcttcgaatcgccaaagcgcaacaacaggaggccctgctgtcgttccagcagaccctgctcaacgctggagcagaagtgaacaatgccctcgccaaatgccagtcggcacgttccaaagtcgatctgcgccagaaacaggtcgcttcgctcgaaaccgccgtcgagagcacccagctcctgatgcgccatggcagcacgacctatctcgaagtgctgaccgcacagcaaaccctgctgtcggctcaactgtcgcaaatcaacgaccgcttctcggagattcaggctatcgtcgatctctaccacgctttgggcggcggccgtgatctcgaacccgaaacgagcaaatagcaatgaaacgcagggtaacacgcgaagacatcatccgcaccacgcgagacctcatcatccgggacggcattcgtgccgtccgggtggatgagatcgcgcaaaagctggagatttccaagcggacactctacgagttgttcagcgataaagataccctggtcggagagtgctgggacaaaatccgggaagagcaggagaaaaagatcgcaggttacctcttttatcaacccggttcagccctcgaacaggcccagaatctgatcagagagtacatcgatgctctgtgcatgatcagttgcatctcacttcaggagttgcaacagaaggtttcttatgccgactcctacgaaaaaaaccgtcgtttctggctggattcattcaccgaagtgttggaacattgcatcgccgacaacagtgtactgcccgatgtggactgtcccctgttcgccaaacaattgatgaacatgttgctcaacctctacctggaaggaggcacccggcaggaaatggacgctttcggatgggcattcctgcgcgggatcgccactcaccggggtatcgaatggctcgacggaaagaaattgaactcctgaactttcgccccggaataacgcaaccgacctgtttgggacgtaactccggcccgcgaaaaggaaaatcccgacaaagcgacctcattcgataaccgaactttacatcttacaaaaaaagaagaaaggcagcgtttgaaacgctgcctttcccttttattaacgcttgatcgaaaacccggtttaataggctttgttctggggatcgaattccgtccaacccgacatccatccgtcgttctcgtcggcgaaggctccgatgtaggtcaccttgtcgaaaccgttggcaaccagtggatcggtgaaagaagcggctccgcgcagcggactatcggagagcggaccgtagttcggattggcttgcaggctgttgggctgggagagtttcagatcggcgatcgcatcgaaatacttgttcgaagctatcgacttgaagtaggtcgaagagaaggactccttcgacttgtcgatgctgttcttgtcgccgttgtcgcaaaaaccatcctcgaacgatttgttcacgtcgctgcccaggacggtcatacccgccatatagacgttctgaatcttcaacgtcccctcggacgccgcagtctgcgtctgcgagcctttgtcattctccacaatcaaaccgacggggaagcccatcgctaccgagttgaaacagttcagatgagaattgcggcgcacttgcatggcagactggaactggcccagcttggaaccgttcttgggattcatatcgcctgcggtgatatagtcggaagtgttggagaatgctgcatcctgaccgaccggaccgacgaaggtcacgttcgaaaagacacaggaggtgaaaggagaagtggcagaaccttcgccgttgttatcgctctcgaaaccgttcgacgccgaggtgtcggcaatgcggggatggcgtacgcccaggcagaactgcaccttgccgcagaatccgttgtcggtatcgaaatcatcgtcccaggtgtggtaggaaaccaggtatttggcatttaccgcaccgccgaaccactcgtaggagtcgtcgttggaataggacacctgcacgtggtcgatctgcgtagccgatcccaccgaaccgaacgtgatggcattgatctcctggtcctccttgaagggatagccggcgaactcgcagcgcacgtaactcaaggcacccgaacagtcggcattgtcgctgcctccgtgcgtagtgcggggaccgccctcgatctgcatcgtacccttgttgttcacaccgcgaccgcagagaatgataccgccccaatcgcccggccgacggctgccggcaggcatctcggaggtgaagacgatcggctcgctctgcgtacctttggcccacaactggccgcccggctctacgatgagcgctgccttggtctccttgtcgcccttgataatcgtacccggagccagcgtcaggctcgcaccgtcggcgatatagcaccagcctttcaacaggtaagtacctttgggaagcgtgtagtcgcccttgatctcaaactcctgacgtccgtcgccgatctgggtcccgtcctcgaagagtatctccgtcagatcgccgccggacggatttccgccctcgccgctaccgccgttgcctccattgccaccgttaccgttctcgtcgtcgctgcatcctgcgagactcaacgcagccatcaaacatgctgcccataaaattttcttcataatttatttgattaaaaaaggttgattttacttcgactattttctcactcggtagaacccgaacgaatttctgcgattcacttaaaatttggccgtcacgctcagcgagaacatccgtcccgccgtgaactgtttggtgatttgcttgcgggacaccacatcgcctccgttctcgaatttcgggaattgggcgaactgcaccttctcgttgagcaggtccttggcgttgaacttcagctcccaatgcttgccgaaagatttgctgaccaccacgtcgagcgcgttgcgcggcatctcgtacatatccggaatatcgttgtcgatgctgccgcccacgctcatatcgctgcggccaatgcccacgatgcgcttgccgatgcgattatacaggacaccgaccgtaaggcccagtttgggcgactggtagaagagtccggcattgaccagatagggcgactggccctgcaacggacggtcgtgctcgaggctctcgtcgtcgaaatccacacggctcttcatgagcgaaccgttcagaaccaccgagaaattgcgcatccccataaaatcgaggtttttcttcacgtccagctccacaccgtacagattggcccggtcggcattctcgaacgtgtaagtataactgccgctgcccgcatcgagaatagccgtttcgatcggattgcggaaatgcttgtagaacacggccaccgagataccttcgcccgcagccggataccactcccagcgcagatcggcgttctggatataggccgctttcaaatcggcattacccttcacgtcgctgaacaggtcgaaatcgtaatagaccgaaggggaaacttcgcggaattcaggacggttggtggacataccgtaagcggcacgcagcaggtgcttgtcgttgatgcggtatgtcacattgaccgaagggaagggatcggcatgggtatagtttcgtgtttcgctgtcccagtccttgatcttggtgtacgaggtgagcgccatacggctgtattcgaaccggacgccggcataaacgttccagcggccgaagggcaggtcgatgccggcataagccgccgtcaggatgttgtcgcccttgtagctgttgcggttgtcgctgtcgtcgtagatatagagcttgtcggcgccataattaccgtcttgcaaaatatcgtcgatcacatcgccgtaagcgaagtccgcaggcaggttgtccgtgtcgaagcgatagaaataggcccgggtgcgataatcccgcgtacggtattcgccgtagagtccgaccttcagttcgggggcgaacgacgaaccttcgcgcaaggtgcaggagtagttgatgcccgccgaagcgatgtgttcgcgcaatttcataaagtcacgccggatctcgttctgatcgatctgcatttgaccgtagtgcgcatcgcccaccatgtcgttctcctgccggttgacgatgcggcggtcgggctggttcttgtcggcgtaggaatatccggcatcccagtccagagttcccagttcgagagtatgtacacccgctatctgcccgctgtacgtgctgcgagaggtgtagcaatactccgttttctcctggatatagagcgacgacatattctgccagccttcgcgcagcgtgagcttgtcctgtccgatctggttgaaaatgttacggaaatagtagcgattctttccgttcaggtaagccagattcagcaaggcgcccactttgacgttggtctggtactggtcgtcggtatatttgtagtagtattcgggtttgtcctccaccttgttgtaaaccccgtaacgggagttttccatattcgagaaggtccgggtggcatagctgtaattgagcgctccgttcagcgccagatcggcgccgttgcccaggcggaagctgtggccgtaggagaatgagaaccgctggtcgggaatcggcttgcgggtcttgatcgaccagtcgttgttgaagccgtgacgggtcatgtcggtaacgaaatccggatcgtcgttatcaaaagcacccgtaataccaccccgcacgccgcgcttgccgttgtcgcagccgaaccagtcgctgccgcttcccggattgtagagaaagtcgtggccgaaggtcgccgtgttgaacccgatcgagtaggagagggcgaagggtagttcacccggcgtatctttggtgttgatcttgacgaacccgcccgtgaaatccgcagggatttccggaacgggggacttcaggatcatgatgttctcgatctgccccgcagggatcagatcgaaggagaaggcccgcgaatcggcttccgagctcggaatggccgcatcattgacccacacattattataacgctgcgagagacctctcgccacgatgaatttgtcgtcgatgatcgagataccgggtatgcgtcgcacgacttcacccgcatcgcggtcctgcgtgcgggcgatcatctgcttcgacacaccgctcacgaccatcttggagttgcggacggcctgcatcacggccgcctcgctcgaaagccgccgcacggtagtcacgaccacctcgtcgatctcttcggccgagggttgcagcgaaatcagcggcagggtattctctcccggcttgatctgacacccctcgatcactacgcgctggtaggagagcatctgcacttcgatcgtataagtgcccggctttacattattaataacgaagcggccgtcggcatcggcgacggccccatacgtcgtattctgcaaaatcacggcggcgccgatgaccgcctcgccggtcgatgcgtcctgcaccgtaccggtcacaacagacagaaggggcgctgcaaccgtcgtgcagatccccttcagcatcaataacccaatcaataaaaatctattcatccacttattattttacagcggcaaaagtaccgggccgctgtttcacccgggctacaccctcgttacaaaagcgtcaaacaaccgtttcaaatccgttacacgcccgacgaaacagttgcacagtccatcgaaaaaggctacatttgcagccgattaaccctatttccgatatgagaaacctctcacgccacgcgggacccaaccgcatgatgttcctactccttatcccctgtcttctgttgtccgcacttcgggcaaaggcggaagaaaccgcacttcccgagggaaaaagaccgggcgtaacgcttcaggtcgaaatggatctggtcagcagttatatctggcgcggtgtttacgaagcgggccccagtctgcaaccgggactgacgctcggcataggaaactttacgatagcggcctggggatcggttgatttcacgtcgagttcatacaaagaggcggacctgatgctcagctaccggctcaaaaacatcaccttccacctcaaagacctttacgacgaaggttcggcctcggaccggaatccgcagatcagccgcaactacttccatttcggcgccgactccccgcaccgcatcgaagccggcatcgaatggcaggtatcgcgcaaagtccccatcacgctctcctggtacacgatccttttcggagcgcgagatgtcgatacccgggggcggcggtgctactcctcatacgtcgaagtagcctatccctttacggtcaaaaccatcgacctgaaaacgggcgtaggagccgcgccctggaaaacggcaggagagggcggagccaaaggttttgccgtgaaaaacgtcttcataaacgccggaaaactgtgggcggtcaaaagcatgggttccttccgaatcggactcttcacccatctctcctggtgtccgctcaaagaggacatgaactgcgtaggaggcatttcgctgcggatgtaaccgcaaaaaacaacagagaagcccttccgtcgatgacggaagggcttctctgtttcgtacaattacacctccggacgttccctttacggacaagaccggcaaaaaaacgagcttattgcatcacaagcacccaattcaccgcaaaaacagactttatcgttccataaattgaacgaaatatattattttttatacttttgtatatacttcttacaaaaaacaattaacccgaaaacgctatgaaacaattcttcctgatcctatccggcctcgcattgctgacaggatgcagcagcaagaacgactctgtcgaaggccccgtacaatcccgcatccgaatcgctccgagcatctcccgtgttacggggctcaatttcgacaccggggaccgcatcgggctcacgatcgtcaaatccggtgctaactactgtgaaaatacgcctctgcgtttcgacggtacggtcttcgtttcggacgacctgttctggtacgacgatccgagtgaaaaatcaaatcttacggcttactatccctacctagcggaaggagctccggcgagcttcaccgttcgtgccgaccagaagctcgccgccgatcacgaagcctcggacctgctggcagcgacagcgacggacgtcgtaccgagccaaacggccgtgaatatggtattcacccacctgctcaccaaaatcgtgatcgatattacgaacaactccgccaatacgatcgaggaagtcaccctgaagggcagccgctgcacggcgaccgtcgatctttcggcgaaaagcgttcaggtcgatgcttcttcggcggaaacggatatctatccctttccaacggtgaccgcaggacgatatgaagccattctcgtaccgcagcgggcggcactcgaactcgaaatccaaacttccgacggcaaccggcacaccaaaacattccaggcgaccgacctgcaatccggtgcggaatatgcgatcgaggcggtaatcagcaacacgaataagatccacgcctccatcagcggcgccgtcaaaggctgggaggacggaggagcgatcgctccggtcgaagacgacctgccggaagattccgacctgctggagtacgcaggcgtcaagtatcgcatccggcaactcagcaacggtacgacctggatggcggaaaacctgcgctacattcccgaggacaagcgcgtttcctcatccccgtccgaagaaaacggcatttggtatccgtgtacgacctcctttaccgcatccagcgacacggaatacatccaacggcaaggtttgctctacgatctggctacggccgtaggggaacctgttactgcggacaacttccgcaatatcgagggcgtgcaaggcatttgtccggaaggatggcaccttccgacccgggcggatctggagtcgcttatcgccatgaacagtgagctcggcagctccttcttcacctatgccgggacacgcgacccgagcgggaaatacatcggatcgttgatgtccgggaatttctccaaaggttacctgctctgtacgagtaccgaaagttcggtctatactccggaggatctgaactaccaatacctgctcttctcgaaaagcaaccaggtaaacataatcgacatagactgtcgctcaggcatgccggtacgttgcgtaaagaatcccgcatccgggaaatagccggcacgaagaaggatcgcggaccgacgcagcgcacaatacgaccggacgtttccggcaaagcggcaacgcccggcaacaacgatccaggaaaaaacgtcggcaacaggaaggagagccactttttaagcggctctcctctttattcattgccggtaataagacttatccaacccgaacgcatagctatttctgtaccgccaggtcagcaagaccgcaacgaaagccagaccagcactcaagatgaaagggaagcgttctccctgcatgtgcagaatgtttcgcaacaggtcgataatgaacggacaaagaacgatcgccagataatttaccgacatcacgaccgaaagggccaatgtcgccaattgcggtggggccgccgcagccgccttgtcgtaaataatcggttgaataatgccgtatccgagtcccacgagagtgcatcccgcaatcaaccagaaatgcgccttgaagagtccgataaagagcaatcccgcacagatcataatcaacgaaaccagattgacactgccgcgcagacgccggatgatcggggaaaggaaaaagccgggcaacatgatagccaggaaaaacaaggacaccaaaagccccgagaaggaattttggttgccgtgcggatccaccaggaatgaaatgtagaaggtgatagccaatgccaggaaagtcgccagaaaataaaatcccatgaccgcagccagcttcggccaatcgaccttcttgtgtttcagctcatcgctcccgacaggttccggagcagcgggagtcctgcgaatgaaaaccgaaagaatcaacggaatcgccggcaacgtatataccaggaagggcagatgccaatcgacattagccaaataacttgccagcatagtagccaacaccagcgtgagattattgatcgacgaactgtagcccaactgccggacacgataatcccccgtaaaatagtccacgatatatcccgtcgataaaggaatgataataccggcaccgatacccgtaagacaacttaccagaatcagaagccacatttggttaatgaaaagacaggcgaagccactcaggaaaaagaccgtaagcccgaccacaagcagcttgaacttattcccggttacagacaaacggcctgccagcagcataaaaggaataatcaacaccgaaggcaacgaagtaagcatctgtatctccagatcggtcgcatgcggaaagaccttgttcaagtcgccgagaataggggagatggcaagtccgggcagcgaaacgacggccgataccgaccagaccgccaacacggtcatccatggaatggttcctttaccggtttgtactctcatatttgcagacattaaaaattcttccccaaagaggaacaactgttataccaaaaaaaatcgccggagcggaaactccggcgaaaataaggtatattgattcggaaaaaagatattattcccttacgcaacgaacctgcaaaccattggctcgttgatagttccgtgccggaacaaattcactcgaagcagcatcgtccgtatcgagcgaaaaatagaggcccgaagcgctcaattcgtcggttcccaaaccgcttgtccaataacaaccgatccacggttgcgcgtccgcattgctgtttacattctggataagccccgtcagataagggcgacgcccgcctccgagaaaaaatgaagtcatcgttccgtcggtcaggttccagccgtaagcctcgcgcaacgcctccgtttgctcctggtcatgatcgtcgccgatcataaaatcggcataaacatccttgtccggaaccttccatcccttaggacagggatcgtaaacggtcttgaccgccccccacaactcgttgtcatggtcggaatagagccaatcgtaaccggactcctcgactcccagaataaaactcatcggataggctatggcatactccatcgtgcccgtttcgggggtggattccacatagtcaagataagtaagacgcccgttgatattatacatcttatgatcctccgcaaatgcacagttataatacgccggcccgatcatcggggtcggacgtccccactggtaataaagtccgtaggagagatatatgtcgtcctccgtggcattgccgccggctccggcacccagattacgggtcatgaaaacatctccggcagccgaagtaaccgactccgccgaaggatcgtactgcgtaacccacacatgccaactccaaaccaccttatcctgggcatcgaaagctgcgatcaatgcgtttccttcgataaactcacctttcttatccgccgcgacgaagaacgaaacccgaccgtcgtcgagtgtcaggttctcgatcatatgcgacgtgcttccccacataagttctacccgagccgtaggaatcttttcgccgtttccctttacggtaccgtcgaaagtatagtaggcattggcatagttggcgatataacagttagccgtctgccccgtcagatcgacggtccgcccgattccgaccctcaaatcggcggaaacggcctttccgtcggtatcgtaaccgaccaacgtcaggactcctcccgtttcggcattggagtcatcacttgcgggggccgtcacggtcatccggctcgtctgcaaatcggcggtcaccgtccagccttcaggcgtatcggtaatgttcagcttcacgatattcacagccgtaaattctaccgaagccgttcccccgggcttatcgaccatacaaacatcacgagggaaatagagggttcccaccggtccgtcgtcgtcgctgcaaccgacgagattcatcgaaacggccaggacgattcccaggcataaaaagcggcacacaagttttttcatgttcaaaatccaattttgctaaacgttacaaagatacgaataagccgagcgcaaaagcaaattttattcgcgttttgccggggcgaagtatctaagacgaagtcaaagatacgaataagcctaatgcaaaagcaattttatttgcgtttgaccaaagccaaagcatccaaaacgaagccaaagacagggaaagccgagagaaaacgggaacctgtcccggttttccgaagcgcatcctatctaaagaccatgatgtcaaagatacggaaaggcgagagtaatcgtgcagacttgtacgcaaaaatcgccgaaccgcaccccatcttcggcaaagatagtacaaaccacatacagaacaaacaggtcctgtcggaacatggccttattttcgcaaaattaacctcgacatttttactaaaacagctaatttccgattcttccgacaacagaaattccgttaggaacaattcttgcaaaggtaacgtaacaaatcgacttaaaaatacgcatccgatatggcaaaaaagacagcatcgccccacgaatcatcttccaaagggaaccaaatagccattaccgtcaccgaaaagggtccgtacctcgtcaccggaaacccgccgctggccatgcaattcatcatgcccgactccgagggcgagagttggtattttcaggaagggcggcatttttcgacggaaaaagaaccgacggcattgtgccgttgcggtttatcccgcagcaaaccctattgcgacggctcgcacctcaaggaggaatgggattcggcgatcacctccggagaggaccggattatggacgaagtagagatcaccgagggacaacgggtgacattgaacgacaacgaaaaatactgtgttttcgcccgtttctgccatccttacgggggtgtctgggacctgacggccgcatccggcgattcgcagtcccgcaagctggccgtccgcgaagcttcgatgtgtccgagcgcccgcctgaccgcctgggacaaccgcacgggaaaaccctacgaattcatcttcgaacccagcctgggattgatcgaagacccggcgatcggcgccagcggaggactctgggtacgcggcgggatccgcatccaacgcgaagacggccgaaccttcgaagttcggaacagggtagtgctctgccgctgcggacactcccgcaacaagccctattgcgacggtgcgcatgccgccgtcaaatggaaagacgggctggagggaacccccgacggagaaacgctcccccgaagcgttgccagtgcgaaaatcgaaacccactgaccggcctgccgttccattcgaataaaatagagtccaccggcacgctgtacggcttggctcgatatacttcggccccgaaacgggacgctccattctacaatacgctccgatagattcccgcccatatcgataaaagaaaccccgttgagatttcaacggggtttttcatgcgaacaacgattcgtcgtcctatttcttatcgggtttggcgatcgtttcgcgcatcgtagtatccgccatgatgttcttcatcttatagtaatccatcacgcccagatttccgctgcggaacgcttcggccatagccagcggcacttcggcttcggccagaatcaccttggcgcgggcatcctgcgccttggccttgttctcctgttcgagagctacggccatagcacgacgctcctcggccttggcctgggcgatgttcttgtccgcttcggcctggtccatctgcaactgtgcgccgatgttcttacctacgtctatatcggcgatgtcgatcgaaagaatttcgaacgccgttcccgcatccaatcccttctccagcaccacgcgggagatcgaatcgggattctccagcacgatcttgtgcgactgtgccgagccgatcgacgaaacgataccttcgccgacacgtgccagaaccgtttcctcaccggcaccgccgaccaactgcttgatattggcccgcaccgtaacgcgtgccttggcgatcaactgaataccgtccttggccaccgcagctaccggcggagtattgatgactttgggattaaccgacatctgcaccgcttcgaatacgtcgcggcccgccagatcgatcgccgtagccatcttgaaatcgagcataatattggctttctgggccgacaccagcgcatgcaccacattggtcacgttacctccggccagatagtgagcctcgagctcgttgggattgagttccagaccggccttcgtactctcgatcatcgacgatacgatcgtcgaaggcggcaccttgcgccagcgcatcaggatcaactgcaacaggctgatccgcacgcccgacaccagcgccgaaaaccacaggcccacaggaatgaagtaaaaaataagccaaatcgcaaagagcgaaacgaagacgattagtgcaatgataccgatttccatcttttatttatttaatgtgtttgcgtacgattatattgaaattttcgaatccgacgacttcgacctcccggcggggatctatataactgtccatggacttggcttcgtaaatcttaccgccgatctccacctttcccatcggagccagccgcgaaacggtcattcccgtatctccgacacggacactctgctgcaccggttcgggcatcacagaggaatcgactttctgtttcagggagaaacggcgccaggttttggaccgcagcgaaacgacggtcgccgcgaacgaaaggatcagaacgacggcgacgacgattccgcccgccaaaggaccgtaatcccggaaggcgatataaatggcgcctccatagctgaccagcgcgagaatcgccccgatcgatacgcctggcagcaggacaagttccgccaccagaaacagtaacccgaaaaagaccaacagaatgataaaaaacatattcaccgtgttaaaatcgctgaaaaagatcggaataaccggctcgcaggtcgaatttcccccgattcaccgatatacgtccgaatacggacctatttctttcgggtgaagatacgcaaaaaatccgattatttagcaatttccgtcacttttaccgataattgaggatcggcggcgcgaatcgcggcagccgcctgatccgcgacagccttgttgtcgaactgtccgacgacgaaaagatccgcccccacgcgggacaggtcgcagccgggagcggcctgcgcaatcgcctgcttcacggtatccgacagattctgctcactggagatttccacccggaaagcggccatttccgcctcgggagtccgtgtcagattggtatattccccatcgtaccacacaaccagttccggacggcggaaccctttcgcccgcagcaactcctgtgcatcgacggcttcggccttggtcgcgaaacctcccgcgaaataacggtagcgccccgcgtcggtcttcaatacatagagcggagaagcgctgcggaaaatggagatattctgtttgtacttatactccccgagcaggattcggtagatcactccgtgctcatagacaggacagtccggaatcggtttcttatacgtatagcgccccgcaacaaattggaccggttcgtaatcgaggaaatagcgttccgtaatctccggcttcggaagacgaaaatctatcgtctgaagctgtaaagccacccgcttcaaggaatcggatgcaagtcccaaccccagcagccgggcgatttcccgctcgtaatccgtcaaatagcatttccggatataataatcggggagcgcatcgacaagcccttcggcctgggccgcagacatctgccgccgcacatcgtccaacgccttctgctggcgtgcctgctgttctctgcaattcaacttatccaggatataatcgtaagcatagctcttgttatcatacacatatccccatacggccgtcagcgaatcccgcaaaacccggcccaagttggctaccgtgcggtaacgaccgaaaagatcgacagccgcctgctccgtacgaacggtatcgtactgctgcttcaaaagagtctgctgccggtaattctccagcaggcgcccggcacatccggccacctccgcctccatgcgctgcgcccggagcagagcctcgtaatcacgtgccggaagattctcacggaaataaccgttgaacacgagattccgactctgctgcgattcgggaatctgcgtgataagagatttttccgtttcggccgccggaacataatcgggatgttcggtcagccaggcctgctcgatggcgttgatccgggccgcgacctgcgtacggagtccctgggcagagagcatttcgctttcgagcgagagaatctgagcgccgtaagtctcctgtgcggccggattttcccgcagcatcgcacgcagtcctgcaatccgggtctgcatctcgtcgatccggacctgcaaccgactgtcctgttcccgaagcgcaacgtattccgaattcgactgcagggcaggaataccgggccccgccgggtcggaagctcctcgcacgataacgaccgagaaggtcaaaaataaaccgatcaataacttatgccacatcatttccaccatctgattaacaagaattgcaacaatccgaatatctccagacgtcccaacaacataagcgccgtgaagatgaatttcacgatcgccggcaagtcgccgtagttggccatcgaattaacccctccaaatcccgggcctacattgccgatagaagccacgcaccccgaaaaactggtcatcagatctacgccgaaaagcgtacagagaatcgttccgatgagaatgagaagcaggtaggctacgatgaaaagcgacaccgtatgcagcacgcccgcttcctgaatcacaccgtccatcttgagccggatgacggcattcggatgctgctgctgcttcacccggatgtaaagcatcttcagagccatcaatgcccgattggccttcataccacccgacgtggaacccgcacaggcacagatcaacgaacccaatatcagcaaaatgattgcgaacggagtccacaggctggaatcggccgtagcgaagccggaagtcgatgtcacggaaacaaactggaacgacgcgaaacgcagcgatgacctgaacgtaggataaatatcggcgatatataaactcagggcgatcagcaggcttcccagaatcaacattccgagataaaacaaagtgacttcgctgcggaaaatattgttgcgcttaccggtaacggtcgcatagatcaaaccgaaatggatgcctgaaatacccatcgcgaagatgagtaccatgtcgatcatcgcactgtcgtaaaaggcgacactggtatttttggttccgaacccgctggtcgcacaggccgacatcgaatgacatacggcatcgaaccagttcattccggcgaatttcagcatgaaagtgaaaaatatcgtaagtccgacatagacgaacaacaggatctgaaccaccatctgggccctgtaacgataattgtcccgggccagggtggacatctcgacactcgaaagcatcattttgctggtacccagtgcaggcaggatcaccagcgcgaacatcaccacgcccatacctccgacccaggtcgaggacatccgccagaactgcaatccccggggcagcgcctcgacattttgcaaaatcgaagatcctgtggtcgtaaagcccgaaacagtttcgaaccaagcatttatcacgctgaactcaccgccccagatcaggtagggaaacataccgacgacgcaggcgagcaaccatgaaccgaccacgatgcaaaacccctccttattggtgatccgatcctgcttttccacgaaaatgagcgggaagccccccaacagcgccgtcagcagagccgagagcagcaacgggtaaaacgcggaatccatgtggttgacataggagatccctgccgaaacgaacataaagaacgccaacaacagcataatcattcccacgtatcgcaatatcacattgacccgcatgactctctacgctttattttgtttcagcatggcgacgagtgcctcgattttttccttgagttccaggatttcgtccttacactcggctttcacggcaaagggtatcctgaaagtcaaatactgtccgagccccttgttcatcgccacgatcggattgacacagtagagcatcgtaaagtaaaagagcatcaacactgtagcgatcatcaccaccagcgatatcagcacgggagtaacggcccggtaagcgtttttcttgagctgctcggcccgcggagccagcgaactctgcgtcgaagtcatataatcccgaaccgccgtgacgaccttttcgtactgtttttcataatattcgttgtaccacacctctcccgactcgtcccctgccttcggggattcggtcgcgagaaacatcttggtcagcaccagcagctcggtagtcgcacccgtcagggagtcgagcgccgagcggtccaacgctcctttctgggccgtagccaccgcatgttccaaccgctgcattcccgtgcggcacaggctatcgtaactcgcatcttgcaggatcgccagatgcacgatcgccacgttttgatcatgcacggcgccgagcatctccttggcgagctccacattccgctggttggctttcaaaatctcctcggtatcataactcagatgactcagctcgaaaaaagagatcatccccgaggcgaacaacaacccgacgatactcaggaaagcaatggacattcttcttcgaattcccgtcatacgcatttaactgttaaaatcgtcccaaaccgcccgtatcggcagggcagtccccccgcccgaacatatccggagcgatgcaacaaatataatgcaaggcaagggcaaaagcaaacttgtttgaatcttaccgagctacaagccgtattccgaaaaacagttcaaggcggaaccaatgccgaatccggcagcctacaccgcaattcgttcttacaagaagaaccggacggcaaacaagcccagctattttcactcgcccgaaatacaggcccttttcgcaaaatgcaatgcggcccggaggcaaggccgcatccggccggaatgccgaaacgaaattcacccgaaccttcgcctgatacaaatatacgaagaaatcgctaattatccacgatttcgccttcgagatcgttcgcatcgtccatacgccccagccgtacccggcaaatcgtgttgatccggctccgatcgtagaggaccttgacccgacggtagttgcccgtatagccgaacatcatcccgccccgcatcgtgctctcgaacaacacctcgtccgtcgtaccttcggcccgggcgcagaattcgccgtgcagccggcggcagagcttttccagctcctccacacgccgtgtagccaccgaaggctgtaccttgtccggaaaatcgacggccggcgtgccggaacgctccgagaaggggaaaatatgcagataggccggtgcgaggcgctccaggaactcgtaggtcgtacggaaatcggcctccgtctcaccgggaaaaccgacgatcacgtcgatcccgataaaggcgtccggcatcaggcgccgcacagcctcgatccgctcggcgaattttgcggtcgtatagcgacgtcgcatccgtgcaagcacactgtccgagccgctctgaagcgggatatgaaaatgatgctggaatttaggtgacgaagcgcaaaacgctattatctcatccgttaaaagattcggctctatcgaagatatacggtagcgttcgatgccttcgacttcgttcagggcccgcagcagatcgatgaaccgctcacccgtcgtgcgtccgaaatcgcccgtattgatccccgtgatgacgatctcccgctgtcccgcagcggcgatttgctcggcttccttcaccagatcggcgatcggcatattgcggctggcgccccgcgcatagtggatcgtacagtaggcgcacttatagtcgcagccgtcctgcactttcaggaacgcacgggtacggtcgccgctcgaaaaagcggcgaagaaattggtcagttcctccacatcgcaactggtgaactgtgcgggtcccttgccagcaagagccgctacacgcctgaaaagttcgcccttgtcgttgttgctcaacaccagatcgaccccttcgatcgaagcgatctcctgcggtttgagctgggcatagcaaccggtgacgacaataatcgccgccgggttgcgccgatggattttacggatcaggttacggcatttcttgtcggcatgttcggtcaccgagcaactgttgatgaccgaaatatccgccgcttccgaaaccccgacccggatgaagccgcccgcttcgaattcacgggcgagggtagagctctccgaaaagttgagcttgcagcccaaggtgtgaaaattgactctgcgtcgctgcatatttctgctgtaaatttgagcgaaagtacgaaaaactatgcgaatccgaccattttatcggcaaaaatcacacacacgtccggataaaagagcaggggcgccctgcaacgggcacccctgcgacatacatcaaaacagggcgatctactcctctctcacgggttgcatcacggctccgcccacaggctgtacgggccggttttcccacagatcgccgaaagatctcatcgaccggcaactgccgcgcgtgtgcatggcggacggcaactgcggtttgttatcggtcttgatccactgcagggcaaggtatccgagctgatccatcatcgtaccgaattcacccggataaatcgccgaatcatcgatttggacatcgggtgtgaagccatccgagtaatcccggaagcccttggcattttcaatatagaacgaaacggggaaaagcaggaaatcgtaattgtgaaacgagcggaccacaccttccatacctacgttcttaccgttagtgggcatcccgataagattgacctcaatatcaaggccgcgcagaccgttgatgaccatttcgctcgccgaagcagtcgtttcgctcacaaggacatagattttcttcaagcccaaagcatgttgcaaggctctttcgatcggttcgtacacgctttcgaacgtctccttgacgccgatcttgtagtcgccactctctccggcctccgtgcggtcctcgttgaacgtcatatgagcatagagctgtcccttgtacgcctcacctgcgataagcgtaccgagcacagtactcgaaagcacatcgccaccgttgttgtaacgcagatcgaggatcaggtcggtgacattctgtgcacggaaacggtcgaaagcggctatcaactcctcatcgtaatcgacatcgaagcccatataaagcagataaccggccttcttgtccgactcttcgatttcgaccactttatccatatagatagccggactggtgaaggtcgcacttccgagctgcacattccctttcggggtaagcacaggagtagtcccgttgtcggtccacgtgacactgttcaccgtaacatcgaccgcaccgtcgtacacggcctggcccaaactctgatagttgctttcggttacctcctcgccattgaccgccgtgatgaagtcgccgcgcacgagaccggcttccgcagccggtgttccgggtatgacgaccatgaccacaattccgatataatcgtccccgaggcgggtcgcatccaacagatagatacccgaaccgatatacgcctcgccgggagcacgcgacaggggcgcatcgctttccagacgcgaatagtaatacatacgtttctgcccctgccaatgaccgtcttcgcggttcacatcgtcctgggcggctacaccgtcgagaatcgaggagaaaaagaagtcataacaaagactgtaatcgagcgggacattctcgatggcacgattccagagataacggctcttcatgtacccggcaacccattcgttcacgctgcggtattttccgtcaccctgctcactcaatcctttgccctgcttcaccacgaacgaaaccggcgaagcatatccccacacactgacggtaatcgtcgcagaacgagcctcggcccgggtatttttggctactttcagacgcagcaacgattcgcctgccacacccgaatcggtttgcacttcgcaccagtcagccgaactccgggcagtccaatcgcctgcggcggcaaacgtgtagttaagcaccccgccttcgatctcgacctggttttcggcactccaggctgcatcggcgattccattgcccgcgatcagctcttcatcgtcgctgcacgacacgccggccgtcagcatcagcagtacgaccagcatccatccgaataaattcttcataacacaagttttttaggattaacgcatcaatcgttcagccacagctcgacggttgtccactgcaggtgacgctccgaggtttacggtcacgcgctcgggcatggagagatgtcgcacgctcttcacggcagcaggctcgggcccctgatcggcatcgcgcttcagcacgatctcttccgacgctgcgaacaccatgtcgccccaccactgactcgtacccgacaacacaccgggatagtaggtaaaggtaccgtaatcggtttcttcgaccaacttcttgatcgtcacagtcagatcatccgacacctcgacagggaagctgcgtaccgcatccgtatagcggtcgctagtcggacgtttggcgaaagcgtggaaatagtattgcttaccatcgaaattcaacatcgtgtaatccagttcgtcgttcacaggcagactcgtcgaaatcgtctcgtcgctgttgaactcgatgaaccacttcggcccgtaattcgcattggcctcctcttcggtcgctgcccagccgttggcgagcagctcttcggggctggcataatccactccgcacggcgcgaagcccagaacgaccagacggttcagatcggaataggctttctcggtagcttcgttcacacccgtagcgatggtaacggagaaagtgaccggatcaccgttgctgtctttggtcgtcgcagtgtatttgccgggcagcttcgcacgcagctccccgccttgctgcggcggtaaaagggtggtgaactccactatttcggaaacgcccacaccttctgcgttggccgcataaacgccgaactcgtactcggtattgggcagcagctctccactctcgatgacaagtccctcttcgctcatagccgcagccacctcctgttcggtaagctgcgtaccgttgttgtaaatgacatcgccggccgtaagattctcattaccggggcggccgagcacttcgtcgatggagcccttcgggaaaacaccggccgtcatcgctaccgcataagtcgcattgaccttgaaagcggccttgttccacggagtttcgacagtctgtgtttcgacggccaaagtcggtttggggcctgtaggctctcccgtcgtgaagtcgtaaagcagaaccttttcgcgcaactccttgtcgaagcccacgatacccacctgatattcggtattgggtttgagtcccgtcgcattgacggtgatagccttcgtactctcgttcgtaagatcgtcccagtggccgatgatcatgcgacgcacggaagcctctccctcgaaagcggtataatcgaaatctgcccgagaagcaaccaaatagcggaaacgctcgattccctcctccggctcgatggcaatatcggccgtcatcgaaccgatgttacccacggaaacctcgaagtcgtaaggcgcgacaccggccttcttggttttgaagaggagcgacttcacagccgactctgcgacctggccattctcgtccacttcaccggcaatgatgataaactccatgtcggaatagatatcctgacgaaaatcgacgatatcgaagaaagtggtatcgaaattataggtttgatcctcggtcgcttccgcaccgaaagcacttacatacgaatgcaggcttcctccgattaaacttacgatgtaatcgtagtcggacttcgaaagacagacgtgcttgtacttggtcaccccttcgggcttcatgatatggtaggagaaagaggtaagtccgacactttcgagcgtaatcatctcggtatagggaacatgcgtgtcgatcacctcggaagcgagatcgctgtaaactaaaggattgatgttgcgtaccgcaacataaagattgtattccgtgtcgccggcaagatcgttcagatcgacctttactgttttctctccttcgaaataacggacaggtcctctttcgaagagcgcctccgcatcggcgatcgtttctgtggccggcaatacggcatagacatagtcggaggcattgttcgtattgattgtaaatgaagccgttgtacgatttacttcatctacgctgacatcaaccgtgggggggggagttgtgggtctttgttttcgacaccgtcatcactgcaccccgacagtccgcacgctgccagcaatgccaatccggtcaaaccgagaaataaagatgtacgcataaatgtaaaaatttaagagattaagtaattggttttgcgaatgccgaagaacatctgaacaggcattcgtattcaaatgtacgaaaaaaaaacgatatggcgtaccgaatattcgattttttaatgcttattcgtaaaaagcatacgaattccggtgtatgcgccgcctgtcttccgaccgataccgctctctgcggcaacaaagcacgggccccgcaaatcggacggaacaaaatacggatgctgcgatataaaacggctcccggttctatttttttgtaaaaaatccgtaaatttgcaaactaatgattagcgcaccatggagtttttcaacgaccttgtccgatacagctacctcaatcacgctttttgggcgtgcatcctgtcgggcattacgtgcggtattatcggtacttacgtcgtctgccggcggctggtcttcctcagcggcggcatcacgcactcctcgttcggcggactgggcatcgctttctacctcggaatcaatccgattctgggcgcgatggtcttcgccgtcctctcggcactggggatcgaatgggccaacgaccggggccgtatccgggaggattcggccatcggcatcatctggtcggtaggtatggctatcggcgtactgttcatgagcctgcgcccgggctacacatcgggcgacctctcgaatttcctgttcggcagcatcgtaacggtcacccgcaccgatgtccaggcgctcgccgttctgacgctcgtggtaattgtcggcacgctcctttggctgcgtccggtcatgtacgtcgccttcgaccgcgacttcgcccgcagccagggaatcccgacccggctgatctcctataccatgtcggcactcatcgccgtcacgatcgtactctcgatccgcatcatgggcatcgtgctgctgatctcgctgctgactattcccgtaacgatcgtcaatacgttcactaaatccttccgcacgctcgcaccggccgccgcagccgtcgccgtcgcggggaacctcgcgggactcgccctgagctacaatttcgaagtttcgcccggtgcggctataatatttaccctgaccgttacgcttattttagtaaaactgctaactttgctcgtcaaaaaacgccgccgcgccgatgaaaaccatctataaactcgttctcaagtcctatctgggacccatggtgctgacgttcttcatcatcatgttcgtgctgatgatgaatgtactgtggcgctacatcgacgagctggtcggcaaaggactcgatcccggtacgatcatcgaactgctctgctacgccacgatcaacatgatcccgatggctctgccgctcgccacgctgctggcggccattatgaccatgggtaatctgggcgagaactacgagctgctcgctatgaagtcggcggggatgtcgctgcctaagatcatgaggccgctgctcgtggtcgtaagtatattggctgtcggcagtttcttcatcgccaacaacttagtgccatacgccaacaaaaaatttttccgtacgatatacgacattcgccagatgaaccagaccctcgagtttcaggacgggctcttcttcaacggcatcgacggcatgagcatccgcgtcggacaccagaatcaggaaacagggctgctgaccgacgtgttgatttacgacaaccgcaacgcatcgggcaatatgaccacgaccgtcgccgattcgggctatatccggctctcggacgacaagcgctttctggagatcacgctcttcaacggcgaacgctacgaacagacccgaaattcgagtcagtggtacaacaaaagttccctgcaacgcaataaattcgagcttcagaaagccaatatttccatttcgggattcgaaatgcagcgcacggatgccgatctgttcaacaacgcccagaccaaaaacatctccgagctgcaatacgaaatcgacacgctgacacagcaggtcaattcggcgacgacccgatcctatgacccgttgctcaaggagcgtatcttcgtgcgggatacgaccgtcataaccgaccgaaacgattcggtggtcgtagaaaaacgggatttcaggccgatggatgccctcgactccctggcgactctcgacctgcgctccaaggaccgaatctggagccaggccgtttcggccgcacgcaactcccggtctatgttctcgttcgacgaatcgcaggccaaaaatgcgctcaaccagctctaccgcagcaaggtcgaatggcacaagaaattggcgcttccggtgacgatcatcatcttcttcctgatcggagcaccactgggcgctatcgtccgcagaggcggtctgggtatgccgatcgtaatctcggtcatcttcttcgtcatctactacattatcagcagttcgggcgaaaagatggccaaagagggtacatgggaggcattctacggcacgtggctctcggccttcgtactggcgcccgtcgccatctacctcacatacaaggccacgaacgactcggggctgctcgacgtggattggtacgtcgtaaaattcaagaaaatcaaggagaagatctccgggatattcgcacgtttcgcacataaaaacaaaaaataaaatagaccatgaaaaacgaaaaagtactgaatacgatagaagaagccatcgaggatttccgccagggaaaaatcgtcatcgtcgtcgatgacgaagaccgggaaaacgaaggcgacttcatcatagcagccgagaaggtgacgcccgaaatcgtcaatttcatgctcaagaacggtcgcggtgtgttgtgtgccccgctttccgaagagcgctgcgcacagctcgaactcaacatgatggagccgaacaacacctcgctgctcggcacgccgttcaccgtgacggtcgatctgttgggcgaaggctgcactacgggcgtttcgatccacgaccgcgcggcgaccctgcgggcactggccgacccgaagaccaaaccctccgacctggggcgtccggggcacatcaacccgctccgagcccgtcagaaaggcgttctgcgccgtccgggacataccgaagccgccgtggacctggctcgactggccggactgcaacccgccggagcactgatcgagatcatgaacgaagacggttcgatggcccgcctgccgcaactgctcgaagtggcggagaaatacgggctgaagatcatttcgatcgccgacctgatcgcctaccgcctgcgcaacgaatcgatcgtagaacgcggtgaaacggccgagatgccgaccgaatacggcatgttcaaaatcaccgtgttccgtcagaagagcaacgggctggaacacatggtgctgaccaagggcgaatggaccgaagacgagccggtactgctccgcgtgcactcctcgtgcgccacgggcgacattttgggatcgtgccgctgcgactgcggcgcacagctccacgaagcgatgcgcatgatcgaaaaagagggcaagggcgccgtcgtttatctcagccaggaaggacgaggcatcggactcttcaacaagatcgcagcctacaaactccaggacgaaggactggacacggtggatgccaacgtgcgcctgggcttcggcgtcgatgagcgcgactacggcgtgggcgccagcatcatccgcgaaatggggatcaaacacatgcgtctgatgaccaacaatccgctcaaaagagtagggttggagggttacggcctgaagatcgacgagatcgtaccgatcgtcatcgcccccaacaagtacaacgaacgctacctcgaaaccaaacaggagcgcatgcaccacaaactcaacctctgcaagcattaaaatacaaagatattaccgaagaatcgtccgaagggattttctcggttttgccgcagcccgaaatccttgtccgcaaggcatgaacggaacggatggcagaaccgcgaatggaaccgccggacagccggaagcgaatttccggacagcaatatttcaacgaaaatgaacgccaaggatttgcgaatcgtcttcatgggtacgcccgaattcgccgtgccgtcgctgcgtgcactggtgcgcagcggctacaacgtcgtcggggtcgtcacaacccccgacaaaccggcgggacgcggacagaagctgcacgaaagcgacgtgaaaatcgcggcccgggaactcggacttccgatcctgcaacccgaaaaactgcgcgatccggccttcgtcagtgcgatggaggagttgcggcctgacctgggaatcgtaattgccttccggatgctgccggaggttgtctgggcgatgccccgactcggcaccttcaacctgcatgcgtcgctgctgccgcaatacaggggtgcggcaccgatcaactgggcgatcatcaacggagaatccaaaacgggcgtcaccactttcctattgaatcacgaaatcgacaagggagcgattttaggccaagtggaaatgccgattcagccagaagataacgtgggcactctttatgacaggctaatgaccgtcggagccgatctggtcgtgcagaccgtcgaacggatcgctgccggggagatcacccctgtcgtacagcccgacgaagacgcatcgctgcggccggcgcccaaaatcttcaaaaaggactgcctgatcgactggactcaatccggaaaacgcatcatcgacttcattcgcgggctgtcgccctatccggcagcctggacccggctgctgcgagaggaacaggaggcgaattcggccaagattttcgaagcgcacttcgaaaccggtggtccggaagctccatgcggcacgatcgataccgacaaccgcaaatacctgcggatccgatgtgcggacggttggatcgacgtcctctcgctgcaattatccggcaagaaacgcatggcagcgcaagagctgctgctcggattccgcgatgcaaactcctacgtctgtcgataaaacgccatctgcaatcggaataacgaggaaatccgaagaggattttttagacaggaagcatcgaagcccggtcgaacgcccggcaacaaagcaatgaataaaccgaaacgataaataaaaataagccgtaaaaatcgcataatgctcaatcggtttactatatttgtaatcggaacataaaaccattttgcctatgagaaaataacagcacttctattcttcagtacaatacgtcatgccgtccgatagaatacaggtatgacgatacatataaaaagcgttagctttatttcttgctttctgaaacttcgcaactttcaaaaagtctgacaagagtaaagtgtaaacgctcacgttcaacgtgggctttactcttatttgtcagacaaggtattgcgaagacctcagaaagcaaataaaaagtttagcctgcgttttttatatacctgtcaaacaataccattcattatttaactcaaaaaaattcctatgaaacgcctgattttcataattgcttcaatactcctcggacaaactgtctgcgcacaagacatcatccagaaaaaagatgcgacggagatccaagctaaagtgctgaaaataaccgacacggaaatcgaataccaaagatgggacaatccggacggcccgatctatacgattcccgcagaggatgttttcaccatcacctatcaaaacggctcgaaagaggtcatctcgcatttcgattcctcgcggcgatcggccgccgacaaacaacgattcggcaaactacctcgttaccagggagagtttgccttcgcatacggtttggccgtaagcgaaggaatgggtgatctggtcccccgcatcgtattcgaaacggtacacggcgtacggatcaatccgtatctgttcgccggtgtcggcttgggaatcaactatttctataaagacctctatttcttcgatggttgggatatatatgaattaggcaatagcggaaccgtccttcccgtatttgcgaatgtgaaaggctacctgcccgtttcacgcaaagtggctctcaatctgtcgtgggacctcggcgctgcaataggtataggcggttacttcaacgagggcaccgaattttacacctccatcggcccgggcgtcacgttcggccgtcagagcggcggggtgcggggcgatttcagcatccgctttcagcacatgggagaaggattgaatgccatcctgttccgcatcggaatcggattctaaatacgccgacaaattttcagacacggcataagccgcctgtttgaaattatcggcgaatccaaaccgaagaggctgcctgcaagttgcagacagcctcttcacatcgtccccggcactccatcgactttggaccaataggatctccaaatattcgatctctacttccggtcattcgcggatggatcctttcgggccggatttcgagcgatacaaaacactcgaaggacacctgcacgatcgggggcgaattatgcctcttttccctcttccgccgcgaccgattgcgccagctccgaaagaatacggacatgcacccgctcgtcggaaacaatcttattgagaagctggatagctactgcggccgactgtgtcagcttttcaggattgtttttccggatacgctcgatcaactgctgataggcggcaatcgtatctttttcagcctggatattgacccgaatggcctcggcagccgattcatattcgaccgtaaccgccgaactcgaatacttcggagtattcacgcgcccgcccaattgacggataaaatcgcccaaacggtcgaaatgcttcatttcgacgaaagcgatccccaggaatgtttcgccaatgttttcgaagagcatccgctgttgggtgtattgaatgatagccgtcagttccgaagtgggaatggcgccgtagtaggcgtcatagaaccactcgggttccacgccgtcgttcggccgagccttctccgcttcgggataatccaacgtattatcgacgaaacgcatcgattcgatcatcgcattggccatcgtttctacattatcgagcgcagccggattgtgttttatgaactctttcatcgcttgtttaatttatggcaatcatatcttccgaaatctcttttcggattttcgaatccgacggtcgtaccgtttgcagcctatgactgaacggggcacactgtcccgcatagaaaatccggccgtacatcggtcgtcgaacccgaaaaatccggatgtcgaaaccccgaagatgcgatctcccgatttatcactatttacccatcagaacctcgtcgataattcgcttcagatcgctcttcggccgaccgccggtcatcatctgcggcatcccgttcaaggggatgaaaagcagggtaggcaccgaacgaacgccgaacactgcagcgaggtcctgttcctggtcgatatcgaccttataaaaatcgatccggtccttatattggtaatcggccgccagctcgtcgagcacaggggccaatgccttgcagggaccgcaccaagtagcgaaaaaatcgatcacggcgggacgttcgcccaggaatttccattcgcccttcgatttttcgatatcggcgaccttggtcgtgaactcctgcttattcagttgttttacagtttccatagtattgcttgtttaatgttttacaacccagcgcaaacatagtgccgcaagcgataaaaaaagagcgtccggcttgtgaaagccggacgctccgatagaatatcgaacgactaacgcaccttacggatgatttccgcaccgtgattgatagccttctcgttttcaggcagcatcttccaagcacgttccggcagggattttttcagacccaccattacgttctccatcttaacgacggggcataccttcagataaccacccaagatcatcgtattgaacaatttggattgtcccaaacgggccgactcggccgtagcatcgatcgtatagatgctgatatccgtacgactcggatgacgcgtgataccgttggtgtcgtagatcagcgtaccgcccggacgaaccatcgactcgaacttgtccatcgactgctggttcaggataatagccgtgtcgaactcatgagcgatcggcgacgagatacgtttgtccgaaagaatcaccgtaacgttagccgtaccgccacgcatctcagggccgtaagagggcatccaggtaacctcgtaatcctgcataacgcccgagtaagccagaatcttacccatcgagaggacaccctgtccaccgaagcctgcaataattaaagtctctttcatattcttgtcctcttacttcttggttaagtccttgatatcacccaactgatagaagggcagcatgttctcttcgagccacttgttagcagctaccggcgacatcttccaaccgctgttgcaggtcgaaacgacctccacgagcgagaagccgttaccggccattgcattctcgaatgccttgcgaatcgctttcttggtctggcggacatgagccggattatatacgctctgacgcgtaatataggtcacaccgtccagatgagccatcatctcggcgatcttataaggataaccgttcaaccggggatcacggccgtaaggagtcgtcgcggtcttcatacccagcagggtagtcggagccatctgaccgccggtcataccgtaaatcgcattgttaatataaatcgctacgatgttctcgcctcgagcagccgcatgaatcgtctcacccgtaccgatagccgacatatcgccgtcaccctgataggtgaagaccaaactgtccggatgcaggcgctttgccgcagtagctacggcacaagcacggccgtgagccgcctgaatccaatccacatcgatataattatacgcgaaaaccgaacaaccgacaggcgaaacagcaatcgtttttccttccatgcccatctcatcgatcacctcggcaaccaatttatgaatcgtaccgtgactgcaacccgggcagtagtgcatcacgttctccgtgatcaacttaggcttggcatacaccaggttctcctgtttgatttctactacttctgccatattcttactttttattaatcagtttttctttgagtgcaaccagcacctcgtccggtgagaacatcataccgccctgacgaccgtagtgctctacgggagctgcaccgtttacagcaagtttcacgtcctgcaccatctgaccggcattgagttcagcgctcaagaagcccttcacaccgcgcttagccaggtcggcgatcgctttggtcgggaaaggatagagcgtgatgggacgcagcaagccgactttgataccttcggcacgcgccatctccaccgtcgccgagcagatacgcgccgacgaaccgaacgctacgatcacgtaatccgcatcgtcgcagtcgatagcctcgtaacgcacctcattctcctccatcgccttgtatttggcctgcaagcgctggttgatcttctccatcacctccgacttcaactccagcgaagtgatgatgttgcgatccttgcgggcacctttgccgcaagtagcccaatccttgcactcttcggcgatctctgcgtcggttttgcggggacgctgcggagccagcacgactttctccatcatctgaccgatcgcaccgtcggcgaggatcatcgccgggttgcggtatttgaatgccaggtcgaaagccagacccacgaaatcgtgcatttcctgaaccgagttcggagcaagtacgatcaagtggaagtcaccgtgcgcaccgcccttgcaagcctggaaatagtcgccctgcgaaggctggatcgtacccagacccgggccgccgcgctgacagttcacaaccacgcaaggcagttcggcacctgccagatagctcagaccctcgctcattagactgacaccggggcttgaagacgaagtcatcacccgcttaccggtcgatgcaccgccgtaaaccatgtttatggacgaaacctccgactcggcctgcagtacgaccataccggtcgtttcccagggtttctcctccataagcgtctccataacctccgactgcggagtgatagggtagccgaagtagccgtcgcaaccgtagcgaatcgcagcatgagcgatcacttcgttgcctttcatcaattttacttctttctctgccatagtttattcaaatttttgacgataaaccgtgatgcaactgtccggacagataatcgcgcaggacgcacatcctgtgcaggcatccggattagccatctgagccacggggtaacctttgctgtttacctcggccgataaatgcagcacatcgcagggacacgaagccacgcagactccgcaacccttgcagcgctccttatcgacgaggattgttcctttaatttttgccataagacatccatttattataagttgcttacaaatgtacgcattttttacggtttaagataacatttcgtaataaaatttcacctaacgcttaaaatatattcaaaaacattctgtttcggacagataacacaccgccacgcagcaaacaaaccgggcggaaaatttctttttcaaggaatttatacctaaatttattgtgaagtattaaccttaaaatcttcaatgcgtatgaaagacaacaaatttttctcgtttttcgaaccggtactcaagtatatcgacaccggtaagtttttccgcgaacccttccgctggctgtatgcgatcctggcgatcctcaacctgctgacacccatcgtactgctggtaatggccattaacaacgacctgtttcggtacggcggaggccggatgatcgccgcgtttattctggtctggctcgtgatcgccttcgtttcctggctcggttttcaaatctggtggaaccgccgcgaaaaagtatatgcagctgcgacagcgcatgacgatttcgtcgccattcccgtattctcgcacttcatccagactttcggggaatgggcgggtatgttcgtcggtatcggcggagcactgctcaccctgatcgccgcaatatttctgaatggcgacgcctccatgcttcgcatgatgggtacgggagcattcttcggcagcggttcgctcatttacatcgtcctcaatccgatctacggcttcataatcgtcgtggtgactcgcgcagtagccgaaacgttccgtgcattggcagctatcgccaacaacacaaaaaaaagctgatcgcgctctgctgagagggcggtactttccaccgcccgcaccattttcgacggtcgcagcaccgaatccgacggtcgcatattcgtagctcgcagttgcatctgcaatcccgacctgaccctaaagaactcggggcgcgacgctctcggtgaaatacaggaaagcatataattacaaaagagaaaggagaatctgttcaagatctcctttctcttttgaatcccttacgggacactatttctcctcgaaagtatggatcaccacacccgagcggagtttcggctcgaaccaggtggtcttcggaggcatgatgttgcccgtatcggcaatgtcgatgagctgctgcatggaaacggggtagagtgcgaaagccgccttcatctcgccgctatcaacacgctttttcaactcttccaagccgcgaataccgccgacgaaatcgatccgtttcgacgtccgcagatccttgatgtcgagcaactggtcaagtaccaggttcgacagcacggttacgtccagcactccgatcggatcgttgtcatcgtacgtacccggcttcgccgtgaggctgtaccactgaccgtcgaggtagagcgaaaagttgtgcaacttcgaagggtggtagatctccttgcccttgggttccacggtgaaattcttctccagcgccttgaggaactgctcgggagtcatcccgttcaggtctttcaccacgcggttgtagtcgatgatgcgaagctggctcgcagggaacgtaacggccaggaaatagcagtattcctcgttgccggtatggttggggttgctctcctgacgcttcttgcccacacgggcagcggcagcggtacgatggtgtccgtcagccacgtacagagcgggaatacctgcgaaaatctcggtgatacggtcgttgatcttcttgtcgcggatcacccagaaatggtggccgaagccttcgggagcagccgtgaaatcgtagtcagccttgttgttcttcacgtagtcggcaacgatcttgttgatctcgtcgttgtcgggatacgcgaagaataccggctcgaggttggcctgctgaagctcgacgtgcttcatgcggtcctcctctttctcgatgcgggtcagctcgtgtttcttgatcttgcccgaccagtagtcctcatagtagcagcacatggccagaccgtactgggtacggccattcatcgtctgggcataaatataatagtgctcttcgccatcctgcaccagccacttgttgtcgcgccacttcttgaaattttcgacagccttcttatacaccttctcgtcatgctcgtcggcaatcggatcgaagtcgatttccggcttgatgatgtggagcagcgagcgctcggtagcctcagccttggcctcctgcgagttcagcacgtcgtaaggacgcgacgaaacctcggcagccagctccttcggaggacggatacctgcgaacggtttgatttttaccataatattctctctttatcgtttgaaaataaggggatatttttattatttgttcacctggaagcgggtattgccggtcttgaagaaatcgacgatctggtttgcagcggccaaacctgcgttgatgttcgcctccgcagtttcggcacccatcttcttgggagtagcgaagaagcgcttaccgaatttctcactcatctcggcggcagcctcgggagcgatgtcggtgatatatttcagatcttcgcgctcggtcatcgcctggatcactcctgcctcgtcgatcacctccttgcgggcggtattcaccaaggtagcgcctttgggcatcgaagtcatcagcttgtggccgatcgatttcttggtctgctcggtagcgggaatatgcagcgacaggtagtcggcctgtgcataaagctcctcgatgctgtccaccttcttcacgccgtcagcctcgaatacctttgcatcggtgatgaaaggatcgaaagcgatcacattcatacccagcgccttgcccttacgaccgacgagcttgccgacgttgccgtaagcatggatcgccagcgtcttgcctttcagctcgctgccggtacccggcgtgaactggttgcgggccatgaagaccatcataccgagcgccagttcagccacggcattcgaattctgacccggagtattcatcaccacgatacctttagccgttgcggcagccaggtccacgttgtcgtaaccagcacccgcacgaacgacgatcttgagattcttggcagcttcgatcacctcggcagtcactttatcgctgcggataatcagggcgttggcatcggcaacggctgcgagcagctgggccttgtccgtatatttctccagaagggctacttcgtaaccggcatccgtaatgatcttcttaattccatcaacagccttctttgcgaaaggcttctcggttgcaattaaaactttcatatcgttgaatttcatttttcgctccccatgcccggcaggggaggtagtcccatcctctttccgttcatcgaaaacgtccattaatgtataaaaatctatggcgccgtcctccttacgtttcggcgtaaaagtaaagaactgcgccatagatcaaatccggttaattatttcttgtggttcttctcgaactcctgcatgcaggcaaccagcgcatccacgctctcctgcggacatgcgttgtagatcgaagcgcggaaaccgcccaccgaacggtgacccttgatgccgaccatgcctttctccttggcgaacgccatgaattcagcctccagatcctcgtggcccggagccatcacgaagcagacgttcatcatggaacggtcttccttcacggccgtgccgacgaacatcgagttgcggtcgatctcgttgtacagcgtctcggccttcttcttgttgatcttatacatggcctcgacaccgccctgtgccttcacccacttcagggtttcgtgcattacgaaaatcgggagtacgggaggcgtgttgaacatcgagtggttgcgagcctcttcgggatagtgcgtagcgtaattgaccatcgtctgcaacggacgctccgagctgccgatcagatccttgcggatgatgacgaacgtcacgccggcaggacctacgttcttctgcgcaccgccgtagatcataccgtacttcttcacatcgaccggacggctcatgatatccgacgacatatcggcaacgagcgtgataggagaatcgatatcctcgtggatctccgtaccgtagatggtgttgttggtcgtaatgtggaaataatccgcatcggtcgggattttgtaacctttcggaatataggtatagttcttatcctcggaagaagcgacgatctccacttcgccgtagaacttagcctccttagcagccttcttcgcccaaacaccggtctggaggtaggcagctttctttttcagcaggttcgccggaacctcgaagaactgagtcgaagcaccgccgcccaggaacattacggcatagtcgtcgggaatattcagcaggtcgcgccacaactgctcggtttcggccatgatacgctcccaacccggagtacggtgggaaatctccagcaggccgatgcctgtgttgtcgaaatcacggatagcctcaatggcagattctaccgcctctctgggcaatacgcagggtcctgcgttgaaattgtgctttttcataaaactttaacagtgattaaattatagctattatttcaggtattcttcaaaattgcacacaaatataggaattatttcaccaatccgccaaggaaacccgataaattttccctgcaccggaaaagggcgcacaacaaggccggaattaaattgtttttactaaatttgcacgaatttaaccttcgacgaaaccgacatgataaaatccatgacgggcttcggcaaagccgaagtcgcaatccccgataaaaaaataacggtcgagatacgcacgctgaactccaagcagttggacctcgccgtcaaactgccttcggcctaccggcccctggaatacgaaatccgggctctggcggcgaaagctctccagcgcggtaaagccgatctttacatatccgtagaatcgaccgcccggcagacgcgtgcctgcatcgacgaagagctgttccacttatattataaccaactgctgaaaatctgtcgggaacaaccggaaatcggcacaccgggcagcgcggagaacaatgctctcatccagtcgatcctgcgcctgccggacgtggtatgctcgcaggaggaaactgtcggcgaccgggaacatgaagccgtaatggaagccgtagggcaggcgctcgcccatctggacgagttccgcacgcaggagggagcgattctgatcgccgatcttttgaagcgcatcgaccggatcgaagcgtacaaacaggaggtcattcctttcgaaaaagcccgcacggaagccatccgcgcccgcatccgggagagtttggcgcagttgcagaccgaggtagataacaaccgcctggagcaggagatgatcttctacatcgagaaactcgacatcaccgaagagaaggtccggctcaccaatcactgcaactatttccgggaggtcgcagcctccgaggagtgcgcgggccgcaagctgggcttcatcgctcaggagatgggccgcgagatcaacacgatgggttccaaagccaacaactccgagatacagatcctcgtggtcaagatgaaggacgaactggagaagatcaaggagcaggttctcaacatcctataaccgacggcagacgatgggcaagttagtgatattctccgctccgagcggttcgggcaagaccacgatcgtacgggagctgctccagcgattcccccggttggaattttccgtttcagccaccagccgggcaccgcgcggaaaggaacggaacggcgtggactatttcttcctctcccccgaggagttccgccaggccgtgcaggaagataaattcgtcgaatgggaggaagtttacagcgggacctgctacgggaccctgcgcagcgagatggagcggatctggcaaaaaggcaacgtaatcgttttcgacgtggacgtgatcggaggactcaacctcaaacgtatcttcggcgatcgggcctgcgcgatcttcatcatgcctccctccatcgaaactctgcgcgagcggctcgtcaagcggggcaccgattctcccgaaaccatcgaatgcagagtagccaaggcggagttcgaactcaccaaagctcccgaattcgaccatgtggtcgtcaacgacgaccttgcccaggccatcgaggaggcgacccgcatcctctcggattttctcgcccgataggatacctgcaggtaaaacgcgctcaaaatccgacggatatgactccgaacctgttccggtgctcttcgcggatcattcccggcccggccggaaccgaacgaaaaaaataaacgacaaaacaaacaataccgtgaaacacgtaatgctctacttcgggtccttcaatccgatccacaagggccacatcgcgctggccgaatatgcgatcgaaaaaggactctgcgacgaagtcgtactggtggtttctccgcaaaacccgctcaagcccgccggacagcaggctccggagctggatcgcttctcgatggcggaaaccgcatgcgccgcatcgaaatatcccgacaagatcaaaccgtcggtcatcgaattcatgctcgacaaaccgtcgtacacgatccacaccctgcgtcacctgacggagaactacggtacgcagatgcgattctcgatcctgatgggcgacgaccttgtgccgcaactgcccgaatggaaacagtaccgcgaaatcatcgacaactatccgatcttcgtctatccccgtaccggacagccgctgcccgacctcggaggacgaatcaccctcctcgaaggcgcaccgctgtatccgtactcgtcgagcgagatccgcgagcggctcggtcgcggcgaagatgtcggcaacatgctccccgaaggggtgatgcaatacatccgggaaaaagacctgtggagtccggccagctacatcgcatcgctgaccgcacgcctcgaagctactcccgacgacgcctccctctacgtcgaacgcggtcagtggcactaccgtcgcaacgaatggggcgaagccctcaacgacttcaaccgggcgttgcaaatcgatcccgaccaccgggaggcccgacaattcgtggagatgacttatgaaattctttcgttccggcatacggacatttacaacccctgatatgaaacgactcaacatcgccctgatggcgggcggcgactcctcggaacgggagatcgcgctccagagcgccgcacagatcgcatcggcgctcgatcctgcgaaatacgacataaccctcatcgacctgcacggccgcgactggcactacacgtcgcccgacggacggcaatggcaggtcgataaaaacgacttctcgatcaccatcgacggcgaccgcaaaactttcgactacgccctgatcctgattcacggcacaccgggcgagaacggccgtctgcaaggttacctcgacatgatggagattccgtactcctcctgttcgatgacctcgtcggtggtcaccttcgacaaaatcacgaccaaacgtaccgtagccgaattcgggattccgctggcccggggctttttcttcagccgcgacagtcggatcgatccgaaggagatcgtccgcacgctcggccttcccgtattcgtaaaacccaatgccagcggcagttcgttcggcgtaactaaagtaaagagcgaggcggatatcttgcccgccgtcgccgaagctttcaccgagagcgacgaaatcctgatcgaggagtgcatccggggtcgggagatgggatgcggcatgctgatcgccaaaggcagggagtacatcttcccgatcacggagatcgtttccaagaaagagttcttcgattacgaagccaaatacaccgccggctgctcggacgagatcaccccggcggacatcgcgcccgaaatcaaggccgaactcaaccgcctgacggcgctggcctacaaagcctgccgctgccggggcgtggtgcgcgtggatttcatcgtcacgcccgagggcaagccttacctgatcgaaatcaattcgattcccggcatgagcggcggcagcatcgtccccaaacaggtacgcgaagccggcatgacgctcggggaactgtacgacctgattatcgaagacacttatgatcgagatagacgataagatcgtcagcgccgacctgctgcgcgaatatttcgcctgcgacctggcggcctgcaagggtatctgctgcgtggaaggcaacgcgggcgcaccgctcgaaatggacgaagtcgatacgctcgaagaggaatatcccaactataagccctacatgacgcccgaaggcatccgggccgtcgaagcgcagggatttatggtcgtggacgaagacggggactacaccacgccgctggtggacgacgccgaatgcgcctatgcctatacggaagaggggatcaccttctgcgccatagaaaaggcgttccgggagggaaaaacgacttttcgcaaacccatctcctgccatctctatccgatccgcctgatgaacttctcgaacggcacggtcggactcaactaccaccgctggtcgatctgcgaaccggcacgccaatgcggaaaacggctcgggatcccggtgtacaaggcgcttcgggagccgatcatccgtcgcttcggcgaagagttctacaaagcgctcgaaactgcggaacaactgctcaagaatcaatagagaaacaacgacacgaaatgaaaaaccgacatatcatcgctgccgccttgctgctgctcaccacgacgacagcggcacaggaccgccatacggagacgaccccagacaccggtgaaaacctgcaaacgacaccgaatgccgaacagctccgccaacagatcgaaacgctgcaacggcagctcgacctgctcgaaaaggggcgggacaccctggccgtaaagaaacccgcactgctttccgatcccgtggaacccatcgccaacatgaacggaatcatccccctggacacgctgcaaacgatcaacgaagcggtgaaaatcgtcatttacaacgacaattcgtggaaatacgtccgcgacagagagtttgtcaaggacagctcgatctataccaaatactgggacacgagcacgctgttcccgtacaaggaatatccgctgtcggagatgcctgcttcgcttgcgatcgatctggtggattcgctcaagtgctatcattatccctacaaaggcagcatccgctccaaatacggcatccgctaccgccggcgccatcagggagtcgatattccggtcaaaacgggtgatcccatttatgcgactttcgacggccgggtccgcatctcggagtacaaccggggcggttacggcaacctgatcatcgtgcgtcacgacaatggtctggaaacctactacggacacctctccgaacggctcgtgcaaagcggcgaatgggtcgaggcaggacagatcatcggtctgggcggttcgacgggccgcagcaccggcccgcacctgcatttcgaaacccgttattacggacaggctttcgacccggagcggctgatcgacttcgaatcgggcattctgcgacgtcagacattcctgctcaagaaatcgttcttcgacatccggtccaacgccggacaggatttcgatgacgaggcggaagtggaaaaggccgacaaaaaggaggctgcggaaagagccgccgtaacttaccacacgatcaagtcgggcgatacgctcggcgccctcgcacggcggtacggcacgacggtatcgaagctctgttcgctcaacggtatcaaatcgaccacgatcctgcggctcggacgcaagctccgggtccgctaaacaaacagacgagccggaacagggcggggtgtggtatgaaactggctccgtaccggatgatgcgactccggaaacaaattatcaaatagctaataaaaattaggcacatccgctcattactttttctttgaacctatgattccgaatgagcggcacaccgcgcgaccagtcggcgtgggtgctcgaagagtttcctgaccgcccgaacgccgtccgttggacctaccagattaccgacaaggactataaggaggccgtgcgtcagacgctcgaacgctgggcagaccgggacgaggaaaaacaatagggcaaaagcctttgcgaaacaaggcttttcccgacttatttccacataagcgggccgcagtatcgctactgcggcccgcttttttactgccgattcttcccggcggcacggccgtttcgatatggctctcggatcatttggaataatcgcgggcgccgaaaatcagcgaaccgatacgcaccagcgtcgctccgtattcgagagcgatccggtagtcgtgggacattccgatcgaaagggtatcgaactccggcccgaaatagggcgacaactcgctcttataccgttgcaaagcggcgaaatcccgccggatgacctgctcgtcgccggtgttggtcgccacgcccatgacaccccgcacccgcaggttgggcagccgtgcaaaggcgccgctgcgaacgtattcctgcaattccgcccactcccagcccgatttggactcctcgtcagccacgtggatctccagcagtacgtcgatcgtacggcccgcagcggcagcggctttctggatcgcctcggccagccgaacgctgtcgagcgaatggatcatcgccacgaaaggcacgaccatcttcactttattggtctgcaaatggccgatcaggtgccattcgatgtccttgggaagctcctcatacttctgagccatctcctgaggccggttctctccgaaaatccgctggccggcttcgtaagcctccatgatccgctgggcagggtaggtttttgaaacggccaccagctccacctgcccgggcaaggagcttttgacccgcaatatccgatctgctatcgacatcctacaatctctccaattttacagtgaagtgacgcatcaattccgtctcccagacgattttaacgcctcgttttatttcgtcacgacgatcgtaaacattttttagagccgctgcgattacatccatatgattgttggtataaacacgccgagcgatacacaagcggagcagatcaaggcctccaaagcgattttcacgagttacagggtcacggtctgcgaggatataaccgatttcacaaccacggataccggcctccaaatacaactcgatagcgagagtttgcgcagggaactcttctttcggaacactcgagagcaccttgtcggcatcgacaaacagcgcatgacctccgacaggtctttgatagggaataccgtattcatccaaacgcgccgcaagatattgaacctgtttgatacgtgtttcgatattatcaaactcggtattttcctcaagaccaacggccaaagccgccatatcccggccgttcatacctccgtaggtaagataaccttcaaaaggaatacagaatttttttgcaccttcataccagtcttcatgcctggtagcaataaaaccgcccatatttacgaggccgtctttcttggaggacatagtcatgccatcagccaaagaaaacatctcctttacgatctccttgatggtcttgtccgcatacccgtcctcccgggtcttgatgaaataggcattctccacgaagcgtgccgaatcgaaaataacacgtttgccgtatttgtccgcaagggcgcgcacctcccgcaggttttgcatggaaacaggctggccaccggcggtattattggtgactgtcacgatgatgaaaggaattttgtccttatattgcttcagggctgtttccagttttgcaggatcgacattgcctttgaacggcacttccaattgggtgtctttcgcctcatctacagtacaatcgagcgctacggctttacggctctctatatgcccctttgtcgtatcaaaatgcgagttgcccgggacaatatctccgttatgcaccagatgactgaaaagaacattctctgcggctcgtccctgatgggtcggaattacatattcaaatccggtcagccgggtaatggtatctttcaacagaaagaaagatgaagagccggcataactctcatctcccatcatcatcgccgcccattggcggtcgctcatcgcacccgtacccgaatcggtaaggcaatcgatataaacttgatccgcttttaattgaaataaattgtagtgagcttctttgatccatttttcacgttcttgtcgcgtacttttacggataggttcaaccattttaattttccatgattcagcaaaaggcagttccataatataattttttactaattaatagaattaaaaaaagatttttattagtacatacgctaacaaagatagtgaaatttgcgatattaaaaaagaaagaagaagtaaaaatttgttttgattcttctttcttttacaggcagacctacagcacggagcgggacaaccgctcttccggccggtaagccggcgacggctaccaaccgccgcccaacgccttgaacagattcacataattgatatactgttgagctacgaggttcacatactccatctgcgactggtacatgtttcgttcggcgtcgatcacgtccagataggccgacataccattgcggtagagcgaattggtcatcgtggcgatctcgatattggcccggagcaaccgggcgtaattctcggcctggctgcggtaggtagcgatgtcgagcagactcttttccacatcgcccaacgcttcgagcacggtctcctcataggcgaacacactctgataatatcgctccctggcaacctgctcctgccgcttgagcttgccgaaattaaagatcggctgcacaagcgacccgacggccgaccacgcccacgaatgaccgtcggaaataccttcgatcgaactggaaacgatacccccggctccggtcagcgtaatcgacggaaaacgcttgctacgggcaagccccacgttcgcggccgcctcatccatgttgaacgaagcctccatgatgtcgggacgccgctcgagcaattccgaaggaagtccgacgggaatatccattacctgataattgtccagcaaggcatcgtcgaaagtttcgtccccgaaataggagggattctcgccgagcaggacacaaagggccagacgcgactgctcgacggcacgctgatactgcggaatatcggcctcggcctgatagacgaggctcatggcttgctgaagggccacgccgttggacatgccgtaacgggcgagcgaatccacgagcgccgccgactcccggcgcagcacatagctctgccgggcgatccgcaggtcgcgggtgtattgaagcacggtaaaataggaggtggcgacttccgccgtcagcgacagcatcacgccccggtagccccattccgaagagtagagagctgccttagccgcccggttagcgctgcggagtgttccgaaaaggggtacttcccaggaaatcgacggttcgatcgtatattgttgggtcgtaccggtcggctcggtatagtttccctgcgccgagacgttcagtcccaccgagggaagaaaaggcgcacgggccacagcgatattggcgcgtgcttcgaagatacgcgaagccgcctgcgccagattgcggttgttttcgagcgcgtgctccaccaggcgattgagcgtcgaatccccgaaaatctcccaccaggcgaaaggcagcgacaccgaatcctgcggaaaatcgcccgcgaagcgataattctcaggcacttcgacctgcgcgtcgtagagtttcggagtgcacgatgccagtgcggcaacgaacagaatgattgcaaagtatcgtttcatgactctttttgttttaactcccgcttgcgttcgaacttgccgacacgggcaaccagataatacagagcagggtagatgaaaatgcccagcatcgtggcgagcaacataccgcccaccagagccatacccataatattgcgggccgtagcatagaccccgctggcgaagatcagcggcatgacgcccaggatgaacgagaaggcggtcatcatgatcggccgcatacgcagcctcgccgcctcgatcgtcgcggccttcaggtccatgttcttctcgaagaagagctgatcggcatattccacgaccaaaatggcattcttggccgaaagaccgatcagcatgaccaacgagatctgcatgtagatattattgataaactcggggctgaccaggtacgccgcaccgacaaataacagtgcgccgagcaccgcgagcgggacactcaacaggatcgccagcggcagcccccagctgttgtagagggccgaaagagtcaggaacacgaagacaatagccagcaggtaaacggcgccgctgctgcccgaagccgtcttttcctgataggataagccgctccaggtggttccgaccgcctcgggcagcacgtcggcggccaccgcttcgatagcgtccatcgcctgaccggtcgaaactttcgcagcagggttgaccgtcagttcgatcgaccggtagaggttgaactgcgaaacgaactcgacacccgtagtatcccgtacggtcgcgaacgacgaaacaggaatcgagttgccctgaccgtcgtccacgaaatagctttcgagcgaatacttgtcgcggcggtactcgggcgcagcctggatataagtctggtaaagttttccgaaccggttgaagttgttgatataggaaccgccgagcagagtgctcatcgtcttgtagaaactctggagcggcacgccctgtgccagcgctttctccttatcgacttcgatccgccgctgggggatgccggcgttgaactgggtggtcacggagccgatctgcggctgcttgcgcagcgaatccatgaagcgcatggtttcgtccgccaggaactccgtaccccggccttcgagatcctgtacctgcaacgtaatgccggacgttacgcccaaaccggggatcgacggcgagataaaagcgtagctgacggcctcgggaactgccacgtacaactcctccgtcaaggcggaagcgatctcggaagaggtcttgctgcgctggctgtaatcgaccagcttcacgaagataataccgctgttgctcgaagcgatgcccgccagcatattgaagccggcggcaaaggaggtcgcctcaacatccggacgctgccggacgagttcatcgacccgctgcatcgccttgacggtggtttgcagggatgaagcctcgggcgtctgcacgaagaccatgacatacccctgatcctcgtcgggcaggaagcccgaaggcaggaagtgccagatcacggcgatagcggcaagggttacggcgacgattcctccggtacgcttcaggtgaccgataaaacgggtggtagccgatgtgtattcttcggtacgtttgccgaaccagcggttgaaagcggcgaagaatcccttctgcaccttcgggcgcggcttgagcagcaacgcgcacagcgcaggcgaaagggtgagggcattgaacgaagagatgcagaccgatacggcgatcgagatcgagaactgctggaacagcagacccgtgatactccccatgaacgatacgggaataaacacggccagcagtacgacggtcgtagcgacgatcggcgacgagacgctgtgcatcgcttcgacggtcgcctgcttcgcactcagccccttctcgatattgacctgcacggcctcgaccaccacgatcgcgtcatcgaccaccaggccgatggccagcaccatacccaacagcgagatgatattgatcgagaacccgagtagcgggaagagcgcgaaagcgccgatgatcgacaccggaatcgccagcagcgggatgagcgtcgcacgccagtcctgcaggaagaggaagatgatggcgatcaccagaatcagagcgataatgagcgtgacgaaaatatccttcacgccggcttcgatactggtcgtggcatcgaccatcgaagtataggtaatgccatcggggaagcgcttggaaaggcgctccatttcggccttgaccgaattgcccacatcgacggcattgctgcccggttgctgataaatgacaagcagggcggtcgggtcgctattgaagagcgattcgacaccgtactggcggctgccgagagccacgtcagcaatatcgctcaaccgaacctgctcgccttcgggagtggtggagataatgatgtcgccgaactgctccgcatcgtagatctggggcggcatggtcaccgtataggtataagtcacgtcgcccgcagcgggttccccgccgaacttgcccgccggaaagatgccgccctgcgcttcgacagccgcaaaaacctcgtcgagcgagatcttgtagtaatccaacaggtcgggcttcagccagatacgcatggcgtattcaccggcgcccataatgtccaccttacctacgccgtcgatcttcaacagttcgttctggatgttgatataggcgtagttggagagaaaatcgccggtgtagcgtccgtcgctggtgagcgaatagacgatcagaaagccggtcatggtcttgcgcgtggtgacgccctgctgggtcaccgacgcgggaagttgcgaaagggccgtcgaaacattgttctgcgtaaaaatagcgtccatgttcggatcggatccgatatcgaaggtcacctgcagattcatcgacccgtcgttggcgctcgtagcctgcatatagagcatatcgctgacacccatgatgctctgcgaaacgggcgtggcgaccgcattgttcacggtttcggcatcggcaccgggataggtcgtcgaaacttcgacgacaggaggcgtaatgtcgggatactgctcgatcggcaggtcgaatatagaaatgatacccagcagcacgatagctgccgccagcgcaatggcgaaaatgggccgcgcgatgaaaaattttcccatacctgcctattttttaacgggaacgacccgcattccctgacgaagtttctgcaaaccggtcacagcgaccgtttctcccggttccaggcccgactcgatggcccacattccgccgaacgtctcgcccggcgtaaccttgcggtattcggccgtgctgtccggccggattacccagaccgacgatacgtcgagagtctgcacgacactctgctgcggcaccagtacacggggcagcttcgccccgatattggcttcgacacgcgcgaactgtccggtcttgagccggtaggaaggattcgggaagcggacgatcagcacgatcgtccccgtagccgaagatacggccgtccgggtgtaatcgtacttgccgaaaagcggatagcgggtaccgtccgcctcgtaaagcacgatctccgaaagcagttcggcgttgtcgtagatattcgtccgattgctgtccaaccgaaggaattgcgtcatcggaatcgcaatggggacctggaccgtatcaatattcataatcgtggtgagggtcggaatttgcgtacccggaccgacataatcaccgacggagccgttcgaagattcgataatgccgtctatctgtgcatagatcttcgtgtagcccagattgagctgggcattccgcagagcctgccgggccgacttcacgtcggcctccgaagcggcgtactgcgccgtatattggtcgagttgcgtaccgctgatggcattgatcttggccagcggcaccgcccggtcgaaattgttcttggcttcgagcgccagcgcacggctcgactccagagccgcttgagccgaaagcagggcagtgtaatactcactgtcgtcgatttcgaaaatcaactgacccttgcgcacgggcataccttttttatagtgccgggctacgagaaacccgctcacacggggttcgaccaccacttcgttatcgctgttgatctgggaaatgaagctccgccgcgtatagagcaaatcgaactcggcgacagcgatttcgatctccatcggcggcatctgcccggtatgtccggaacgggaaccgcaggaaaccgcgagcaaagagagcgcgagcaggataaagggaattgaagacgatctgtaacacatagtttctgcatttttcgaaatacacggcaagttatgtgcctcaacttgcggtcaattcaaatttttcggagaataatgtccctttcggcccctcagggcgagccgggagcccgaatccgccccccggcaggagcacagcggacagccgctcccgcctcccgtcgaaaaacatcccgtcgcatccgaaacgaacgaaccggccggacaacatccggcataaatgctcccgacgcatcccgtcccggtttttacgataccggttgaattccggaaaaagggatgcggctggttttgttttatttccggtttatgctatctttgcgaaaataacttttgcccggaccggccgtattccggaaacacggaaccgcatcgttcaaggaatacgcgccgttctcactcaaaataaaaaattctcgcatgaaaaaactattccgaaccctgtttgccgcagccctgtgctgtctgacattcaaggcgacagacgcctgcaccaacttcatcatcacccggggagcctcctcggacggctcggtgatggtctcctacgccgccgactcccaccagctctacggcgcactctacaaaaccttcgccgggcgctacaaacccggcacgatgctcccggtctatgactgggactcgggccgctacctgggagaaattccgcaagcggcacaaacatacgccacgatcggcaacatgaacgaacattcgctcatcatcgccgaatcgacctacggcggacgcgaggagctggccgattcgacgggtcgcatcgattacggctcgctcatctacatcaccctgcaacgcgccaagactgcccgcgaagcgatccggatcatcgtggatctggccaacacctacggctacgcttcgagcggcgaatccttctcgatcgccgaccagaacgaagcctggatcatggagctgatcggcaagggctgcgagctcgatgccgagggtaacaacacccgcaagggcatcgtctgggtagctcgccgcattcccgacggatacgtttcggcacacgccaaccagtcgcgcatcacgactttcccgctcgacgatcccgagaactgcctctacgctcccgacgtgatctccttcgcccgtgaaaagggctatttcaacggcccggacgaggagttcagcttctgcgatgcctacgctccggccgatttcggcacggtgcgcggatgcgatgcccgcgtgtgggcgttcttccgcaccgtagcggacgacatggatcaatacacggactatgcaatgggatacaacatgtccaaccggatgcccctctgggtgaaaccccgcaccaaagtcgatcccaagaccgttttcgacgccatgcgcgaccactacgaaggaactccgatggacatgacccaggacatcggtgcgggcggacatgccctgccgtaccgctggcgcccgatggatttcgaagtggacggcgtaacctacctgaacgagcgtgcggtagcaacccagcagaccggattctggttcgtggcacaggcccggccctggctgccggacgacatgggcatcctctggttcggggtggacgacgcagcgacatcctgcctgacgccgatctactgctcggcaaccgaggttcccgaatgtttccgcgagggcaacggcacgatgctcaaatattcgcccacgtcggcattctggctcttcaaccgcgtaaccaacttcgcctatctgcgttacgatctgatcgcggccgacatccgcaaggtggttgacgagtgggagaatacccgtttggaggaggtcaaacagatcgacgcagccacagagggcgactcgcccaagaaacggcagaaacggcttacccgttattcggtggatatggcccagcaactcttcgaccgctggacggaactcgaccggtacctgctcgtcaaatacatcgacggcaacctgaagagcgaaaccgaaccgggtaaattcctcgacaacggcaacgggcgcgacattcccgacaagatccagttcccgggctataacgaaaagtggaaacgcgccgtagtagccgaccacggtgaagtgctgaaagtaattcaataaacacatacaaaaaatatgaaatacgatatcattgtgatcggcagcggtccgggcggttacgtagccgccatccgcgctgctcaactgggtaagaaagtggctgtcgtagagcgtgccgaggccggcggcgtatgcctcaactggggttgcatcccgaccaaagcgctgctcaagagcgcccaggtttacaactattgcaagtcggccgaacattacggactcaacttcgcaggcgaagtgcggcccaacctcgaaaagatcgtagcccgctcgcgcggcgtggccgaaacgatgaacaaaggcgtgttgttcctgctcaaaaagaacaacgtggagctgatcaacggcttcgcaaaactgaaaggaaacggccggatcgacgtggacggcacggagtacgaagccgaccacatcatcctcgccaccggagcacggccccgcgaaatgccgttcatgcccatcgacggagagcacgtgatctcctcgaagcaggcgctcgtactgcccaaactgcccgaaacgatgatcgtcgtgggatcgggtgccatcggcagcgagttcgcttatttttatgccgcgctgggtgtgaaggtcaccatcgtcgagtatctgccccagatcatgcccctcgaagacgaagaggtcgccaaaaccatggaacgctcgttccgcaagctgaaagcgaccatacttacttcgaccaccgtgaaatcggtgaaagtcaatgccgaaggcaaatgcgacgtcgaggtggaaggcaagaagggcacggaaacgctggtagccgatatcgtcctctcggccgtcggcatcaaatccaacatcgaggggatcggcctggaagagttgggcatcaagaccgaacgcgacaaagtcatcgtcgataaacagtaccgcaccaacgtaccgggcatttacgccatcggcgacatcgtacccggtccggccctggcgcacgtagcgtcggccgaagcgctctgctgcgtgaatgccatctgcggcctacactccgagccggtggactacacgacgattccctcgtgcgtattcacctcgccggaagtggcttcggtcggtatgaccgaacgacaggtcaaggagatgggtatcgactacaaagtgggacgcttccccttcaccgcttcgggcaaagcgaccgccgcaggcgaccgcgacggcttcgtaaaactgatcttcgaccagaacgacaagctgctgggagcacatctggtgggagcgaacgtaaccgaaatgctggccgagccgacgctcgccaaatcgctgggagcgacggcgcagcaaattgcacacacaatccacgcacacccgaccatgaacgaaggagttatggaggcggccgaggtagctctgggtgccgcgatccacgtataaatcgaaaattaccgcaatgcgaacggggacggcctgcacaggatcgtccccgtttcatttgcatacgcccgtcaaggagtaatcgataacaccgaaggaatcatggccccgggacgatcggcgattgaatgaaaagaaaagcggccgaacgaaacaatcgaagagaaaaccgcccgaacataagggaaaacaggctgccggatcgaagcgaaggcggcctctacttttccaccgatgaaaaatagcggagagcgggcagccgggtttcccgcacgaatacttccggcggatagagcacatcgctcaggaaaaggccctgggcgggtgctccggcactcgaccgcgaaagatcgcggctggcgacgatgtcgcggaactgttcaacggtataacgtccccggcccacatcgaccagcgtgccgacgatagcccgcaccatattccgcagaaagcggtccgcacgaatcgtaaagcaaagcgtaccgtcccggccgaccgtccagtcggcccgtttgagatggcagatattggtcttgttgtcggaattgagtttggcgaaggaggtaaagtcctcatactccatcagaacgtcggccgcacggttcatcgccgccacgtccagagggacgtaatattgccaggaagcggctcgtgtaaagggattcttgcgcggttcgatatagtagcggtactcccgctcccgggcactgaaacgggcatgggcatcggccgcgaccggcacgatacggcttacggcgatatcgccgggaagcatatggttgagcttgaaaacgacctgttccggatcggcgacgggagaggaagtgtcgaaatgcgccacgtaataggaggcattcactcccgtatcggtgcgtccggcaccggtcagcagaatcggttcacggagcagggtagagattgccccttcgatcgtctgttgtaccgacggcatatcgggttgccgctgccaaccgcaataggctccgccgttgtatctcaattcgataaaataacgcatcgtttttccatttatcacatcttgcaggcagtcgcccgcatttccgggagaaatcccagacgagctccccccccccgaatctttcgatcccgcaccgagaatcacccccgaccgggcctccattcgcaaaaagaatccgaacccgtgatgctctgcaaagatagtgaaaggtgagagcaatcgtgcgggcttgcacgcaaagattgccgaaccgcctcctatcttccgcaaagatagcgaaagccgagagaaaacgggaacttgttcccagttttccgaggcgcatcctatttaagactatgtcaaagataataaaatccggaacgccaactccgttccataaaaaacgaggtcgaaacccgataggatttcgaccccgcatctatactatcccgcgattatttgcgcggcttgatgttcagtttcaccggacgaatcatattctcgggcttgagaatcgtgtcaagctcctccttcgagagaataccgtgttcgagcaccagatcataaacgccgcgacccgtagcgagagcctccttggcgatcttggtcgaattcttgtaaccgatgatcgggttgagagccgtcaccacgccgatgctgttcttcacgtaatcggcgcagcgctcgcggttggccgtaatgccgtccacgcaaagcgtgcggagcgtatcgaaaccgttcatcagcaactcggcggactcgaaatcgcactgggccatcaccggctccatggcgttgagctccatctgggccgcctcgccgctcatcgtaacacacagctcgttgccgatcaccttgtaggcgatctggttcatcacctcggggatcacggggttcaccttacccggcatgatcgacgatcccggctggcgggccggcaggttgaactcggccagaccgcagcggggacccgaagccagcaggcgcaggtcgttgcagatcttgttcatcttcacggcgacgcgcttcatggcggaagcgtaaccgaccaggcacgaagtatcggacgtagcgcctaccaagtcgcccgtcaaacggatcttccagccggtgatccgagcgatgttctcggtgcacagctcggcatagcccggctcggcgcagatacccgtaccgatcgccgtagcacccatattgatcgtcaggaaatcctcggcagcttcgttcaggtgaacgatctcatcgcgcaggatgctggcgaaaccgtggaaagtctggcccaaagtcatcggcacggcgtcttcgagctgcgtgcggcccatcttgaggacatcggcgaactccgcagccttcttttcgaaggattcgatcagttgcttcaggtgctcgaccagcttcagatgcgtagcgtacatacccaggtgaatagccgtcgggtaggcgtcgttggtcgattgcgcacagttcacgtcgtcgttgggcgagcagtactggtattcgccgtactgatggcccatgatctccaacgcgcggttggcgatcacttcgttggcgttcatgttggtcgtcgtaccggcaccgccctggatcatatccacggggaatgcgtcgtggtgcttgccgtccatgatctcgcggcaggcctgtgcgatcgcattgaacttctcgtcggtgagcagccccagcttgtgattggcttccgcagctcccagcttggtaatggcgagtcccttgatgaagaggggatactcgttcaaatggaatttgctgatccgaaagttctcgataccccgcagggtctggacaccgtaaagtacgtcggcaggcaactctacgctgccgagcaggtcgctctccgtacgcattttctgattatttgccataatacttataatttataattgtttttgacgtttaagtttcgatccgtcgcgaatttaattcgacaaaattaacactttattttcaattcgtgccaacaaaccatataaacttgaaactattttttatttcggcggcgaatagctatatttgcgataatataccgtaaaatccccttcagccaatgaaagcagcgatcatcggacacggcaaaatgggccgtgaaatcgaaaaaatactcctcgaaaggggacaccgtatcggcgccgtcatcgacgaggcgaacgcatcggaactggatgccgcacacctggccggcatcgacgtagcactggagttcacgacccccgacgcggcctacggcaacatccgggcgtgcatcgacgcagggattccggtcgtcagcggcacgacgggctggacaaatcgtctggaggagttgcgcagctattgccgggaaaaaggcggtgcgctcttctacgcctcgaactactgcctgggcgtcaacctgatgttccgcctcaaccgcaggctggcccggatgatggagcgcttcgacgcctacgacgtacggatcgaagagattcaccacacacagaaaaaggatgctccgagcggcacggccatcacgctggcagaagggatcatcagcgaaatcgggcggaagacgggctgggtgaacgaatccagcgacgatccctcgcaaatcgtcgtcacctccctgcgcgaaggagcggttccgggtacacacacggtaacttacgaatcggacgacgaccggatcgaactcaaacatacgatcaaaaaccgccggacactggctctgggcgccgtcgtcgctgcggagttcctctgcggcaaaaagggtgtctatacgatggacgacctgctgaaataaacgatacagaacatgggaaaaatcaaagctttcttccgcaacaaatgggtgggattcaccctggcaagtattttatacatcctctggttcgtcctctggacgggcaactggtggctgctgctgggcgaaatcgtcatcttcgacctttatatcacgcgttatttctacaagtacgtctggcggcacaacgccgagatgtgcaagaaaagcaaaagttacaaagccgtttacgaatgggtgaatgcgatcattttcgccaccgtcgtagcgtcgctggtacacatcttcttctttcagatgtacgtgattccctcgtcgtcgatggagaaatcgctgctggtcggggactatctctacgtcagcaaggtagcctacggtccccagatgcccaataccccggtggcatttccgttcgtacaccatacgatgcctttttcgaaaaccaaaaaatcgttctccgaaagcgtcaaatggccttatcaccgcctcaagggactgggccgaatcgagcgcaacgacgtagtggtattcaactttccggcaggcgatacggtgctgctcgaacgacaggacgtttcgtactacgacgtactgcggcaatatcagcaaactttcggacatcaggccggccgcgaacggctgatgcaggaatacacggtcatcacgcgcccggtggacaagcgtgaaaactacatcaaacgctgcatcggcctcccgggggattcgatacgaatcgaggaaacggcggtttacgtcaatgggaagccgcaggagcccgtcgccggaaaacagttcatgtatctggtggaaaccacctcgccgatcacccaatacgcactcgacaatctgggtatcaccgaatggagcaacaagggcacgctctactacatggcgctcaccgacgaaaacgccgcagaactggagaagctggacaacgtcgcttccgtacagaaatacatcgcccgcagtcccaatttcgatgtctttccgcaggatcgccgctatgcgtggaatcaggacaactatggcccgatctggattccccaagcgggaacggccgttgcgctgacggccgacaacctgcccctgtaccggcggattatcgaaacgtacgaaggcaacgacctgcgtgtggacgaagaagggaagatcttcatcaacggcgaacagaccgacacctatactttccggatgaactattactggatgatgggcgacaaccgccacaattcggcggactcccgcttctggggattcgttcccgaagaccacatcgtcggcaaagcctccttcatctggctgtcgctggatcccgaaaagagcttccccgcgaacatccgctggaacaggatgttcaccaaagtcaaataaaacaagggtagtcgtgacctcggacagttatcatacgcttgccgggcctgcggaagccatctacaaagagaaaagcagcaagttcctcgcttatgcctatccggtcgaaagcgaggaggagattcgcacgctgctcgatgcgctgcgcaagaaatattacgacgcgacgcaccactgttacgcgtggcggctgggtccgcacggcgaaacgttccgcgccaacgacgacggagagccttcgggcacggcgggcaagccgatcctcggtcagcttctgtccaacgaactggtcaactgcctaatcgtcgtggtgcgttatttcggcggtacgaaactcggagtatcgggcctgatcggtgcctacaaggagtcggcggccgaagcgatccgagcggccgaaatcgtggagcggacggtcgataccgtcgtggaggtggagttttcgtacctggcgatgaacgacgtgatgcgcgtggtcaaggaagaacagccccgggtgctgacgcagcagttcgacaacctctgccggatgacactggcgatccggcaaagtctcgcaggaggtatgatcggcaaactggaaaagatcgggggcgtgaccctcgaaatgaaataatatcggtccggcccggaacacgcacggcgcagggaccggatccacgtaaaaaaacatgacaaaagaacaaaagtccatttatataaaaggtgcacgggtgcacaacctcaaaaacatcgaggtcgaaattccgcacaaccgactggtcgtcatcacgggactttcgggttccggcaaatcgaccctcgccttcgacacgatcttcgccgaagggcagcgccgctacgtggagagcctctcggcctatgcccgacaattcctgggcaagatcaacaagcccgatgtggatgtcattacgggtatcgctccggccatcgccatcgaacagaaggtcaatacccgcaatccgcgttcgacggtcggcaccacgaccgaactgtacgactaccttaaacttctctacgcccgtatcggacacaccttctcgcccgtatcgggacaggaggtcaagtgctacaccgaggacgacgtggcgcaatatatcctctccctgcccgaaggcagccgcgtggccgtcgcagcgccgctgcaactgcgcgaagggcagggcgtcatcgaaaaactgaccctggtgctgggcgaaggcatcctgcgtgtacatgcggcgggagagactctgccgatcgaggatttcctgccccgcgtggacgaaaacacccgtgccgaagatatctcgatcgtagtcgatcgtgccaaagtttcgcaggacggcgacctgccgacccgcctgcgggattccgtagcccgtgctttctcctatggaaacggggtttgccgaatcgtcacgcccgaaggcgtcaaagagttctcggcccgtttcgaggccgacggcatcgaattcgagcctccgaccgaacatctgttcagcttcaacaacccgctgggcgcctgcccgacgtgcgaaggttacggcaagatcatcggcatcgacgaggacctggtgattcccgacaaacgcaaaaccatctacgaggacgccgtggcctgctggcgcggagagaccatgcgggcgtggaaagaccagctcgtagccaatgcctataagttcgattttccgatccatacgccgttctaccaacttacggccgaacagaaacggctcctgtggtgcggcaacgagtattttcacggcttgaacgacttcttcgcctacatcgacagcgagcggcgcaagatccagttccgggtgatgaaagcccgctacacgggcaaaaccgtctgtcccgactgcggcggctcgcgcctgcgcaaagaggccctttacgtcaaaatcggcggcaaaaccatcgccgacctggtcgtgatgccggtggagacgctcgccgatttcttcgcctcgctcgagctggacgctcacgacacgaaaaccgccgcccgcatcctcaccgagatacgcaaccgcctgcaatacctcatggacgtggggctgggctacctgaccctcgaccggctctcctcgacgctttcgggcggcgagagccagcgcatcaatctttcgacctcgctgggcagcaacctcgtgggctcgctctacattctcgacgagccgtcgatcggcctgcacccgcgcgacacgaaccgtctggtcggtgtgctcgaacaattgcgcgacatcggcaacacggtgatcgtcgtcgaacacgaagaggaggtgatccgtgctgccgactggatcgtcgatatcggcccggaggcgggctacaacggcggagaggtcgtcttcagcggaccgctgaaagccttattgaaagaaaaaaaaagcctgacggccgactaccttacgggacgctgcaaaatcgcggtacccacctcgcggcgcagcccggcagcgtggatcaccgtgaaaggtgcccggcagaacaacctgaagaatatcgacgtgcggatcccgctcggggtgatgacctgcatcacgggcgtaagcggcagcggcaaatcgtcgctggccaaaggcatcctctatcccgcattgcggcgcctgctgttcgacacagggctcaaaccgggcgatttcgacgccatcgaaggcgatctttcgacgcttcgttcggtcgaaatggtcgatcagaacccgatcggcaaatcctcgcggtcgaaccccgtgacctacatcaaggcctacgacgaaatccgcaaactctacgccgaccagccctacgcccaacggtcgggattcaacccctcgcacttctcgttcaacatcgccggcggccgttgcgaggagtgtcagggcgagggattcatcaaggtcggcatgcagttcatggccgacgtggagctcgtgtgcgaagcctgcggcggcaagcgcttcaaagatgagattctcgaagtccgctaccgcgagaaatcgatctacgacatactggagatgacggtggacgacgcgatcgccttcttcggcgatgataagaaaaacgccacctgcaaacggatcatcgaacggctccgccccctgcaggaggtcgggctggggtatatcagactcggacagtcctcctcgacgctctcgggcggcgagagccagcgcgtaaagctcgcttcgttcctgtcgaaggagagcaccgaaggcaacgtgatgttcatcttcgacgagcctacgacaggactccatttccacgacatcaacaagctgctcgacgccttcaacgccctgatcgcccggggccacacgatcgtgatcgtcgaacacaacatggacgttatcaagtgcgccgactgggtcgtggatctcggccccgaagcgggcgaccggggcggcagcatcgtcttcgaaggtactccggacgggctggccggatgtaaggagagttacacgggtcgctacctggcgctccgcgagaaaaacgaataagacaacgatggaatttaccacctatacgctccccaacggcatccggggcattcaccgtcggatcaaaggcaacgtcacgcactgcgccctgctggtgaacgccggaagccgcgacgagctgaaacaccagttcggactggcccatttcaccgaacacgccctgttcaagggtacggagcaccgcaaggcttaccaggtgaactgccggctcgaaaatctcggcggcgagctcaacgccttcaccaccaaagaggatacgacgatccacgccacgaccctgcgaagcgacttttcgaaggccgtggagctgatcgccgacgtcgccttccattcgactttccccgaccgggagctggaaaaagagaaggagatcatctacgacgaaatcaacacctacaaggactctccggccgacatgatctacgacacgttcgaagacatgctcttcgctggatcggaactgggacacaatattttaggccggaaatcgagcctggcacgcttcagcggagagtcgatccgggagttcgtcacacgcacgcacaccaccgaccagatggttttctcgtcgatcggcaacctctcggccaagagcgtcgaaacgaccgtcgcccgctacctgaacgacatcaaaagttccgcacgggatttctcgcgccggcaacccgccgccgtcgaaccgttcacccgggccgtcgccaaacatacgcaccagacgcactgcatcatcggtgctcgggcgcaggggatcaacgacgcggagcggctgccgctggcactgctcgtcaatctgctcggcggcccttcggccaactccatgctgaacgtgctggtgcgggagaaaaacggcctttcgtacaacatcgaagcctcttacacgccttacagcgacagcggcatcgtggccatctatttcagctgcgaccacgacaacacggatcactgcatcgaactgatcgagggagagctgggacggctccgcaacacgccgctctcggcccggcggctctcgatggccaagaaacagttcatcgcccagctggcgatctcgatggagagcaacgaaggttacatgctcggtgcgggcaaaagtttcctggcgcaccgcgaggtcgatacgatggaggaggtctatcgcaaaatacaggctctcacggccgaagacctgaccgccgtagcttcgtcggtcttttcctcaccgtcgcgcctcatctataaataacggttttcaacgatcggacacacactaatatggatgcactcgaacgatatgttcacgacctttcgtcaccggaagaagagcttctgcacgaactcgaccgccagacgcatctgcgggtcgtacagccgcgcatgctctcggggcatatccaaggcaagctgctggagctgctcgtgcggatgctacggccccgcaacatcctggaaatagggacctttacgggttattcggccctctgcatggccgccgggctggaagaggatggcgtgctcgacacggtggaggtggacgacgagctggaggagttcgccgcctcgtttttccgccgcagcccgcacggacaaaaaatccgtcagcatatcggttcggcactcgatatcgtcccgacactcggatatacgttcgacctcgtattcatcgacggcgacaagcgcgaatacccagactactaccggatgctaatgggtgacggaggaagcaaagtgttggtgcacagcggatcgatattgatcgcagacaacatcctctggtcgggcaagatcgtggaaccggtagcacacaacgaccgccatacgcaggcgctgctggaattcaaccgcatgatacgggaggacgagcgggtggaaaacgtgatcgtcccgatccgggacggattgaatctgatccgggtaaaataggacagccgtctgccgataaaggcggggcgggctggagaggaaaagaaaagcactccggtaacaagcaaacagtcggcagacaacgaaaaaaacgactctgtaacgacgaatttgaaaaatcgaccgatatggaattgagtgaattacaaaaacgggtggacacatggatccgcgaatacggtgtccgctatttcagcgaactgaccaacatggccatcctgaccgaagaggtgggggagctggcccgcgtcatggcccgcaaatacggcgatcaatccttcaaagcgggagaaaaggagaacctggcggacgaaatggccgacgtactgtgggtattggtctgcctggcgaaccagacgggagtaaacctcaccgaagccctcgaagccaacttcgccaagaaaacggcccgcgacaaggagcggcaccgcaacaatcccaagctatgaaccgaaaccccgaaaagcggggataataacttatccgagaagggggttcgggagaggatgagaatcacaaacgcggacacaggctgtgaataagcgaccgtcggacgatggctggaacattgaaaaacataataattgcctgataggtattccgggcgattacgttcccgaatcgttccggcaggttatgtacgacggaagtcattatcgacaaaatacggcccttccgacaaaccatcttccggcaaaccgcccgataaaagcgggatcggatacgaaaagcccgtaatcccccgaacaaggggcgataccgcgataaaatacggaactgttacctgtaatcaaatactttagagttatgaaatacgatttcgatgagattattccgcgacggggtaccaactccgtcaaatgggatctggccacagacgaacgggtgctgcctatgtgggtagccgacatggatttccgcgcggccccgcccgtactcgacgccctggaacgacggctccgccacggcgttttcggctatacgaaggtccccgacgcctatttcgaagccgtgaaagggtggttcggcaaacggcacggattccgcatcgaaaacgagtggatcctcccgactacgggcgtcattcccgccctttcggtcatcctgaaggccctgaccgaaccgggcgacaaggtaatccttcagacgcccgtttacaactgtttcttcgccgtgctggagcgtaccggccgtcagccgctcgccaatccgctcatcaacgagaacggcgcctatcgcatggacttcgaagatctggaacgcaaggcggcggacccgcaggccaagctgatcttcctgtgcaatccccacaacccggcgggccgggcctggaccgccgaagagcttacccgcctcggggagatctgcctgcggcacggggtaacggtcatatcggacgaaatccactgcgacctgacgctcgacggccatcgccacattccgttcgcctcgctgaacgaagagtttctgcggcattcggtcacctgcaccgccccgagcaagaccttcaacatcgccggtctgcaagcagccaacatcatcgccgccgatcccgagatacgccggaaaatcgaccggcaactcgtcgataacgaactccacgcactgaatgcctttgcagtcgaagccctgatcgcagcttacaacgaaggcggcgaatggctggacgaactgaaaaaatacctgtgggagaactacgaatacctgcgcgacttcttcacccggcacctgccggctctgccggtcactccgctcgaggccacctacctggtgtgggtggattgtcggacgttgaaacgccccacgacggaaatagcccggcagttactggaggaggggcacgtatggatcaacgaaggcgaaatgtacgccggagaagggttcctgcgcatcaacatcgcctgcccccgcaagacgctcgccgaagggctggaacgcatccgaaaagtagtagggtaattacaattattgaatttaacgaaaagagagcctttttaaggctctcttttttgattccggagtgaaaatccccaacctataatcgggaaatatccgcattccataaaattatatgaatattttacaccaatttcagctccttcttgatccgttcgatcttgtcgttcagttcggcccgtaccttttcgtaatcggcgacggacggcagggtagccttcaccccgaagtagaacttgatcttgggctccgtacccgacggacggacacagacacgggtgccgtcctcggtataccactgaagtacgttgctcttatcctgctccagatgcgtcttctttccggtgcggacatcgaacgactccaaagtctgaatatcgttgatcttcaccacgagcgagccgagaatctctttcggaggattggcacggtaatcgaccatcatccgctggatcaattcggcaccctccttaccggtacggactaccgaaacgaggccttcctggtaaaatccgtacttgacataaagctgcttgagccactcgtacagcgagatacccatcgtatcgcgcacccaggctgcggcctcggccgccagcgagcaggccgacacgccgtccttgtcgcggacgtagtccccggccaggtagccgaagctctcctcgccgccgccgatgtactgcatatcggtaccttcgtgcccgcgaatgatcttggcgatgtatttgaaaccggtgagacattcgtagcatttcaccttgaaatagtcggctacggcatccaccatttcggtcgtaacaatcgttttgatcacgtactggtgtccgttcaggcggcccaactcggcccagcgggtcagttgataagtcatcagcagcaccaatgtctggttgccgttcaacagcacgtattcgccgttttcatcaggcagcgccacgccgatacggtccgaatcgggatcggtagccaacaccagatccgccttcaccttcttcgccaggtcgatagccatcgacatcgtcttgcgctcctccggattgggagattccaccgtcgggaaattaccgtcgatcaccgcctgctcgggaaccatttgcacgttggtaaagccgaagcgcttgagcgactcgggaaccagccgcacgccggcaccgtgcatgggcgaatagacgatcttcatgtcgtggaaacgtttcacgctctcggacgaaagcgacaactcgtatattttattaaggtataactcgtcgaaatccttgcccagagcatgaatgttctgcgggttccggccggtaagcacctgatcgacctcggtgattttctccacctcgtcgatgatgttcttgtcgtgcggtgccgtaacctgcgatccatcggaccagtaggctttgtagccgttgtattctttggggttgtgcgaagccgtgacgaccacgcccgactgacatttcagctcccggatcgcgaagctcaactcgggtgtcggacgcagcgcgtcgaacagaaatacggtgaatccgttcgaggcgaagatgtcggccacacgctcggcgaacatccgcgaattgttgcggctgtcgtgccctacgacgacccggatttcctcgcccgcgaaattgcgcttcaggtagttcgaaagaccctgcgtcgcagcacctaccgtatagatattcatacgattggtgcccactcccatgaccccgcgaagaccgcccgtaccgaactcgaggtccttgtaaaaactctctacaagttctttcatatcattatccatcaggtatttaacctgttttttagtctctgcatcataattgccgtcgagccatttttgggctttcgccagcacttgttgttctaatccgttttccataactacattggttttatttatagcttaaagctgttatcctccaaaaattttatacgcaaatatacatattttatttccaatattcactatcagcaagttaaaaaagaggagcctgccacatccttttttctatagtaaaagtatcgacttttgcaagcattttgccgctccattttcacaaatttatttacaactttgtgctaccaaaaaaaacggatacaccctccatcgatgttagctcccgcacagacatattgcgaaaaatggcaaacttgtttggaccagatcaagtcccgaacgaccgaagaggagttcgtgaagtggttcaaacccatcgtgccgctcgaattcgacggcaagacgcttcgtctgtgcgtgcccaacatgagctacgtctatcagatcgagaagcactacattccgttcctgcggccgatcatctcccagctctacggacaggagatccgcctgcactacgccgttcccaaaaacgacgcacagagcgtgccagtgtcgaaagaagccgatacgacggcgatttcgcagttcagcacccagaccaacacggcaaatataaaaaatccgttcgtcattccgggtctcaagaagatcgtcatcgacccgcagctcaacccgaactacacgttcgcaaccttcatcgaaggggagtgcaaccgcctggcccgttcggcgggtatggccgtcgcggtcgatccgggccatacgcctttcaacccgctgtatatatacggtaactccggactgggcaagacccacatcgtgcagtcgatcggccacgaagtgcggcagcgccaccccgaactgcaggtgctttacgtctcgatgaacaagttccaggcgcaattccagaccgcctacaagaacggcgaaattccggatttcatccatttctaccagatgatcgacgtattgattatcgacgacatccaggagctcacgggaaaaaccggcacccagaacgccttcttcaacatattcaaccacttgcaactggcaggcaaacagttgatccttacctcggataaaccgcccgtggagctgaaggacatcgaacagcgactgctgacccgcttcaagtggggactttcgacccagctcaacacgcccgactacgacaccaaagtcaagatcatcagaatcaaggctcagaaactcggcctccagcttacggacgaaatcgtccgctacctggcggacaatatctccgccaacgtccgggaaatcgagggcgctctgtcggccctggtagccaataccgtctatatgggcaagaaagtttccctgtcgctcgtcaaggagattctgaaggtctatgtccgggtatgccaaaaagagatcacaatcgagcacatcatcgaagtcgtctgcgacttcctgcatatcgacatccagcgcctcaattcgcccgaacgaacccgcgaagtggctcaggcgcgtcagatcgccatgtacctggccaagcagcacaccaaatccccgctgatcgccatcggttcggctatcggaggacgcaaccacgccacggtgttgcactcctgcaaggcggtatcgaaccagatcgaaacggacaaggcttttcagcgacagatggaagagctcgaaaaactggtcctggcataacccgccgggacttttttcatctcctcccgaatcacaaatttgcgaaaaacttaccgacgactcgatatttccgatgccatacaagcccgcaaactccgtcgccttccgcttgttgtcactccggacaaaaccatccccgacaccggcacgcatacacttctccaatccggttgcacccggacattgaaccacaccggaggcagtcgattcgccgaccatatcctccgcctccgaaaatcccggattcttcaggccgtcggcaacgaacgaccctgtttccccaaaatacgacccaccccgacacgcagccgcaaatttccccttcacaccacagaattacatccgcaaacagccataaatccggccggaaatggcgataattgcattttatttcgtaactttgaaaaataaatcccgttgtgtaaaacacccggagcgaaacggcgattccgactttcaggaacagtgtcggaagatccgtcggtcgccgggcagcgacgacagaacagcaaagttcggcaggcgggaaaatcccgggtttacgcaccggacaccggatacgaaatacgaaaaaataaaaacaattcgactatatggcagagaaaacacaagcaaatcccgacaagttaaaggtacttaacgcggtgatggagaagatcgagaaggatttcggcaaaggctcgatcatgcgcatgtcgagcgcagaggtcgccgacgtacaggtaatccccacgggttcgatcaccctggacatggcgctcggcgtaggcggttaccccaaaggacgcgtcatcgagatttacggtcccgaatcctcgggcaagacgaccctggcgatccacgccatcgccgaagcccagaaggccggcggtatcgccgctttcatcgacgcggaacacgctttcgacagctcctacgcccagcaactcggcgtggatgtcgataacctgctgatttcgcagccggacaacggcgaacaggcgctcgaaatcgccgactcgctgatccgctcgagcgccatcgacatcatcgtcatcgactccgtggcggctctgacgcccaaggcggaaatcgaaggggagatgggcgatgccaagatgggattgcaggcccgcctgatgtcgcaggcactgcgcaagctcacctcgagcatctccaaaaccaaaacggtctgcatcttcatcaaccagttgcgcgacaagatcggcgtagtgtacggcaaccccgaaaccacgacgggcggtaatgcactgaaattctatgccagcgtccgcatcgacatccgccgggtgtcggtcatcaaggacggcgaggaacagctcggcacccgcacccgcgtcaaagtggtcaaaaacaaggtggcgcccccgttcaagaaggccgaattcgacatcatgttcggcgagggcatctcgaagatcggcgaaatcatcgacctgggtgtggactacggaatcatcaagaaatcgggttcgtggttctcttacggcgaccgcaaaatcggccagggccgcgacagcgtgaaagagcttctcaagaacgatgaagcgctccgcaacgaagtcgaagccaaagtccgcgaagcgatgattgccgcccgcaaagcataaaaagcgaatgaagagccgaccggggcctgtaacaaaggcaggaaacgcccaaaagaccggtcggagtcttctctcttcggacaaatacaggcagcgacgcacggtatagccgggacagttataaaacggcaccccggaaacgaagcgaaaaacgatattttacgatagaaaacgagatcgtcggtacgaaatccgtcgaaattcgtagttggaccctaaaacagcattggatggtatggattttacgccggaagacgaacgattaatcaaggagaagtgggaggaactgcttcagtcgtgcaccaaaatctgtaaaaacgacgaagactgggagttcatcaaacgcgcttttttcctggcgaaagaggcgcatggcggagtgcgtcgtcgctcgggcgagccgtacctgctgcatcccatcgccgtagccaagatcgtcgtggacgagatcgggctcggcgtcaaatcggtcgtcgccgccctgctgcacgacgttgtggaggatacggagtacacggtcgaagatatggagcgcatcttcgggcccaagatcgccaagatggtcgatgggcttacgaagatgtcgggcgtattcaatgccgatacttcggagcaggcggagtatttccgcaaagtcctgctcacgctttcggacgacgtgcgggtgatcctgatcaaaatcgccgaccgcctgcacaacatgcgtacgctggggtcgatgcctaccaacaagcagatcaaaatcacgggtgaaacgctttacctgttcgcaccgctggcgtatcggctcggcctgtacactattaagagcgaactcgaagacctctgcatgaaatatcgcttcccggtacaatatgccgagctgtcggaaaaactcaaagcgaccgaagaacagcgcgaagccttcatcagcaaattcaacgccccgatcatcgaagcgctcaagcgggaccatatcaacttcgaaatttcgggacgtgtcaaaagcctttactcgatctggagcaagatgcagcgcaaacagattcccttcgaggaggtttacgacctgttcgccatccggatcgtcttccagccgctgccgttcccctcggaaaagacacagtgctggcagatattctcgactatcaccgacatctatacgccgaaaccggatcgcctgcgcgactggatttcgatgcccaaggccaacggctacgaagcgttgcactcgactgttatgggtcccgacggagtatgggtagaggtgcagatccgcacgcaacgcatggaggagatcgccgaaaggggattcgccgctcattggaaatacaaaaacgcctcgctgtcgaacaacgaggacgaactcgaccgctggctcaaaaagatacgcgatgcactgaatggtccgacggaaaacgccgttgacttcctggataacttcaaattatcgctatacacatctgaaatagcggtatttacacccaaaggagaggctcggaaaatgccgtacggagccaccgcactggacttcgcgtacgacatacactcgaagatcggaaacagtgccatcggcgccaagatcaaccacaagatcgagccgatcaccacacagatcaacagcggcgaccagatcgaaatcatcaccgccgacaacgcacgccccaaagccgaatggctcgacatcgtcaccacgaccaaagctaagcaggcgatcaagagttttctcaaacgcgagcggcaaaacaacatcgaacggggcatgaagatgctcgaggagcgaatgcagcaactcaataccccgctcagcggtcgtgtgctgcgcaaaatcgtcccgatttacgaatccaacaacaaagaggagctttacagcaaaatcggggcggggatcgtcgatctaaaagacttggacaaggtcctgaaagtcaatgccaccagcaagatactcaagttctggacgctttttatcaacaaaaaggaggacgaggagggcgacgatgccgaaaatccggaaccgaacagcgcgaaagccgaagaatcggcaacggcaggcgaaccgcaattcgtcatggccgaatgttgcaaaccgattccgggagacagcgtggtagggtataaagaccctgcgtcgcaccgtatcatcgtgcataaatccaactgcaaggagctcgaccggctggccgctcaattcggacgcaatatcctcaaggacgaaatcaaatggtcgcaacacaaggccatgtcgtacctatcgaccatcgaactgcgcggcatcgaccgcaccggcatactgctcgacctggcaaaaacggtcagcgaggacttcagcatcaatatccggcagatcaatatccagacgcacgacaacattttcgagggcacgatcagcctttatgtcaaggatgcggagggcctgcatgcaatcatggacaaaatccgcaagataaagggcatagacaccgtaaaacgtaatcaggattaaaccatcggcactatggacaaagatatcatccaaatactgtggagcgcactgttgatcgtcatagtcacgatcgtcccgctggtcaagaagttcaaggagatgcaaagaaaagagttgcgctccgcatcggcggcacagcccgtccgtcaggcggaggcggacacatccgccccggtgtccggattccgaaaaacggccggcaagtccccaaaaactgaaaaagcggaatctccgttacgcaaccagatcggcatatcccgagcggacgccgaacagcaacctcatagccccggtatcgccgaagaattcgacgtgcgaaaagcggtcctttattcggagataatggctccaaaattcaaggaggagtagccaaagacaggcacatacgctcatcggcatcgattcccgtatttttcggaagccgacacgatgcaaaatagaaggatgagaaggattcttctctccgaattaaattaaaactcccttcgcttattacgggacctcaaagaggcgataagccacaacaagcaacgacgcaatcaataaacatattttcatatggcatccatattcactcgcatcatcaacggcgaaatcccgagctacaaggtggcggaggatgaaaattttctggcattcctcgacatcaatcccctcgagaaaggtcatacgctggtcgtccccaagaaagagatcgattatattttcgacctggacgacgaaaccctgcaagggatgatcgtcttcgccaaaagggtggcgaaaaaaatccaggcgaaaatcgcttgcaaaagagtggcagtagtggttttcggcctcgaagttccccatgcgcacattcacctgatcccgatggaaaacgaatacgacgttgatttccgcaaagtcaagcccaaattcactccggaagagttcgaagaaacagccagaatgattcgggaataggacatacggcagaacatacaaaccattaattaccagccgggtagtgtattgattacactatccggccttattttttaacataatataatcaaaaggaaaataatgttaaaaaaacgacggagagcgaatttcaatatcccgaaattattgcaaaatccagcaaaatagggtagtatgttacaaatgtaatcacatctttcttcttaaacttgcctaattttatccatttgtaaatacacactctgtaaacatgctgttgatattcaacaaatgtaaaatactaagcaaaccctcgcaacagtcaaaaatcccctgcattattagaatcaaaatattgaattatcaatataaatatactataaaccatatatttatgacaactaactaaataaaaacaagaagaatccaaccgtatttagagccgttttgcagtccacatcgaatttcataaaaatataaaagcattatatacttataatcaataaattacataaaattatatatacaaataattcacacacaagattcgaag

SEQ ID NO: 10418 - DNA, 2659 bp, Unknown
  gut microbiota DNA sequence
cggaagctgtattattccctcacggaaatccgccgtgtgctgaaggagcgttccgtgcggcgcaagaaccaaccaaaggagtaggccatgtttctggataaggaatatttcgacggatggatgcagcggctctcggaacggctggaacgtatcgagaaactgtgcgcgggggacgtggagcaaccgctttccatcctgcctgacggggagcgtcttctggacaattacgacctgtgccgtatgctcaatatcagcaagcgcacactccagcgttaccgcacctcgggagagctgccttacgagatgatctatcacaagaccttctaccgggaatcggacgtcctgcggttcatcgagcgtaacttcagtaatttccgcaagctgaaaaaggatcgtcctgccggttccggttaggccctgtcccgagagtccggcgtcatggaaaaacgcggagatacatggaataaggcacgacaaggcggtacaaccgctcgatatttgccgtaaaatcagtatgtttgcacttggaagcctatataataatgaagcaatgaaagaaactgataaaatatatcctgccgacaaaggggaggaagagctgctgcataacgtgcgccatatcttgcaggaagcgcgcgcgaaggtgatacatcatgtcaattcgaccctcgtgagggcttactggcaggtagggaaatatatagtggagtacgagcagcagggaaccggccgtgccggatatggcaaggctgtcatcaacaccctttccaggcggctcgtggcggagttcggaaacgggttcacggccaccaacctgcggtacatgaggcagttttaccagtgctacccgaaatatcacacgctgtgtgataaattgagctggtcgcattgccgcacgcttctcaaggtgtcgggcgatgccgcccgtgatttttacctgcacgagtgcgtcaaggaaaactggagtgtccggcagctcgaccgccaaatcaacacgcttttctatgaccgcctgctggccagccgagacaagaaggctgtgaaagaggagatttcccgtaccgaacccggacgtgtcgaacccaaagagatcatccgcgacccgtatatcctggagtttctcggtatcccgcagggagagcattttctggaaaccgatctggagcaactgctcatcagccgcttgcagcgcttcatgctcgaactcgggaaaggcttcgccttcgtcgcgcgacagaagcgtatctccttcgacgacaagcatttctacatcgacctggtcttttacaattacctggcccgctgtttcgttttaatagaccttaaatccggggagctgacccatcaggatttggggcagatgcagatgtatgtcaattactacacccgtgagttgatgaatcccggggataaccctccggtgggtatcgtcctctgcgcggagaaaaacgacgcggtcgtccgttatacgctgcccgaagatgaaaagcaggtcttcgccgcccagtacatgacctatcttcccacgcaggaggagctgcaaacactcttgcaggaagtgtgacgacaacgctcacgggcatatgaaaaaagccgacggaaatctgtacttccgtcggcttttcgcttacatcttgatccctttcttcgcggggccgttctccggcaggctgcccacgcccgcgatcacgatgcgccccccggaggcgtcggcaatctgccgcagccgggaaggaatacgggccgccgtgttgtcttccttcgggagctcttccgccgtgtcatgccgttcccggcacacgtcgttatcctcctccgcctcctttccctcgctctcttctatcggtttgaggctttgctgtatcctgcggtctatttccgtcaggtcagctttcagggccgtcagttcgggctccttgcgccaggaactttccaccacttcccgcaggacgggaatatctttctccagttcctcgttctttttccggaatttttccagtgtcggctcgatggtcgcgagcgcgtggatgaagttcatcgccgccagtcgcgggtcggaggcgatatttccgtagttgtactggtatagataatccccttcaccccggacataaaaacggttctgcaccaggtcgagcccgtctttctcggtcgtttcgctctggacgagcagctcgaacccgtagaggctcccgatgggttcgagcctgtcgagcgtgcgtgccgtttcggcgatacggttgagctgtttcccgatgagcttggggtcggaggtttccagcccgttcagtttcacgggattgcggtacgagccgtcctcgttgaactcgacgcgggccttgaagtgttccagatccttgccgatacgccgtatcaggtcgttgttcttctctatcttctccgtgatcttctccagcttgtagcggctcgatgatttgccgcgcacgaatgcctggcgttcgctttcgagcgtggcgatcttcttctccaggcgggccttgtccagcaggtctgtatttcccgagaggacggcgacatactcggaaaaattcatgccgctcttctcgtcgatggccccctcgtcgatggtacggcttcccatgttgttggtcttgagctggcggatgaacagttgcttgttgtgcaacagcccgaactt

SEQ ID NO: 10419 - DNA, 33021 bp, Unknown
  gut microbiota DNA sequence
catccgtaaagctcatatacctcgttgtcggaatacttcattttcttgcaccaatggagaaaggtacagaagaggttcatcgtgttgatgatggtcgtattcgacaatggtcttggagcatggttgattaacatacgcccggcatagaaatcaggatgctgctggcgcaacaggtattcgttggtcacataatcccggaaaccgttcatctgctccaatgtgacggtttccacaaagagggtgaaatcggcattacctaatatctcacgttgatattcatggtaacgtatcatcttgcgctcgaagcggataatatgttctttggttctgtccgcaccgtcaaacttttccagatattcatggatgcggcatattagattcggatggttgcgttcgaaagcccgtgccggatgcagtacatcctcgatggtctgtttaagccatgcgctgtttgccttgtccgaaaaagtcttctccactttctcgatgatggaggcaatctgttcgggcagcagtttctgttcaacggcaggtacggctgtcgtgcgcttgtaactgagagtgtcggaatcccagtacttgtcatggactacaagaggcgaaacaacctttatatccacgttcttctcacggacacggaaacagatgctcgaagtcgaggaactgttctttttcagatagacggaaactttcatcggcaatgcgttttgggattaccttgcaaaggtaaataaattcccgtatatgttcccatatatcccgaaaaaacttgtagcggattaagacaaattaaagagtgcgtcccgaaagtgataccacataaaatgctgtatattagtgattatattttctcttgttatgcttttcttttcattttcgactttcccaatccgttgtcaaaacatatattgcagttccacgattttcttttttgtaaatgggttgaatcggcgcctgtcagcaagaaattcgattgtatgatagaagatcgctggaagtgtcaaaactgcggaaattccgtgccggacggattgactgtatgtccgaaatgcgggctggttaaaggtggattcgacgagttgccgaaacatacggcagacggtttggagatagctcgggtcgaacagaaagtcaaagtagaaattccgtttattttgtatctggggactgtctgttctattattttattggccattgtagtttatatttatgtggcaataaaattatgaaatcttttatctataggtatattttatatttaaccgtcgttcctttcatctcttgtaattcggatttgcgtatcgaaggaacgtatgattttgccgattcaaatgatccgatgaaaagcatcattatctccgaagcggatcaaacaggatttgtttccatctattacgtaatggaatctccgtattcatcaaatgccgagcaaataattttcgcacaagatagaagtaaacctgacagaacatccgatggcgggttattgctcgaaagtgaatggggacaattgatctttgaaaaacctcaatccttcgtatttgttatttcgtccgggacggaaataaatttcggaaatgcattcagcataaccgcactatatggagagcaagcgcctcgagtcccgcaaaacgttacgttccggggcggataaactggctgggacgatgatttccaactttaagaatacgctcgaattgactcaacggcgcgaattggaagagctgaaacgacgcgaatcgcaaccgatcgttgtcgaaccttacctgtgtaaattcgaactcgatcgttgggatcaagttatattcactttcaaagccgacctccggaatgtgtcgcaaagcacatttatcgacgctgaattttatgaagaatatatcgcaggagaagattgggttggggaaccttacatccgcgaccgattggctgcatgggtttccttttactttaataaagagtacgttttgagaagagacgaggggatgttttccagatacgaatgtatgtttcctaatgtttctttcgataatccgtggaaaccgcaagaaacgaagtcctttgaggttgtcatgtcgatttatgacgacgatgccgtaaccaaaggttttactgcattcgatgtcaaaagttgtatccttcatttcaatttgacggtcgaagaccctgacgggcggaaaattccgatgaaaatgaaattcgatctggcggatgtttggaaggattttattgacaagtagttattggttgatgatattttattgaagaaattgctcgtggattttcagaatattaacgaggtataaggcccggtaaactggtaaaaagaatatcagtgaagtatttattttgctttgtgctcgatacgacaggggattagtgccgttcgaggtggaaaagtatatgaccaaattaaatagcgattgacaatgaaaaaactgttttttgccagcctgtgggttttggcttgtttgaccgcagcctgttccgatgaaaaagacgaaccgaacggcgagtccggatcggtcgtcggagaatgggtgtttcagaagaacgagtattatcggaatggaaaaatgatcgacagttttacggctgtggaggacgaggataagatgatcgctgtatttcgggaagacgggacttttcgttattacgatttcccgcccgaagagtattatgacgggacttattcttatgatgaagcgtcgggagtgttggtgacggacgacgggatcgaaaaacagagctgccgggccgaaataaccgtttcggagatgaaatggatttatgatgaaggcaatgatgagatgcttgtcgaatattatacgcgcaagtaacggtttttgttggtgcgcttaaaaaaagaggcgttgtttattgttgttctccgatgtaaaaaagatgcggggaccggatttatccggtccccgcatcttaacatgtcccttgccgataccaatcgatacggtatttttgttttgcactcgctttgcggagcctgggtagatttgttttgcgggaaagctatttctctttcggttcgacaaccagttctttggcccgtcggagcgccgcattgatattcgggcagatgttttcctcgcccagcagggagtagaatcccgctttgtgcaggacttcgtgtactttgggattgacgcccgaaaggatgatgcgggtattttcctgttgcgatatgcggcagaggttcgtgaggttatggatgcccgtcgagtcgatgaaggggacctttcgcatacggatgatccgcacctgtgcgtggtcgccgagctgcaccatctgttcctcgaatttgttggcgatgccgaagaagtagggaccgtcgatttcatatacttcgacgcctcgggggatgatgaggtgctcttcgtgcgactcgaggtccgactccttaccggggtctatttcgttgcggatgaccgagatgtcggtagtttccatcacgcgccgcatgaagagcaggcaggcgagtaccagtccgacttcgatggccaccgtcaggtcgatgatgaccgtcagcaggaaggtgaccaacagcaccgcgacatccgagcggggattcttcatcagagcccggaacgtgcgccattcgctcatgttgtacgataccactaccagcacgcctgccaggcaggccattgggatatattgcgccagcggcatcaggaacaggaagatcagcagcagtacgacggcatggatgacgcctgcgaccggcgtgcggccgccgttgttgatattggtcatcgtgcgggcgatggctccggtggcgggaatgccgccgaacagaggcgtcaccacgttggcgataccttgggccacgagttcctggttggagttgtgcttgtcccccgtcacgccgtcggcgaccgttgccgacagcagcgattcgatggcgcccagtacggcgatggtgatagctgcgggcagcagtcctttcatcccttcccatgagagggcggggatgaccgcgtcgggcagttgggagttgatcgtgaatcggtcgccgatggtttcgacggagtcgattccggcgtagcgtttcagcagatagacggccagcgtcataacgacgatagcgatcagcgaaccgggtatctttttcgagaagcggggcgtgagggcgatgatggcgacgctgataacgcctacggccgttgcccagaggtcgatcgtcccgaaattctggaagtagaccatccacttcccggcgaagtcgcccggcatttcgggggtcgtgaggccgaacagatccttgatctgcgtggtgaagatcgtcacggcgataccgctggtgaaaccgacgacgatcgggtagggaatgaatttgatgatcgtccccaggcggaagagtcccagcaggatcaggaatacgcccgccatgatcgtggcgacggtcagtccctcgatgccgtactgttggatgatgccatagacgatcacgatgaatgcacctgtggggccgccgatctgtacgcgactgccgccgagcgccgatgtgaggaagccggcgatgatggccgtgatgatgcctttttccggtgaaacgcccgatgcgatgccgaaggcgatcgccagcggcagggccacgatgccgacgatgatgccggccatgaggtcggcggtgaatttctcccgggagtagtgcttcagggatgtgagaagtgcgggtctgaattcgatcatctccgaatttttattttaaggttaattttaaggttgaaaaatggtggcgcaaaggtagtgaaaatgaggggaggataaaacaaacggcttcgttttttataccgcatgtattctgttcattgcggaaataaaagactattattcatattttcattgtgttacgtctttttagattggattgggagcagatcgattcgtgtgtctgcgccgtataaaaagccggggcggacgatttccgtttaagagtctgttttgaattttataaatgagttagacattggccgagagaaaatgtttcggcttttttgaacctcttttctgcatcttctttcagcaggtgctgaaaatagttcgctatttacgcaacctccccaaaagaatctactcgaaaacagctttcaaataatctctacataaaattcgagcaggttctaaaaattgagataggggaaaatgagcacctttcggcatgcaataccggaaggtgtcatacggattttgtacttttatcgaacgttattttttcagtttcgccaactgttttttcaggctgaaacggtcgaattcgtcgataaggttcgtcatcagctctttcacgctctcgatcttttcggctcgccaggcattgacgccggcgaaagcgtatcctgccgacaggttgcctttgaaggcgttgtagagggccatgatgatgcagtaggggctgtgggttacgtcgcaggtcttgatacagttgaacggacagcttttgggctgtttcaacccttgtttcacccgttccaggaaagagttgtggatggcccgccccggcatacccaccggactttggatgatctctatgtcctgttgagaggcttcgatgtaactccgcttgaactccgtcgaggcgtcgcactcctccgtggtgacgaagcgcgtgcccatctggacaccgtcggcgcccagctccatgatgcgataaatgtcttcgcccgtgtagatgccgcctgctgcgatgaccgggatgtgcgtgtcgtgcgccgtgccgaaacgacggacttccgaaacgatttcgggcagcagccgctccagcgagaagtgttcgtcggtgatctgttccggcttgtagcccaggtgtccgccggccttgggtccctcgaccacgatcgcgtcgggaacgtatttgtagttggcgagccatttctcgcagatgagcttggcggctcgggccgacgaaacgatcggagccaacttcgtcttgctgcctttggtcaggaacgacggcaggttgaggggcataccggcccccgagaagatgatgtcggccttctctgcgatggccgttctgaccatgtctgcgaagttggacatggccaccatgacattgacgccgatgatacctttggtcttttcacgggctttgcgcagctcttcgcgcaggccccagatgcttgccgtattgtagtctttggagtgttcccggtagatgacgcccagtccggccgaggagatcactcccacaccgccttggttggctacggccgatgcgagtcccgagagggagatgcctacgcccataccgccctgaatgatgggaagacgggccagcagatcgccgattttcaatgttttcatagttaaagttgctttgaatttatatttttcctttctctccgtacgtcgtgcccgccgatcgtgtcgtatcgtttgtcgattcggctttttcgtaagtttctccttgagcggatgtttcgatcggtttcaggttttcccgaaaggcggctctgtgcggggagagtggagctttttgtaagttttggatcccgggtgcccgtaaaaatattgtatgtagggtcgggacagtttgtatttctgttattgttccgctgtcggtgcgacggtcagttcgagctcctcgagccgtgccacgggtgcgatgtccagggttgcgatattgccgttcatgtagcggtagtatcctgccagggcgatcatcgccgcgttgtcggtcgtgaacttgaattcgggcaggaaggtgcgccatccccgtttccttccctcctccgtgatgccgttgcggagccctgaattggccgatacgccgcctgcgatggcgatgtcgcggatcccgtactccttggaggcttttacgagcttgtcgagcagaatttccacgatggtcgtctgcagcgaggcgcagaggtcggctttgtttttctcgatgaaattcggatcttcggccatttcgtcccgcaacgtatagaggaacgaggttttgagtcccgagaacgagtagtcgaaaccttcgatgcggggtttggcgaagcggaacgcgtgcggatcgccctccttggccagtttgtcgatcaccggcccgcccggatagggcagccccatgactttggcgcacttgtcgaacgcttcgcccgccgcgtcgtcgatcgtcgtgccgacgatctgcatgtcgagcggaccgtccacttttacgatctgggtatgtcctccgctgaccagcaggcagaggaacggaaagtcggggtgcggaagctgtcggtcgggcaggtccagaaagtgggagaggatgtgcccctgcagatgattgacctccaccagcggaatgtcgtgggagatcgagagtcctttggcgaacgatacgcccaccagaagcgatcccagcagaccgggtccgcgcgtgaaggcgatggcgtcgatcttgtcgatggtgacgccggcctctttcagagctgtatcgaccaccggaacgatgttctgttgatgggctcgggaggccagttccggaatgacaccgccgtatttttggtgcacggcctgcgaagcgattacgttcgacaggagtgtccggtcgcggatgactgcggccgaagtgtcgtcgcaggaagattctatgcctaaaatggtaatgtccatgtgatttttgtgtggcaaaaactttacaaagatagtgaaagccgagagaaaatgggaacttgttcccatttttccgaggtacatcctatccaagactatgtcaaagatacgaataagccgagcgcaaaagcaaatttatttgtgtttttccgaggcggaattatccgaataaaaatcaaagatacggaataaaatccgaaatgattcgccgatgtccgtatttatttcgggcggcagccgatctcgggtctctgtccgggcttcggaaaaactccgaaatgcgattggcaacaggtttgcggttctgtattgtaccggacgcggatttttaccggttgttgcgggagggcttcgcgacaagttcttcgaacggtgcttttaacgataaatatccggtctgccggatgttaaatcccgaaatttgcttaaatttgcaatttattaaaaacggttttgtcggataatgcgcaggatagtgaacatactggccaagatggtgtcggcgatcgtgctggcgctgatctttctgcctctgttggtcgccctgttgttcgagattcctgccgttcagaatttcgtcgctcgggaggcgacggaaataatttcccgcaagctcggcacccgcatcagtatcgaccgggtggatataggcttgttttaccgcgtttcgctcgacggattctatgtcgaggatttccaacgggatacgttgctttatgccggccgtctggatgcccggatcaagagcctcggcctgttcgggggagggctcgttttcagccgggccgaattgtcggacgcccgtttttgcctgcgcgaaactcccgacggggagatgaacatcaagcaggtggtcgataaactttccaaaaaggacaaggcccgggcggagggaaaattcaggctggagatcgagcgtctggaaacggatgggctggatttctgcatggaacggctggagcaccgcaatccgtcgtacggagtggatttcgccgatatgcacctgatcgacatccgggccgaactgaagaatttcaccatcgacggtccggtgatccataccgacatcgggcgtttggcgatgcgcgagcgcagcggatttgtcgtcgaagacctggcgggctgcctttgcatcgccaacggctgtatcgatatccgggagggacacatccggacggcgaagtcgaatatcgagttgccttcgctttcattgatcggattggactgggccctttacaaaaatttcgtcgaggaggtggacatcacggcgcaggtcgtcaatacgacgctgtcgtccgacgacatcgcctatttctcgcccaaaatgaaggattggcacctgacgctgaccgacgtgaacgctgatgtgagcggccctgtggccgatatgtcgggatcgctgcgctcggtccgcacgggagccgacacgaaactgtcggtcgattttgcggcgcagggactgcccgatgtcggaaaggggcattttaaggccgacatttccgaactgacgacttcggcggcggatgtcgatcggctggcggctgccctcacaggcaagaatttgcccgacgaggtgctgcgtattgcaaaaaatgcgggcaaaatcggtcttaccggcaaattcgacggaacgctcacggcctttgctgcggatgctgtgctggcgaccgagatcggcggtgcgacctgcctgttgcaggtgagctcgctgcgcgacggctgtcgcggtgtgctgggcgatgtgaaaacgtccagtctgcaactgggcgagttgctggaaaacgatctgctcggtcccctctctctgaatgtgcatgtaaacggcgaactcagctcggaacactccgacgccgaagtgtcgggcgagatcctgcgattggggatcaacggatatgattacgattcgctccgtatgaaggggcacctggtgaaccgggagttcaacggattgatcgaagcccgggacaggaatctgcggttcgattttagagggctgctcgacctgaacgatgagcagaggccccgctacgattttgcgctggaccttgaggaggcgaacctggcggctctgggggtgaatcgccgcgattcggtgtcggtgcttgccgcccggattgctgcgcgtgccgtcggccgtacgctcgacgacctgaacggaataatcttcgtccgtgatgtatcctatcgttataacgaccgcgagcttgcggccgacagcgttgtgatcgtgggtcggaacagcttgtcggacaagtttattcgtctgcgttccgattttgtcgatgccgactacgaggggaaaacctcctacaaggaggtgttcgcctacctgcaacagcgtttccgagattatgtcccgacgcttgacggcggtcccggctggcaggcgcagcatcccgatacggtagagttggctgacggatattcccaacttacggtcaatgtccggaagatcaatccgctggtcaatgccgtttctcccgggttacagatcgcggacggatcgcggttgctgctgcggatcaacccggcgaacgacaaactttcgttcgaagcggcctcggattacatcgagcggggccggatgctggtgacacgtctgaatctggatgcccataaccggggcgactcgctcgttttcgcggcttcgaccgaggatctttatctgaacagttttcacatgagccgtgtcggaatgagcggaggggccaaggataacaagctggagctgattaccgatttcgcggatactatcggcgatgtttccggacggatcggattccgttcggaatttgcccggggacgaggtcctgcgggccggcagatcgatctgcggctgacgccgtcgtacatcagccggggagagaagacttggaatatctatacggacggtattacggcagatacttcccggatacgaatcgaccgttttcgaatggtcaatgccggacagcaactgctgctcgacggcgtcgtatcgcgtcgtttgcaggattcggtgcaattgacgctgcataatttcgagctggcgcccttctcgcagttcacctcgtcgatgggctaccgtgtggacggtcgtaccaacggttcggcgacgatgaaagcggtgctcggggccggcgaggtgcaggccgatatcgttgtggacagcatttcgatcaacgatctcgccgttccgtcgatctggctgcggtcccgatgggatttcatacagaaccgcgcgggtattctggtgcagcagcgggaaaatctcgatactctcgttcgtggtttttacgccccttcgcaaaagcgttattacgcccgggctaccctcgacgcagtcgaactttcggcgctcgatcccctgctgaagggggtggtcgagcggaccggcggcaatgccgatgtcgatatcgccctgcgcggcagcggtaaggaggcgaacctttccgggcagatcgccgtgcgcgatttcaccacgacggtggattttacgcaggtgacctacacgatgccccggaccgtgatcgaggttaaaaacaatcatttgattgccgaaggcgtgccgctgtacgatccggagaagaacgagggccttttctcgatcgacctcaatctggaacatttgtccaatatctcctattcggtgaaagtgctgccgaaagagttgatggtgctcaataccacttcgaaggataacgacctgttctacggccggattttcgcttcgggttcggcgacgatcgcgggcagcaagggcggtgtgaaaatggacatcgtggctaccaccgaaggcgattccgaattttatatgcctctgtcgggacagtcgaatgcgaaaacggccgatttcgttacgttcgtcacccctgaacagatcgatacgaccgactatctggtgcgcaagaagctgctcttccagcagcaggggcgtaaaaaggaagccgcaggcagcacgatggatattacgatggctctcaatgtgcaggacaataccgctttccaactggtgatcgacccgacggtcggcagtgccctgaaaggtcgtggcaacggtatgctcaacctgcatatcaatccgggtaacggtatcttcaatatgtacggcgactatacgctcatcgaaggcagttttcttttctcattgcagaatatcattactaaaaaattcatcatcgagagcggttcgatgattcagtggacgggcgagcctgtcgatgcgcggctcgacatcaatgccgtctataagctcaaaacgtcgttgcagcctctgttgaacactgtaaccgcctcttcggacgacgaccagagcggttcccggatttcggaccgttcggtgccggttgattgtaagatccatatcggcggtcgtttgagcaacccgcagttggatttcagcgtggtcgtgcccgttacagatatagaaacgcaggctgcggtggccagcgtgctcaatacgcaggaagcccaggcgcagcagttcatttcgctggtcgcactgggtactttcagcaattccggcagtgccaatatcggtgcttcttccggtgtggcaacgggtctggagatgcttaccaaccagcttaccaactggttttcgacagatgattaccggatcatcctgaactaccgggcaggctccgaaatgaccggtgacgaggtggatttcggcttctccaccaatttgatcaacaaccgtctgctggtcgaggtcgaaggcaactacatcatcgacaacaaacaggccgtaagcaacaatgtttccaacttcatgggcgaagcgcatgtgacgtggctgatcgacaagtcgggcaacctgcgtctgaaggcgttcacgcagaccatcgatcgtttcgacgagaaccagggcctgcaggaaaccggtatcgggatctcctataaggaggatttcaataatttcaaggatctgaaacagcgtattcgggaccgcttcaccaacaagaaacgtcagaaaaagcgtcaggcccgccgcgaggagcaggcccggcgtgcggcggaagaggcccaacggcaggaattgcttctgccggaagatccgccggagcctgaatacgacttggagcgggattgatacggaaaaagtaaaactcgaataaaataaatttaattcactcaaaaagattatgattagtttgttgcagaccgcagatgcggtcgttgtcgcggagcagacccgcatgggactttggcagttgtttatgagcggcggatggctgatgtgggttttgttgattctgggaggactcacgatctttatcttcgtggagcgcttcatggcgatccgtaaggcgtcggagttcgatatgaatttcatgaaccgcatccgagattatattttggacggcaaggtcgctgctgcggtcgatctttgccgcaagaccaatacgccgatcgcccgtatgatcgaaaagggtatcggccggatcggtcgtccgatgagtgacgtgcagtcggccatcgagaacgtggcgaacctcgaagtgtcgaagctcgaaaccaacctgccgatcctggcgaccatcgccggcggcgccccgatgatcggttttctcggtacggtggtcggcatggtgcagacttttatggatatggccgctgcgggcggtacggtcgatatgtcgctcctttcgagcggtatgtacgtggcgatgatcacgacggtcggcggtctgctggtcggtattccggcctacttcggttataactacctggtggcccgcatcgagaagctcgttttccggatggaggccaactcgatcgcctttatggatattctgaatcaacccgttcaaaagtaatctgttatggcaatcaaacgcggatccaaggtcgataagtcgttttcgtcggcttcgatgaccgatctgatcttcctgttgctgctgttcatgctgatcgctacgacgctcatcaaccccaatgccatcaagctgattctgccgaaaagttcgaatcagttgaaggacaaggcgatgacgacgatttcgatccaggatacgggacatggatacaggtattatgtcgagacggaaaacgtcggctcgcgcgagggcgtggagaaagccctcaagtcccggctggcgggacaggagaaccctaccgtttcgctgcattgcgacaagtcggtggctttcgacgaagtggtggctatgatgcgcatggccaaggccaacaattttacgctcatcgcggctacctcgcccgaatagagtgaaacccggggaatgccgccctgcggtgttttccttgtgagaattgaccgatgtattattacgatccgaataacgataaatcgaacgcgcgtcgttgggcgagcctcgcagctttgctttatgcgctgtcgatcgcggcggctttcctgttcgtgtcgttcgatatggggcgggacgagctgcttcccggcgaagggttgctgatcgatttcgggacgaccgaaaccggtctgggcgaccgggacctgtcggctaccgatgtgcaggcaccgccgcagcaggcggcggccgaagcgtcgcggcagcaggtcgagtacgtgaccagcgagcgggaggagatcgccgtgcagacaccgcagccggagaagaaaccccgcgagcgggagactccgggacaaactccgcagcgcagcgacgcgcagcagcctgccgaacaaccccgcacggtaaaccgtcgggcgctcttcccgggccgcacggcggggagcacttccacgtcggaggggcctgctgcgggcgagggtaacgccggggacctttcgggggcgccggaaggcagtcacgacggcacgggccagagcgattcgggcattgcctacgacctttcggggcgctcggtggtgggaaagctgcccaagccttcctatccgggcaatgagtccggcaaggtcgtcgtcgatgtgactgtcgatgcttccggtcgggtgacatacgcctcctatcgggcgcagggatcgacgaccaacagcaagcggctggtcgatgcggcggtcgaagcggcccgcaaagctcggttttcatccagcgagagtttgatgcagaccggaacgattacctatgtctttacgttggaatagattggaatgcgctgccaatccggtttgccgtgcgacgttgcaccgcatcgactgaaggcgcgataacagcagcggacgatggctgcgaaaacgacacgaatgatacgtacgatattattgattgcggcttcgtgccttgcatggctcggggccggcgcccagcaatacgagggagcgcacctgaaattcgagagttcgttccataatttcgggagcgtaccccgttggggcggcgatctggtttgggagttcgaatatacgaacgacggctctgctccgttagtaatagtaagggcgcagactacctgctcgtgcctgaaggtgagccactccaagcgccctctcgcaccgggcgaaactgctgtgatccgtgtggtctatgaaccgcataagaacgaaccgggcactttcagcaaggtgatccagatctattccaattcggtttcggggcgggagctgattaccgtttgcgggaactctctggataccgaatgatccggtgccggaaaggggtacgtcccggaagcgatcgatagaaggggcgctttgataggggcggtttcgagaagatgtcaaaatgggatcggatgttcgcgtgaacaccgtaaaatagttcgacgtatgccgttttgacgataaccgcccggtttgtaattccgattgcgtcgaacctgtattgcttatggaactgttatttacgaactgtacgattctgcccatgacggcagagaaggagccccggactttcacgggggcggtcggcgtggcggatcgccgtctggcgctggtcagcgacgatccccggcggatcgaagcgttccggcgggagcatcccggggtgcgggagatcgacggcacgggcaaggtgctcatgccgggactgatcaatacccactgccacgtggcgatgaccctccagcggggctatgccgacgacatcgccctgatgaagtggctgcacgaatatatctggcctttcgaggcacagcaaaccccggacgaaatcgtactgggagccgaaatgggtattgtcgaaatgttgctgggcggcgtcacgacgttcgtcgatatgtactggcacgaaaaccgtatcgccgaggccgtgcggcggctcggcatccgggccatgctcggagcgagctacttggatacgagttgggaggcttttgccgacgatgtggagcggatgatcgccaccacgggcgactgcgaccgcatccggttggccgtggcgccccattcgccctatacctgttcgccggagtcgttgcagcggggcaaggagctggcacgccgccacggactctggttcatgacccatatttccgaaaccgaagacgaggtgcgtatcgtgcgggagcgttacggtactacttctgtccggcatctcgataccctcggtattctcgacgaccggacgatcggtgcgcattgcgttcacgtcgatgacggggatatccgcatcctgcgggagcgcgaagtggccgtgtcgcacaacccccagagcaacatgaaaatttcgagcggtatcgccccgatcgcccggatgcatagcgaaggggtgctttgcacgattggcacggacggtacctgttcgaacaacgacctggatatgtgggacgagatgcgtaccgcatcgttcttgcagaaagtagcgacgatggatccctgcgtgctgcctgcctatgaaattctgaaaatggcgaccgtcaatgcggcccgtgcgatcggtcatgccggcgagttgggcgttattaaggagggtgcgctggcggatttcattctgatcgatgcggtgaagccgcaccttatgccggtatataatatggtggcgaacctgatctactgcggcaaggctgccgacgtggataccgtcgtggtgaacggcgagatcgtcgtcgagggccgccggatcgagggcgtcgatctgtcgaacctttgcttccaggtgcagcatacggccgaggacattgcccgccgtacggccgcagcgaaaaagtaggctttcaaggttgcccgcaactgaatgaaagggctgttcgataacttcccgaaattgaaaatcacccctgccggagtttattccgacgggggtgaaaacgttaaaataggacttgtcagacaatccctctgtttcccggtatttcgtccgtttattcgagcagcagctcttccaggtcgggaattgcggggaggatgtaatcggctccggccgcttccagttccgcccggtcgccgtagccgtagagaactccggcggagtcgatgccgatggtttttgcaccgagaatgtcgtatttgcggtcgccgatcattaaggcggttccgcgatcggtgatgttgctcccggccagcacgtgagcgatcacatcggccttcgtcggcagcgagccgtccagtcctgtgccgccgacgaaggagaaataacgggcgatgccgaagtggtcgaggatccgctcggcgaatacccggggcttcgacgtggccacgcagagcgtatatccgttgcttgcgagcgtgtcgagcagctcgtccatcccgtcgtagagccggttttcgaagatgcctttttcggtgaaatactcccgtgatacggctacggcttcgctggtctggcggtcgtcgaagccgtaaaatgtccggaaggactccgcgaacggcggtccgatgaaggggcagagctcgcgtaggtcgctcacttcgataccgaaatgccgcagggcgtattgtaccgaacgggtgatgccctccatcgggtctgtgagcgtgccgtcgaggtcgaacagcagatgtcggtattttttcgtcattgtatggaaatcgttgtctgaaaccccgctcggcagcggtgtatcgtcgtttttttgatgttttcgttgtctgataggcttcggcggcttccgaatcccggatttcccggtaggacggacgagcaggaaacggtcgttttccgaccgcccggtgcgggtagtgcgggcggctggtcctctccttcacgcttctcggaggaagaccgtcgccgtgcgcgaagtgttgtagatgcggatgcggggcagttcatccccctgcacggggtaggagaaatgctgcccccgcatgtcggtccgctccgtgccgccgaaacggcgctcgtcggtcgagaggatcgggcggtaacggcccggaacccgtacccgtacttcgtaattgggtatcgaggccgacggatgccagttgaatacgaacagcaggtcgccgtgcgaaaaggccatcgtctgattctgggtgtccatctgtaaattgtaagggtagccgtcgcggagtatgccgtattttttcaccagggcgatcatcgcccggtcgaactccccgagctgggcatagcgcagcagcccgttgtccgcgagcgaccattggcgccgggcgtaggcgtagctccagccgttgccctcgcgcggaaagtcgatccattcgggatgtccgaattcgttgcccatgaaattgagataggcgtccccgcctgccgagatcgtgacgagccggatcatcttgtgcagggccattccccggtcgatgaccggactttgcgaggcgcggtccatgtgttcgtacatctcctttcccatcagccggaacgcgagggtctggtcgcccactaacgcctggtcgtgcgattcggcgtaagcgaccgtcttgatgcccggcagacggtcggtcaggacgtgccaaatggcgtgtatgtcccactgttcgtcgggtatctccttgagttgtcggatccagaaatccggaatggccatgcccaggcggtagtcgaaaccgacgcctccgtctgcagtcggaaccgcgatgcccggcatgccgctcacctcctcggcgatcgtaacggctcggggacggaagtcgtgtaccagcgtattggccaacgtaaggtaggtgagggcggcttcgtccacctcctcatcgaaatattgctccctccggacgaagtcggtgtgcccgtgatggcggtagagcatcgaggtcactccgtcgaaccgatagccgtcgaagtgaaattcgtcgagccagtatttgacgttcgagagcagaaagtgccgcacctgttccttgccgtaatcgaaagttttggagtcccagtagggctgttcgcccgccgtacccggtagggagtagagatgatccgtaccgtcgagctcgttgatcccctcgttgaggttcttcacgtagtgggcgtgcactagatccattaccaccgcaagtcccagttcgtgagccgtgcgcacgagtgtcttgagcgcttcgggcgtgccgaagcgcgaggaaggggcgaagaagttcgacacgtggtagccgaacgacccgtaatagggatgttcggcgatgcccatcaactgtaccgtatcgtaaccctcttcccggatccggggaagaatcttttcggtgaattccgcatagctgcccacgccttcgcgctcctgagccatacctacgtgggcttcgtagatgaataattcctcgctgcgggccgcaatgggccggtcaccctgccagtcgaacggggacggattccagaactgggcggtgaaatccttggttttctcgtcctgtaccacgcgggtcgcataggcggggatgcggtcgtgccagccgttgtcgccgtgtacgtggattttgtagagcgagccgtgcgtgagccgttcggcatacatcgcatcgggcaggaaaatactccacaccccttccgggtttctgtcgagccgcagcgaagtgcgctgccaaccgttgaagtcgcccagcagataaacgtcctgcgccccgggaagccattcgcggaaccaccagccttcgagcgtctcgtcccgctgccatccgaaatagcgatagccgttggcgtaatcgacgatcgatccggccgatttttctatttcccgaagtgcccgcaggtagctctcgtgccgggcggtcagctctttctcgaccggaagcagccagccgtcccgctcgatcatcgggagctttttcgtcggatttcccataaactggttcattattataacaaaaatacgaaaaataattctatctttgtccgcgaaacaaaaaacagaaaaaattctaattcaatcgcgtatgtttaaaaatcaacccaaaggattgatcccggcagcattgagcaacatgggcgagcgtttcggatattatatcatgaacgcggtgcttgtgctgtttctatgttccaaattcggcctgtctgaagagaccagtgctttagtctattctttcttctacgccggtatctatgtgcttagcctcgtaggcggtatcattgccgacagaacgcagaactacaaaggaaccatcatttccggtcttattgtcatgactatcggttatgtcgtattggcattccccattttcgcgactcctgagaatcagacatggcttcttacgcttacttgcggtgcgctgttcctcatcgcattcggcaacggccttttcaagggcaaccttcaggccattgtcggacagttgtacgacaatcctcgctatgcttcgcagcgtgatgccggtttccagattttctatgtctttatcaatcttggtggcgttgtggctcccttcgtagctcctttgctccgcagctggtggctcagtgagaacggtttgatgtataatgccgagcttccggctctttgccatggatttttggcgggtgcggaagtaaaccttgccaatcttcaggagctgattacaaaggtgggtggctctgtggttgcaggtgatgccggctccgtatcggcattctgttcgaattatcttaatgtcttcaacaccggcatccactattcgtttatcgcctccgttgccgcaatgcttatttctctctcgatattccttttcaccaaaagacagcttccttctcccgcaaagaaagcaaaagaggaaaccgttacatattctgcagaggaaaaagctgcaatggctacggaaatcaagcagcgtatggcagccctcttcgctgtgctcggtattgctatcttcttttggttttcattccatcaaaacggaacttcactctcgctctttgcccgcgatttcgtaaagaccgactccgtacagccggaaatatggcaggctctcaacccgttctatgtcattatcctcactcctgttgtgatgtgggtatttgccgctcttgcacgccgtggaaaagcgatttccacacctcgcaagatcgctatcggtatgggtttggccggattggcattccttttcatgactgtattctcgatcatcaacggttatccttcggccgaggcgttcaaggatctcccggctgcagaggcggccgctctcaagacaggaccgtgggtgctcttcgtactctacttcttcctgactgtggcagagctgttcatttctcctctcggtctgtcgttcgtttctaaagttgctcccaagcatctccagggcctttgccaaggtctgtggctctgtgcaacggccgtaggcaatctgctgctctggattggtccgctcatctacaatgcttatcctatttgggtggcttggactgtattcttctcggtctgcatcatctcgatgggcgttatgctcggtatggtgaaatggctcgagcgggttaccgaataagacctgtatttcgattgatacggcggcgcttccgaaaagggggcgccgctttcattggctgccgggaagtaccgtatttttgtgattatatacttcggtgtccctttggggtgtgtcgtagcccaagtttcctccgagcgaatggatttagggcgacaagtattacaacacggtcacgggtcgtgaataaacgaccgtcgaataaggtatattggcggtatatgactgccgatgttttacggcgaggcgtgtccgtttccggcgggatcgaagcggtgctcttcttttgcatccgagcctgtgccggccgcagaattcaccgtcggggtgtctggagcgtaggcttttgtccgggggccgggcgctttccggattgcggattcgttaccccggcacataggaattgcgaccttgtccggggctttttacttctggcgaccgtaagagataaccggccggcggcttcttgacgggtgttcgggcattcggggcgtgcggcgcaggatccggttcatggggcggtttattcggcgatgaactttatccggggctggctcttcgatgccggctatcgttgaagaagatcggatggcatccctgacgggtgtttccggattacgggttcgacgctcggagagcggagagcaggcttttgtcctaaaaggaaataggaccgtatccttgagccgtccattgtaaatgaatcggagcggcaaattgatttgcgacttcggtacgcttgttcaatgttgcgaacgatgccttacggacactcttcctgaagtccggttatttcccgtaaaccgtagtcttcccccccccttgtccgggattttctaatggactcctgccattgttgcggggccatgcctttttctttggcgaaggcgcggtagaaagtcgccgtgctcccgaatccggataatagggccacttcttcgattttatggccggcctcctcgtcttcgagcagcggcaaggcggcatattgaatgcggcagtggttgatgtagtcgcggaacgacaagcccaattccttgttgagcagcagggagagttgcgtgcggttagtgccgcattcgcaggccaagtcgatgatcgtaagtccggggttgaggtatagtttgcgctgtacgatggcttcctgcaactgttcccgcagcgatgcggcgcgtccttttccttcggcgaggtttatttccggattttcttcgatgggttctccttccgggagcggttgccaataatcccggataatgtccgggatgcggtattgcaggatgcagccgtagaggataccccagacggtaagtgtcaggatatagatgagaatggtgaaccagatattgctgaaaaatagaatgatgatgatgtatgaaagcaggtagaaggccagcagtgccgacatccaccgcagccattgcaggtggatgcgctccgtgaacgagtaggcctgggcgatctcccgggagtaacggatggagtagaggacgatgcgagtcagggcgaagaggcagtaaccgacggtgtatagggtgtagagcagaattaccgtcggcaggaaggacggcaggtcctttagcaactccggcagggaagcatataccgtgcggggttcgaaagccgttccgagccagtaggcgccgccgagcagaacgaaggggctcagcagtttgaggctgtatcgtgccgtgatgcggccgggcatcaccagttcgaaaaagaagagcgacagcagagccggggtaaacaggtccggaaaggtgaagcccgggccgagaatttcgtagttgtaggcggcatcgtggctcaggaaaaactctttgagttcgatcaatgccatccatatcaggcagatcgtgaagagataatggggccgggatttgctctgtcgggcataaatcgccatgtggaaggcgcccatagcgaaaaatgacagggaagctccgttaaggaaatatgtgaggttttccaacattctgaatactaagatagtaaaaataagtactaaaaatgtctttttgcgctattatttcggctttcgccgggaaatcgccccgtgcgactcttccgtcctgcattttttcgatggatggaggtcggtgaaatttatggacggtagagtcgggtgggatacacggggcttgaaattccttgtttttcggggtaaaaaatccgggtgtccgggaatggtttttccggtttgacccgaatctgaaaaataattatacaaaattatccggattgaaggatgtttcgttctcaaattgtataaatcgaatcgcaaaacgtacatcggattttctggacgcctccgagcggaatgtgatgaatgtcgtatgtgcgccgggaacggcggcgatcgtcagcagttgccggcccgccttctgtttgcggtggaggaaactgtttcgcggggcgtgttccggttgtcttgcggtagcgttttcgggaggggcgagagggcggccggttccgggagattatcggatctgtaggaggagaggtataggattgtggcggtatggttttagaatttttccgacagataccgaattgttcgggtgtgcaccgccggagttccccggggtatcgtggatcgttttcgccgcccgtttcgaatgataccgacagtcgctccagcctatccgagcgtacggtaaaacgcgttgcttcccgttatctggagcgtgcgagaaaaagcggcgatttctcttttctgcggtgttttttttgtatttttgttcccgtcgccgggaaaaacagaaactccgacgttttttgcgatgggtatgaaacttacgattcttggctcgggaacttctcagggagtgccggtgatcggctgccggtgtgccgtctgcacctcgaaagatccccgcgataaccgtctgcggacttcggccatgctcgagtgggacgacatacggctggtgatcgacgccgggcccgatttccgttaccagatgctccggaccggggtccggcatatcgacgcgattctgctgacgcacgaacacaaagaccatatcggaggattggacgacgtgcgggccttcaatttcgtcgattatcccacgatccatcggatcgacgtattcggaacacggcagacgctcaaatgcgtccgcaaggacttcgactatgccttcagtgtggacaagtatcggggggtgcccgaaatcgagctgtgcgaaatagatcctgccgttcccttttgcgttaaggacaaggaggtgattcccgtgtcgggacaccattcgccccgattcgaggtgacagggttccggttcggcgaactggcctaccttacggatttcaagaccatcgccccggccgaagagcggaagctgtacggtgtcgaagtgctggtggtcaatgcgctccggccccagccccatgattcgcatttttcactggacgaagcattggcgctgatccgccgtgtggcgccccgccgggcgtatctgacgcatatgtcgcatgaaatgggtctttacgccgagcgttccgcgttgttgcccgaaggggtatatttggcttacgacggattggaaataaatgtaaacgattgataggatgaaaggtttgaaaggaaagaccgtcgtggtcaccggagcttcgtcggggatcggcgaggcattggcccgcgaatgtgcggtgcagggtgccaacgtggtgctcggcgcccggagcctgcaaaaattgcagctcatcgtcggagatatccgatccaaaggcggcgaagcgacctactgcgcggtggatgtgaccaagccggaggagtgccgcaatctgatcgacacggccgtcggggagtacggcgggttggatgtgctcatctgcaatgcgggcctttcgatgcgggcactgttcgatgacgtggatctggaggtgctgcaccgtctgatggacgttaatttctggggcacggtctattgtaccaaatacgcgttgccgtacttgcaggcttcgcacgggtcgctggtcggcatctcgtcggtggccggtttgcacggcctgccggggcgtacgggctattcggcttcgaaatatgcgatgacgggatttctggaaaccgtgcggatcgaaaacctgaagaaggggttgcacgtgatggtcgcctgcccggggttcacggcttcgaatgtccgcttttcggcgctcacggccgacggttcgagccagggcgagacaccgcgcgacgaggcgaagatgatgacgcccgaacaggtcgcccgtatcgttattcggggaatcgaaaagcgcaaacgcctttgcctgatggaggctgaggggcgtgccacacactttatcaagaaattcgcccctggcttcctcgaccgtatgttctatatggttatggcccgggaaccggattcgccgctgaaatgacggagcaaaatgaaaaaaacagaattgcagaaataacaacccttgtactgaccgggttgctactgctcgacataatcgtattttttgttggtatgatatgcgatggggcaggcggaaacgggctggtttacgtggtgtattgcgggattgtttctttggttttactggggttatatcttttatgttgcgctgggttttatttcttgtggaaggtgtctttctgcaataatcgcattatacgcttttgtttctgtatttttgcggcgttggcggtcggactgttgttgcttttgtgagatgcaccggatagcgaaacattaaatacgacaaaggggatgctcgaaaaagcatcccctttgtcgtattgtaaactcctcctacttgaagaaaatcgacgaaatctccttgtagttgtgtacgcgctcgatgacgttggcgaagatgtccgctacggtcatcaccttgaatttgctcaggtccttttccgggttgagcggtatggtgtccgtgacgatcacctcctgcaaggcactggcattgattttttcgtaagcctgccccgaaaggatcgggtgggtgatggctgcccggacgctcttggcacctttttccatcagcatatcggctgccatgcagatcgtgccggccgtatcgatcatatcgtccacgatgattacgttgcgacccttcacgtcgccgatggccgtcattttacccacgacattggctttcgcacgctccttgtgcgagatgatgatcggggcgctcaggtgcttggcataggtgttggcccgtttggcgccgcccatgtcgggtgccgcgatcgagaggtcctcgatgttcaggcttttgatgtacggtacgaagatgccgctggcatagagtgcatccaccggtacgtcgaagaagccctggatctggtccgcatgcaggtccatggtcataatgcggtccacgcctgccgcgacgagcatgttggctaccagtttcgcgccgatcggtacgcggggacggtctttgcggtcctgacgcgcccagccgaagtagggcatcacggcgatcaccttgtaggccgatgcgcggcgtgcggcatcgatcatcataaggagttccatcaggttgtccagcggcgggaaggtcgattggatgatgaacacggtgcagccgcggatcgactcgttgaagcagggctggaactctccgtcgctgaactgttgcacctccgagtttccgagcgtggtgccgtagcttgcgacgattttctccgcgaggtaccgcgagcccctgcctgcgaagaatttgattttgtggatagccatagtatgtgattgtgtttttgaatggtgcaaagataggatgtaaagaccgaattatcgggtatttctaaaatctttttttaacattctgttaaacatttgccgatgaagtccaggatctcttcgcggcccgtccgtttttcgctcgaggagcggaacatcggaggcaacccctcccactgttcaccgagcacttgtttgtagcgttcgacgctgcgtgcgagctgtgcggccgacagtttgtcggttttggtaaagacgatgccgaaagggatgccctcccggccgagcatttcgataaagcgcaggtcgatcttctggggctccagtcgggaatcgaccagcacgaacaggaagtgcatccgttcgcatcggagtacgtagtcggtgatgattttggcgaactcgtcgcgttgggttttcgatgtgcgggcgtaaccgtaaccgggcagatcgaccagataccaactgtcgttgatgcggaaatggttgataagccgcgtcttgcccggggtgccggaaactttggccaggccgctgcgacctgtgagcatattgaccagcgacgacttgccgacgttgctgcggccgatgaaggcgaactccgggagcgagtctttcggcagttgcgaaagacgctcggagctgcatacgaattgtgccttgttgatctgcatgacaagcggtagcaaaagaggtacggcgagggtgttcccgggttcgatccgatcgtttcgcaggcggcggcagcaatcgtctgtccggccaatttatctttctgcaaaaatagtggaaggcgaacggtaagccaaatctgtctgaacttgtccgggccacgcatccgattttttgcaaagataggaaaagttgagagaaaacgggaacttgttcccggttttccgaggtgcctcctatccaaggctatgtcaaagatagtaaaagacaaggacagaaccaaatttgttcaagtcccttttgcgcctccttgcagggcattatacgtaagcgtagctgccctccccctccgagcgtcgtttgagctatgccgaaccgtatcctatttttccagaaaagtgaagtgcggacggtaaaccaaacgtcgttgccgaagccgactttttcttgagagcagagttcacagatatcttctgtttcgtccttttgaccgtcggttgtccgaggctgttcggatcatattctcgttttgtaaaaagatacaaaaaaaggtgttcgtggttttcggtcgatgtttgtacgatcgaaaatgcgggcattccgctcttttgccaaaaggcacccggaaaaagaggttcgaaactcctgccgggacgtgtcttgtgaaaattaattcgtacctttatggctgttttagaattttgagtgttatgaagaaagagtggaacgacgtgcgtgaatttcacgaaaagttcggtcatccgtgtccggatgcaccccgtatgctggataaaaaacgctcgctcagccgggcgaaatggatgaacgaggaggttgctgaatttctggtcgccgaggatatctacgagcaggccgacgcgatgatcgacctgatgtacttcgcgctgggtacgatggtcgagatgggactcgagccggacgaactgttcgaaatcgttcagcaggctaacatggccaagttgtggcccgacggcaagccgcactacaatcccaaggacggcaaggtcatcaagcccgatacgtgggaggaccctgcaccgaaaatccgggcctgcatcgatgccgtgatcgcccgtaaggggaaataacctccgtttcgtatcgtgtaaatataccctttcgtgccggtaattcggtgcgaaagggtaattttgtttgtcgaaggggtgtttttccaaaaaataatcgtaacttcattcatcgaaaattaactttttgttgtcatgaaaagactttttggaatattgctatgggcgttgttttgtctgttcggcacacaactgtcattcggacagaacaaccgcgagcaggtgctcgcattgcagcggcaggctattgaattgatggataacggtgatcccgatcagggtatcgtgttgctccggcaggcactgacactcgatccggactattggcctttgacgtacgagatggcttacgcctatatggtcaaacgggattatcagaaagcgatcaaactcgccaaaacactttataagtacgaggattgcaacgatctggtttatcagttggtcggaaattgctacgattatctgaagaatccgaaaaaagccttgaaagtttatgcgcaggggctcaaacgctttcccgattcgggcgctctttatctggagcagggggtcgtttcgggaatgcaggggcattacgacgaagcggtcgcttctttcgaaaaaggcatcagcgtagctccgatgttcccgtcgaactattaccgggcggcccagttttatgcttattccaccagcaaggtctggagccagatttatggcgagataatgatgaacctgctacccagcggcgaccggaataaggagatgagcgagcttttgttccgtaactataaaactggcatcgttttttccaccgattccgtgtcggtcgatttttacgagaaccgtccgatcgccataacgatcgatatgcttctggccggggatgtgcgggagccttacggtgccgtgtacgaggcggcgatgcaggctgcggccgggggcgaacggtccgtcgatctggaatccctgaaccggatccggagccggtggatcgacgaaggcctgaagaagttggacgaaggggcgaatacggtgctgaagtatgacaatcaaatcgtcgttccttttttggaatatctgcgttcggtgcgggatgccggtcatctggaagcctacaactattgggtgctccgggaagggaataagactgcattcggcttgtgggtcaacgacaaccggcagaaattcaatgattttatgaagtggttcgaacacaacaggttgaaaatcgcggatgccccgattccgatatcgtacttataataaataggggctgcggtaatcgatataccaatatatggggattcggcggtgtgtccgaatttgcatatctttgcagaagataggatgcgcctcggaaaacagggaacaagttcccgttttctctcggcttttcactatctttgtaacataatccttgcattatgaaacagacggaacattctttcgataatacggagcgggggcgtctcctcttttcgccgggtatgaagctggccgacctggtcgagtccaactacgagttgctcgtggtgcttgcccgcatgggtattcccctcggcttcggcgaggcgagtgtcggcgaagtctgtcgccaacgcggaatttcggcagagctttttctgatgatttgccgaatttattcgtcggaggtcccggttctgccttatgagcaactgacttcggacgatttgggcggtgtcctcgattacctgcatacttcgcatctgtattatctggaggttactcttccgcatctggatgcgaagatggccgcgatgacagcgacttgcgacggagtacacagtaaaatcttgagtacgtttttcgccgattaccgccgggaagtggataatcatttcgattacgaggagcgaaccgtgtttccttacgtgcaggctctgctcgaaaaacgtcgggtggacggttacaatatcctctgtttcgaagataatcatagcgatatcgacgggaagctgtgcgatctgaagaatatcattatcaagtaccttcctgaaaattgttccgccaagctgcgctacgaagtgctctccgatattttccgcttcgaggaggacctcagccgacataccgtcatcgagaatcagatcttgattccgttggtcgaaaaattggagaaaaatggataacggtcgtatttataaagtgttgattatcgagccttccgcaatcgtgggggccggtattcggacattgttggacggtttttccgaattcagggccctcgatgccgagactaccggcgacccggcgacctgtttcgaacgggtggcgacgacgggacccgacctggtgctgatcaatcccgcgctgtttcccgtgatgcgccgcactccgatacgaaacgcctttccgatgttgcaggacgttccgattatcgctctctgtcacggagctgtggacgatgagctgctgcacgagttcgacggagtaatcaatctttacgactcaccgggacgggtgcatcacaaacttcggcaggctctcgagcagacgcgtacgacggcacagcctgaaggctatgagctttcggagcgcgagcgcgagatcctcgttgccgtcgcccggggcctgactaaccgggagatcgccgaccagtatttcatatcgatccatacggttatttcccaccgcaagaacatcactcgcaagacgggcatcaagaccatcgccggtctcacggtctatgctctgctgaataatatgatttccgaagccgacctgggtaattgatctttagccgatggcaccaggcgaatttttcaatttatttcctagctttgtagaaggtagaatgcacctggaaaactgtgagcaagctcccgttttcttttcggctttcgctatcttggagaggtaggatacgattcggcaatctctgcgtgcaagcccgcacgatttctcactgctcactatctttgacatagtcttaaataggatgcgattcggaaaactgggaacaagtttccgttttttctcggttttcactatttttgtttaatccgaatcgtagcgcgtttcctgatgggaagtcttgcggttgccgattattttatttgtttgttatgcggtatttaacggtggatggatacttcgatggaacgggcattcgggatgcggccaatggaggttacttggagcacgatgaagtcgggataagtccggatctttcgaaacggatcgatgtgtggctggagcaatattggaaggagttcataaagggattccccgatcgggataaagtggtcgaactggacgaggaaggaatccgtattgctcgtcgattaaaaaaagaatttcctgaagataaaatcggatatttctccgatgcccgaatggttgcattgtatgatgagaaagtacatggaggtttttgaaatggtaacgattgttggtcgaaaggtaaaagcgaaggtggatgataatctgtacggagtgaggtggaggacccgtatctaagtaaagagctgtgaaaaagtttgaaattacgatttctacatcataaccggatttgattttctttcgaaatgaaacgaaaaagattgatcttgacaattttgtcattggtagttatcctttctttgagcagtttggtgttgtggcgttatttgagtggcaagtatgtcgagacggcagaaagtattagggattactttatatggccgacttatcaacgactgccattagagtattataattcattcgggtattatcccagttcgatggatgaagccgtcgatttttatcagcaaacttattggcctaatatggcgaaaaaagatttaagagcccagcaatttctgacggatccgtttgccaaggacggaggtgagtttttgtatattcctctttattattataaaaaggttccggtatccttcattttgttaagcgccggtgtcgatggcaagatggataacgaaatagcaccgagcgataccctgtacctgaataactggtgggcaaagctcgacgtgtataattatgaagaggcaattctcttgcaggatttttgtgagagatgggacgaaacatcgaacgtattcggtgaggttgaatcccttgattattatcctccttatcccgatattcctcggttcagtatgacggattacctgtggggaaagaaagattggatcgtgcagttgggtccgcttacggggttgtattagaaccggcattaaaatagcaccggcttcct

SEQ ID NO: 10420 - DNA, 27031 bp, Unknown
  gut microbiota DNA sequence
gggggggggcagcgtgacatttacggtggcttttgaggacagggatgtaaccgccgaggccgtgattaagaatgtaacctctggctctgaagttcagaatgccacttggacgacgaatgtggcaggtacctatgagttccaggccgcatacgatggcatgttgtcgaacgtcgtttcggtgaaggtagaatctgactcggaatccgatgctttttaccgacatgtgttgttgacgaagttcacggcgacatggtgcgggccttgtgcgcaggcgcaacggtatttcgagcaattgaaaccggaagaatccgaacgtttcctggttgtcgccgcacaccaaggggaccgattgactgtcccggtagggagcgcactcggtgcgaagttggggtatcagtatgtgccgacttggaattatgattttagaacagtctttgaaagtgtaggtacgggaggtattacggcgacgtcgatccgtaaccagatcaagagtgctatggaggagtatccggccgtttgcggtgtgaaggccgagtcggaacttgacgggcagacagcaaagattcgggcgacggtaaggttccaacaggccggtaattataagatcgcctgtgtgcttaccgaaaatgatattcagaaaactaacaatgaaacgctacccgttttcaaccatgttctgcgggcggcacttacgaatatggaaggtgatccgatcgctcctgccgttgcggaagccggtgagcgcagtttcgatttcgaggtcaccctgaacaacggttgggattctcggaattgcgaatttgttatttacgtgttcaaggaagaggaggacgctgcctttattgtcaataacggggccgtatgtcccgtcggcgggaaagtcgattataaatatgagtccgtcgaatagttgcggttgtatatagagaaaacagaaaagccgggatattctcggcttttctgttgcggatgctctttcgcattccggatacatgtaaaaaatcctcgaccgtatggccgaggatataatcgctgctttagtgtaagcggtgttatttgaggtccttggctttgaggcgaacgatttttccatcccggacaacgaccaattcgccatcttcttttttgactttttcaatcaaacgctttcgggcaagcaaaattccggcgttgattttctcctgcatctgcttgatctcaatttcgctcataatctgcaatcgttttataggataacgtatcttcgatatgggttgttatgtcttttcctcccaatgcgatgattctgatctgctcgtcagccgaactgttgtcgtagatcgcccaatagttgcaaaggggaatataaagagcggtcaaattctttatcccattggcatagcggcgacgaatcacatccgaaggaatattgtggcctccctctcgcacacgggtcgcgacgcgttcgatagcctgttcgggggtcggcaaccaaaaatagagcagcgtcacgaagtaaccttttgcttgtgcccgttctatgaactttacataagaacgcgtggacaatgtcgtttcaaaagcaaaatccgacccttcggacagcaggtcgtccatccgttgaagcatcaatcgtcctgcttcgatcgccacgctttccgggttgaacggcgacaggcctttcgctatttcatccgcattgacgaactccttgcagccgagcatttcgggtagtacggtataggacgcagtcgtttttcctgcaccgttgcagcccgctatgatatatagttttggcatatcgtatggacaaagatagctaattttacgattacaggctgttttactgtgataaaataagacgaatcagccccaaaggtcaatttaggccttctgtcaaagtttgttcgttggtcgttctatgaattgtttcggatattgctcgttggagccatccggtgggaaacgaaactctttctgcttgtcctctaacgatgtatcgccgaatataactgtatcgcttttaatatgggcttcgaaaagattgaggtatggttcatctgtgaatccaggccatttttgtaggtcctgtcagcttttttgaatggctttgattttcatttacttgcgtgttgtgcaagcaatcgagggtagcagattcggggtacaacaatacagcacaaacagcttttcaaccccttttttcgctgtgcagaaacaaaaaagccagcagttacatttctgtaagtcgctggctttctgagccgaaaccgagatttgaactcgggaccccttcattacgagtgaagtgctctaccgctgagctatttcggcaatagggagttttgtgaaaccctttcgggatgcaaatatcggaaaattttttgaataaaatcaaatggtaaggactatttcttggaaaaagtgcgattttttctctcattcttgctatcttcgccccgaaaatttcgtatcgccatggtttcggaggtcgtacggaccggaatccgaatcctcgggaagataaaaaattacgaggagttaatccgctaataaacaaaaccgtcatgcaagataaggctacgctcaatcctactccggatcagacattcgagatcgttggtcagggggcgtatgattttgtacgggttctgacccattccaaacagttgcagcgccaggggcgggtcgaagaggcctgcaacgaacgctttcacgcctttcagcgcatttccgaattattgcccgaagacgaggaggtgattctcgaatgggaggatcccaatacgcgtgcggcgctcgaggtgattcacgcttcggcgatcgaccatttcctgatcaacgatttcgaaatgtctaccgccatgctcgaattgcttctcgaactggatcccgaagaccatctggaggcaattatcctgttggcgttcaattacctggcaatggaggagtacgaacttttcgacgaggtgagcaacgatatttccgataaatacgcctgcaaggaggtgctgaccatgtgggcggcttttcggcgcagcggccgtattcccgagggcgatgcgatccgtttcaggacccgattcgcaccctattttgccgaatttaccgccgacgaacatcctgccgacgggcagtacctggaggatatcgagagcgagcgcccttcggtgcaggcccaggctcgtgagctgtggctccgcactgaaaatctctggacgctttttcccgattttattgcggcgcttcgaaggtagcccctcccgattttctccggggcgaagttgccggcaagggcgtatgtgccgtctatcgtgcaagctgttatgagaggagggcgatttgtgaggggatttccccgattttacgaatccgaccggcgtagttcgtcactccttcgtccggtgtgagcgagtctccccgatcttcttgcaagagatcgaatcgaggctttccgtccgatcggaagccgatgaatatcggggtaattaaaatgtgtatttgtaaaatagaaacaccgggctttatagtccggtgttttatttcttatccgatcgtatcgaccagtttgtagagcttgtcgccccggcggatgagttggacggttttgaccgagcaggtcgttccctggagtactgtttgtacggggtgctcgtccacgaagatttcatccccgtgctgctcgaccactccggtcgtttcgcccatccagagcagttcgtccccttcgtgtagaggagccgcttcgacgagcacctcggccaccgagatttttttgaagaaattggtcaccttgcccacatagactttgcgtttggtggcggccgatccgtggtggcggctgtgctccacgatcgggcgtcctgcgtagtatccttcccagaatccgcgattgaataccgttgccagccgctctttcagtgcggcggccagttccggcgtgtagttgccgtcttccatggcccggagcgcccggtcgtaacattcgaccacgcgtttgacgtattccgcacctcgggcacgcccttcgatcttgaggacccgcacgcccgattcgatgaaatagtcgagaaagtcgatcgtgcagaggtctttgggcgagaggatgtagttgccctcgacgtcgagtgtttcgcccgtttcggggtccgtaaccaggtatttgcgacggcagatctgccggcaggctccccggttggccgaaaatccgtcgctggtgtggagcgacaggtagcatttgcccgatatggccatgcagagggcgccgtgggcgaacatttcgatccgcaccagctctccgccggggcccgtgatccgctgccgttcgatctcccggctgatgtaggcgacctgcaccaggtccagttcccgggccaggaccactacgtccgcccattgggcgaagaaccggacggcttcgatgttggagatgttgctttgcgtggagatatgtacgtccatgccgacgctgcgggcgtattggatggcagccatatcggtagcgatgatggcgtccacacccacctcgcaggcacggtcgatggtcgcatgcagggtttcgatctcttcgtcgtaaatcaccgtattgaccgtcagatagcttttcacgccgtgttcacgggcgatcgaaacgatctgccccatatcttccagggtgaagttggcggcggattgggcccgcatattgagccttcccactccgaaataaacggagttggctccggcgtcgatcgctgcatgcagggattcgtaacttcctgcaggagccatgatctctatgtcgctgcgtttcattgggccgaggatttatttgttgcgtccgatcaggctgccggcgtactcccgcaggcgggccgtgccttccgactgtacggataacgtatcgagagtgttcaacgcccgctcgaagcggtggttgatctgctgttcggtcagacgggcgacgcccagtttgtcgaaaacctctcgcacgcgcgcgatcttctgctgatcggaaagagtcggatcggaataggtcgaagcgaggattcgatgctcggcggccgacgccttgctgagggccatgaccatcaggtaggtctttttgccttcgaggatgtcgcctccgatcgccttgcccagccgttcgtcgccgtaactgtccagcaggtcatcctgcaactggaacgccagtcccagttcggtggcgaaacgatagaggcgttgacagtcttcttcgcccgccccgccgatgatcgctccgatgacggtcgcacccgacagcagggccgaagttttgagttcgatcatgtggagatactcctcgaccgaaaccgactcccgggcttcgaaatccatatcgtactgttggccttcgcagacttcgatggccatcgtattgaagcgggcgagaatctgcggcagcacctggggcgggtattcgctcaacaggcggtaggcgctgatgagcatcgcatcgcccgacaggatggcgacgttctgtccccatttggcgaagacggaagggttgccccggcgcatcgccgcgttgtccatgatgtcgtcgtgcagcaacgtgaaattatggaaaacctcgacggctgccgctgccggcatggccgcctggggctggtcggagaagattccgcaggtaagcatcagcaacatgggacgcaaccgtttcccgctcatcgtgagggaatagctgatcggtgcgtacaacctgccgggttcttcgggatatccgatttgtcccagataatgttcgatggcttccagaatttggtcgttgttttgcatgctgaaatccgatgggtaagaatcgttgaacttcgtcgtcattttctctgtccggcataattcgggcaagttcgttttgcctgtgcctggtggaaatactcccccaaaagtaggaaaaaaagtcgatagcgtgcaattattttctaactttgaccggattaacctgtaaaatttatcctttttatgaaaaaattggtcatcggcgtcgatatcggagggatcaatacggtcctcggtttggtcgatcgcacgggtgaagtctatgcgcgatcttcttttcgtacagcggagtacccttttttcgacgactatccggcttatgtcgaaatgctcgtacggacgctgcgggagctttgtgcggcgatgcctgccggggctgtactgtcgggtatcgggatcggtgctccgaatgccaactatcatacgggccggatcgagcgtccggtcaatctctggaagtttcgatccggagagccgaatccggaggaagggcggcggtttttctcgctttgcaaggaggtcggcaactcttttcccgggattcccgtccgtattaccaacgacgccaatgccgccgctctcggggagatcgcttacggcaatgccgggggaatgcgggatttcatcatggtaacgcttggaaccgggttgggatcgggattcgttgccggcggtcggatgatctacgggcacgatggcatggccggagagctggggcatgtcgtcgtcgaacccggaggacggcaatgcggctgcggacgccgtggctgtctggaaacctatgtttctgcgacgggtgccaaacggacggccttcgagttgatggcccgggaaacggtgccgagcgttttacgcgatgtaccttacgacaagttcgacgcccggataattaccgaagcggcgcaaaagggtgattcgctggcgctcgaggtttttcgctgtacggcggagaggctgggaagggcccttgcgaatgccgtagcgatcacctcgcccgaagccgtgttcttcttcggcggcctggcccaagccggggagctcctgttggaaccgacgcgccgttacctggaggagaatttgctgcccgtttaccggggcaacgtgaaggtgctgcccagcggcattccggcccaaaatgccgcgatcctcggcgcttccgctctgatctggaacgaatgattcttgcagggatcgttgcggattccaggtgtaaatatcgtcgcaaaccactctgtgacagaaagcgtccggccttgcaaggccggacgctttctgttgtctgggtcggacgaagccttatttatcgcatcggcagctcgatcgagccgatcaggaacccgtcgcaatagatctgtacctggtaggtaccggcggtgaagccgctgccggtgtagaagataccgatgttgaggtcttcgttctggtaatccacgtcacgcgatgcggagtaagagaggcgttcgccctcgaattcgaacgtcggaacgctttcgctcgacagcacgtatccgtcgggcgacaggatgcggacgtagatcgtcttttcgcccggagtcgccagggcgttggccgtgagggtgaaatccacgcgcagacgctcggcgttcttgatgcgcgacacctccttgctgcgggcgttgagcgctaccatgcggataccccgggcgttgataaccgatccctggcgtactttgttgttgagctcctgggccttctcttcggccatctcggcacgcatctgggccgtggtgatctccttgcggtaggatacgttttcgtcgatcagctttttgttgagcgtgttgagcgagtcgatctggtgaagataaccccgcatgatggtacgcagcgtgccgacctctttttcatattgcttgattttggccagactccacgaacgctcctgtttgagccgctgcatcagcgagtcggcccgctggcgttcgatgcccatctggagcgaaagggtgtcgttggatagttgcaggtcgtcgaaatcctgcatcaggtcgctcaggttgttctggatcgaatcgcggtcgatgaccaacaggtcgtaatcggcctgctgctggcgatggatgttgtaatagaggaccgtgatggcagccaggatcaccgccaggataatgatgacgatgcggtagccgaggatcgacttgttcgcgcccttgcggggatcgtcgttttcgtattcgggttggttgtaaccttgatagttctcttccatggtgcgaatattttatacaaataaaataaaagacggggcaatcgctgccggtttgtgtccgaaaatcgcagaacctcaccccatgttctgcaaatataatggatttttatttgattttactgctcaacggatatttcagtccgtgatatcccgaaatataggcctgaacgctgccgatgcggaccggcgattcgatgtagagaggaatgaggtttttgtcgtccgaaatccagaccgtgaactccgttccgtccgtaaacgagtacccttcggaggtgccgatctgacaggcgaacttcagggtgcggaacgtacccatactgcggattttcttggtttcacgccccagaaagcggtaccgcagatggcggatcgtatcttcgaggagcatttcgagcacctccgttttaccttcctggagcgttgccgggtcgatgctccgcaggtggaaatagagcgacacgggatccatgctgcgcggggtgagcgacatcgttttggttgtatcgcgcaccatgcggcgtccctgccaccgggtgtgtaccgtcatttcgggccagtcgtacacgtagttgctccagaaccggtagttgccttcgcggatatcgctttcgaaacggcgtgtcttcaactcctcgcgatcgaccagaatcgtatatttgtcgtccacgttcattacccagcggaaggcggggagcgttttgccgtgtgccacgatgcggtacatcggctctccttcatattcttcttcgacggtggtcacgcgtacgcttcccacttcggtattgggaaagaatttggccttgtagctggcccggtaatcgagtacttcgcccggctgatagagctgggcgccagcaggcagggctgccaggaaaaacaggacggtgaaaaaaatctgttttttcattgaaaagttgcaaaaaagtaatttactctgttttttacggctgttttatctgtttctgccgacgtgtttgcggatgaattgcggaaagttttcgattcgggctttacaatccgccggttcgggtcgtcgttccggggcggataaggtttgccttgtgcggaacttcttccggagtggttcaaataccctgccgtgcgaaaagctgcggaatcgttaaaaagcaggaaagcggtgtgtttcatcgtgccgaggtgaatgaatcaggatatttgggaaaaatcgatctcttcacggccggagtagcgcttgcggagttcccgaagcccctcgtggccgttttgggccagtgtcgggtcggccgtcagcacttcggcagccgcttcccgggtgacggtcaggatctggctgtcgagcgtcgggttggcgatcttcaggtcgaaggccatgccgctctggagcgtaccgttcacgtcgcccgcaccccgcagtttgaggtccagctccgccaggcggaatccgtcgttggtttcgcacatcgcttcgagccgcaggcgggcctccttcgagagcttctcgcccgacatgaggatgcagtaggattgctggctgccccgtccaacgcggccgcgcagctggtgaagctgcgagaggccgaatcgttcggccgactcgatcaccatgacggtggcgttgggtacatcgacgccgacctcgatgaccgaagtggcgaccatgatattcgcctcgccgctcttgaactgacgcatcgactcctccttgtcttcgggtttcatcttgccgtggcagatcgtcgtgacgtattccggcagcgggaagttgcgcgagatggcttcgtagccgtcctgcaaatctttgtaatccatcgtttcggactccttgataagcggatagacgacataaatctgtcttcccttcttgatctcctgccgcatgaaaccgaaaagccgcaggcgggcggcgtcagtgtagtgcaccgtgcggatcggctgacgtcccggcggcagctcgtcgatcacagaaacgtccaggtcgccgtagagggtcatcgccaacgtgcggggaatgggcgtggcggtcatcaccaggatatgaggcggttgctcgttcttggtccagagccgtgcccgctgttcgacgccgaagcgatgctgttcgtcgatcaccacgaatcccaggttcgaaaactgtacccggtcttcgatcagggcgtgcgtgccgatcagcaggtcgatcgagccgtcggcaattccggcgagggcttcgcgccgttcgcgtgctttggatgctccggtaaggatcgccacccgcacgtccattccttcgagcatcctccggaaggtggcgtagtgctggcgcgcaaggatttcggtcggagccatcatgcaggcctggaagccgttatcgacggccaacagcatggacatcaacgcgacgagggtcttgccgctgcccacgtcgccttgcagcaggcggttcatctggtagccggagatcgtgtcctgccggatctccttgaccacgcgcttctgcgccccggtcagcgggaacggcagcctggtgttgaagaaggtattgaatacgcctcccactttggggaagaggaatccgttgtttttcgacaggcgggccgtgcggcgcgattggatacccagttgaatgccgagtagctcttcgaacttcagccggtattgtgcctgccgcagcagttcgggcgattgcggaaaatggatgttgtagagcgcatcgcgcagcgacagcagaccgtactggatccgcattcggtcgggcagcgtttcgcggatatggtcccgcaccatcggccagaggttgcagacgatcgtgtagatgcctttggtgccgaggacgctcgaaagccgctcggtcgaggagtaaatgccttgcagaccgctttcggccttgcgggaaaaggctttctcgatggtttcgatttcgggatgtaccaccgacagttcgcccttgaagaaggatgggcggccgaaaatcaggtattcgcgccccacttcgatccgtttttcgatccatttgattccctggaaccagaccagttcggccacgccgctgccgtcgttcacgacggccgtgaaacgtcgtttgcgccccgctccggcatagctgacgcctgtgatgcgcccccggaactggatgagtgcggaatccccttccgcgatctggtcgatgcggtagatcctcgtacggtcgatgtagcggaacggatagtggcagagcatatcgcccagcgtgcggatgcccagctccttttccagcagccgggcccgcgcctcgcctacgcccgcgacgaatttgatgtcgttgtcgagatagttcgccatacgttgtttgcctgacaaagatagtgcaagccgagagcagcgccaaatttaatcgaacgtcgccgaagcgtcgtcttcagcagggacggtaaacccgaggccgtatcggatttattcgagaaccgcctgtctttgccggtgctgcttttcgcaaagatagcgaaagccgagagaaaacgggaacttgttcccgtttttccgaggtgcatcctatcttctacaaagataatgaaaagtaagtgttcggcgacccgaacagggcggaaaaggattcgtagcagagtatcgaacttttgtcgatcggatattttgcccgattttgtccgcagggacggatatttccgaagatttttcagtacctttcggcaaataaggaggagttatggaagattacatcctgcgggagatcgacaagatcggcaaactcatcgaagcccttttgcagaaggcgggcatcctgcggagaagcggggcgggagaggccgtttgcgaaaccgcccggacggagttggcggaggcgctcgatctggatatcgacactctgctggcccgggaggactttatcggcgtgctgacccgcgagtatggcttcagcgacgagaacctggaaaaattcgccgagctgctgttcgatttcgcggccgcttcgcccgatcgggacgcgacggtccggctcgcctgcggcattacggccatttaccgttatctggacgaaaagaaggctcccgtatccctgaaccgctactacatcctcaaggagttggagaatatgactgcccgatagcgcggcgccgccgaacggtcgccattccggtttgtgcaggataaaacgcgaatgtctgttttatcctgccttcattttcactacctttgtggtaataaattctggcaggacatgaatttgaccaagtatgagcgccgcccgagccgtgaagtccgcatcggacgggttgtgatcggaggtgaccgcccgatcgccgtgcagtcgatgaccaataccgacaccaaggataccgaagcctgtattcggcagatcgaacgcatcttccgggccggaggtcctatcgtccggctgacggcccaggggcgtcgggagggagagaatttggagcggatcgtccgccgtttgcgggaggagggatgcgatgccgccgtcgtggcggacatccatttcgtgcccgaagtggctgcgatcgctgcgaaatacgtggacaaggtgcgcatcaaccccggaaattataactcatcgcacggggagttcgaagccctcatcgaccgatgccgggagcgcggcgtggcgatccgcatcggcgtgaatcacggttcgctctcgaagcgcgttttcgacgagtggggcgatacccccgaagggatggtggcctcggcgatggagttcctgcgcgtctgccgcgaaaaggcgttcgatcaggtcgtggtgtcgatgaagtcgagcaatacgcgggtcatggtggccgcctaccggcttctggcggaagcgatggagcgggaggggatggattatccgctccacctgggcgtcaccgaagcgggaaacgggatcgaaggacgcatcaagagcgctgtcggtatcggagcgcttttggcggacggtatcggcgacacgatccgcgtttcgctgaccgaagcgcccgagaacgagatccccgtggcgcagcttttggtcgatcattttgcccgccgcagcggggtgttctccgtcaaatacccggagcgctatacgccgacgcgatattgtcggcggagcgatatacaaactcccttgattcactccgagttgcctgccgactggcgggtgatcgaagccctgaccgagaatcctacggccgagctgcgggccgcgatcctgagcctcgaccgggtggacgaacccgtcgcggtgtgccgccgttacgaggatccgacggtcgaagccgtcgccgtcaaagccgccgccgatctggggccgctctttctggacgggttggcggacggcattcggatcgacgcgccgcacctttcggaaaaggagatcgcggagatcgagctgatgatcctgcaggcggcccgcgtgcggatgtcccgcaccgaatacatcgcctgcccgagctgcggtcgtacgctttacgatatagagggaacgctcgcggcgatccgtgcccgaacctcgcaccttaaaaatttgaaaatcggcgtgatgggttgtatcgtaaacggacccggcgagatggccgacgccgattacggctacgtgggcgccgctccggggcgtatcaccctttacaaggggcgcacggtggtggagaagaacatccctcaggaggaggcgctcgatcggctcgtggcgctcatcaaggccaacggcgattgggccgatcctgaaaatcaaccggaacgaccatgacgattctgcctgcagcctatttggggtcggtcgaatatttcgcacacctgctgtgcgacgattgcgtcatcgacctcggggaacattttgtcaagcgttcggagcgcaatcgggcgcaaattctcgcttcgggcggcgtgatggacctcacggtgcacgtgcggcatgccaaccgtccccgtacgccgatgcgggatgtgcggctcgactattcgaagcggtggcagcaccagcattggatttcgttggtgtcggcttaccggggatcgccctatttcgatcactaccgctcctcgttcgagcctttctatcggcgggaatacgattttctggtcgattacgacctcgaactgacggaggtgctgcttcaaaaactgaatgtgcagaaccgcccccgtatttcggagcaatacgtcgaagccgctcccggcgacctcgatctgaggcccaaacaaaaagaggacccggcgtttcatgccgagtcctatttccaggtcttttccgaccggctgcctttcgcgcctaatttgtcagtcgcagacctgctgtttgctgagggtcccgacgcggcggagctactaaggcgcagtttccggtaaggaacgtttcgtcgtataaatccccggctttcgcttctatcttcatccggccgttgagccgtaccgagtcgcagcggtagatgcacggtgcgtattgctcgaccgcgagcgtgtcgcccgagagggttacgaccggctctccggccgaagaatagacggttacggtctgcaagtcgccgttacgctcatcctcccggcgtccggcgatgtggagcgtaggttcggtgttgttccacaaagccttgtaaagatggaaagcgtccttgcggcgtcgtcggtccagcgtgacgagccccgtagcctccacgccctgcggacggcgggccgagccgtagtcgaacagggtgttgatccaggttccccacagcagcgtgtcttgtgccaggtatttcgtgtaatcttcatgaaaacgggtctgccgtccttccggctgccagagcaggctgttcgagcggcgtcggcgagccggatcgccttgttgttcgatctgccccgcttcaccgtagcagatgcccgaacggagctggttccaccccgaccgaagctggccgagccagatttcgaggtcttccgtgcggcctttgtcccagccgatgttctgcgcccatacgatcaggtcggtgatctggttcagttctccgtcctggttgctggtggccgccgtcgggcggctgcggtccattttttttgccagttcgttcagtgtccgcacatagggcacggggttttcgccccgttgccagaggcagtcgaagagtccccagatgaccactgacggccggttgatatgctgggcgatgatttcgcgcagttgctggcgaccgttcgcctcgagttgcgggttcggataataggaaacgtcgctgaggaaaggtgcccggatcagcggcaagtcgatccagaccagtacgcctgtgcggtcgcagaggtcgtacagacagggggcgtgcggtcctgcgggcgagcgcagggcattggctcccaactcgcgtatgaaagcgaaatcttcggcatagtcctccgcctccatagcgctacccgtgcccggacggtcgtagtagagcgttacgccgtgaacccgaacgagcgagtcgttgaggcggaaaccctcttcgggtgtgacgcggatgttgcggaagcccgtggcgatttcgatctcatcgcgcgaggtgtcgctctcgacggatacccgcattcgatagaggttggggtgatcgaggtcccacagtcggggattttcgaccgtgaaggggatgacgacgggtttgccgtcgagtttggcctttatcgttttggctgcggcctgaattccgtccggatcgaacgcttcgagggtcacgcggcagaagttgtcgcctttcgagatgaggtggatttcggcctcggcttcggcccgttcggtcgatacggcccgagggtggatcaggactcccgacgagcccagatacagaggcgatacggcggtggggtcggtgacgatgagttctacctcccggctgatgccgccgtagatgttgtggatggacgagagcggcagcacgtcgcccgtaatggcgttgctcacggctacgcgaagcaggttttcgctgccgtatttcacccggtcggtgatttcgaagacgaaagcggtcgttccgccccggtgctcgccgacgtaagttccgtttacgaagaggtgggcgacgctctccacgccgtagaatttcaggaagagccgctttccggtccaggtctgcggtacgtagagtttgcgctgatagtcggcggtcgtgcgcaggtatgggatcgtcccggccagtgcatcgaggttccaggtgtgcggcagcgtgacacagcgggcgttgtcgctgctgttttcgtagcggaacgagaagagccagtcgtcgcagagcggatatacttcgcgggcctgcacactccaggcggcgatcagcagaaagatcagaagtaactttttcatttcgatatgtatttggccccgaaaggcattttccgtaaaaccgtattgttccggatcgctccgaaggaaccgggcggttccggagggttatcggaaacagtggcacaaagatacgaaacccggccgatattttaacctttccggacgaattaccgcatctcgttcccttttccgaggtcgatttataagcgctatctttaccgaacggccgaattatttcgtatttttgcggccggttgaaattgtcgatccatgagcgagaaatcgaaaggaaccctttgcggcatcgttgccgccgtgagttacgggatgaatcccctcggtgctttgtcactctaccgggcgggaataaacaccaattccgtgctgttttaccgctatgcgcttgccgccgtactgctggcagccctgttgttggtgcagaaaacttcgctgcgcattacgcgccgggagttctccgtgctgggattgctgggagtgatgttcgccgtatcgtcgctcacgttgttcatgagttttcactatatggatgcggggatcgcctccacccttcttttcgtctatccggtcatggtggccgtcatcatggcgattttcttcagggagcgaatttcgctggtcacggtcctctccatttccctggctctgtgcggaatcgcgttgctgtaccggggtgagggcggtgcggtactcaatactgcgggcgttgtgctggtcatggcttcgtcgctctcgtatgcgctctatatcgtggtggtcaaccgtgcttcgttgaatatgtcgtcggtgaagcttacgttttacgtgctgttgttcggcgtggctgcgatcgtgttgtattcgctgtgttgtcccgaccagcctttgcagcttctctcgacaccctcgatgtgggggggtgggcggcgatgctggctctgattcctacggtcgtttcgctggtgttgatgaccgttgccgtgcatgccatcggttctactccgaccgctgttatgggggctttggagccgctgacggcagtggtgatcggcgtgactatcttcggtgaattgttcactgcgcggcttgctgcgggtatcggcttgatcctgttggccgtcacccttatcgttgcgggcaaatccctgcatccggggcgcctggcggcgattatcgggcaccgggggtttttacgccacagccggtaggctccggtgtggaataattctacattttgtagattcacgccacaggatcggcctcgtctgttgcaggcgtattatattgtgtatgattcgcttatccggatagaacaggattggcgcggggtttgggtaaagtcctttaacccttttatggataaaaactacttatgaaatgaaaccgaatctgaaagagttgaatttggagaaactgaaaaaaatagcggccaaaacacctcgtattcgggtgaaactgactcgtaagcactggatcttcatcggctgtgccgtcgtggtgctggtcgttctgctcgtcgtgttgctgcgtccccggccgcaggccgccgcactgccggtggtggccgtcgaaccggtgcaggtcgaagatgtcagcatctatggcgagtacgtgggccgtatccgggcccagcaattcgtcgagatccgggcccgcgtcgaaggttatctggagaagatgctctttgccgagggaacctatatcaagaagggccagacgcttttcatcatcgacccgacggtctatcgcgcccgtgcgaacaaggccaaggcgcagttgaacaaagcccgggcccaggctctgaaggccgagcgcgacctgaaccgtattcgtccgctgtatgagcagaatgccgccagtcagctcgacctggataacgccatcgcctcctacgagagcgctgtggcggacgtggtggtgagcgaagccgaccttacgcaggctgaaatgatactcggctacacgaccgtgcagtcgcccatttcgggttacatttccgagcggaacgccgatatcggtacgctcgtcggtcctggcggcaagtcgctgctggccaccgtggtaaagagcgatacggtgcgggtcgatttcagtatgaccgcgctggattacctgcgtagcaaggcccgtaacgtcaatctgggccataaggattcgacccgcaagtgggacccctatattacggtcacgttggccgacggggcgcagtatccctatcggggactggtcgatttcgccgatccgcaggtcgatccccagacgggtaccttctccgtgcgggccgagatgcccaatcccgaccatatcctgctccccggacagttcactaaggtcaaactgctgctcgacgtgctcgaacgggcggtcgtggttcccaagaaggccctgattatcgagaagggcggcgcctatgtcttcgtcgtgcgccgggacagcatcgtggagaagcgtttcgtggaaacgggtccggaaacgggcaataacttcatcgtcgaacgaggacttgcctcgtatgaaaatatcgtcgtcgaaggctatcacaagctgacgcacggcatgaaggtcgaacccgtggctcctcgtgaagaggaggcgaatccagaggaggagtagcccatgaaagccgactttttcatcgaccggccggtcttttccacggtactttccatcatcatcgtcatcgtcggcgccatcggcctcgcgctgctgcccgtcgatcagtatccgcagatcgtaccgcctgtggtgcgtgtttcggcgtcctatcccggtgccgacgcgcagaccgtgacacaggccgttgctacccccatcgagcaggagctgaacggtacgcccggcatgatctatatggagtcgtcgagctccaactcgggcggtttctccgcgaccgtcaccttcgatatttcggtcgatcccgatctggcggccgtggatgtccagaaccgcctgaagaaggccgaggcacgcctgccggccgaggtggtgcagaacggtatttcggtcgagaaacaggccgccagcaaactgatgaccatcacgctgctctcgtccgaccccaagttcgacgaaatatatttgagtaattacgccacgctcaacgtgctggacctgctgcgccgtattcccggcgtgggcagtatttcgaacgtcggcagccgctactacgccatgcagatctgggtgcagcccgacaagctggccgacctggggctgacggtcaaggatctgcaatccgcgttgaaggatcagaaccgcgagtcggcggccggcgtgctggggcaggctccgatgacgggcctcgacgtgacgatccccattacggcgcagggacgtttgtcgtcggtcagccagttcgaagatatcgtcatccgggccaatcccgacggttcgatcatccgcctgaaagacgtggcgcgcatttcgctcgaagcgtcgtcctacaataccgaaagcggtatcaacggcggtaatgccgccgtgctggagatcaagatgcttccgggagccaatgcaatggaggtggccgaggcggtgaaggcccagatggaggagatcagccgcaattttccggagggtatctcttacgagattcctttcgatatgactacctacatttccgaatcgatccatcacgtctatcagacgcttttcgaagcgttgctgctggtgattctggtggtattcctttcgttgcagagctggcgggcgacgctcattccgatcgtggccgtgccgatctcgctcatcggtaccttcggcgtgatgctcgtgttcggcttctcgctcaatatgctgaccctgctgggtctgattcttgccatcggtatcgtggtcgatgacgcgatcgtcgtggtcgaaaacgtcgatcgcatcatgaacgaggaggggctttcgccctacgaagcgaccaagaaggcaatgcggagcctgagcggagcgttgatcgccatgtcgctggtgctgtgcgccgtgttcgtcccggtgagcttcctttcgggcattacggggcagctctatcgccagtttaccattacgatcgccgtatcggtaatcatctctacggtcgtggcgctgacgctcagccccgtgatgtgcgcctacctgttgaagcccgacagaggcggccggaagaaacggtttttccggtatatcaatttcggtcttgcgaaaggcaataagctctacggccgtatgatcggccgggcgctcgcccattcgcgccgtatgttcgccgccttcggcgtggtactcatcggtatctggttgatgaataaactcgtgcccgagagtttcatgccgcaggaggatcaggggtatttcaccgtcgaactggaacttccggaaggggcgaccatcgagcgtacgcgtacggtgaccgaccgggcgatggcctttctgatgcaggatcccgatgtggagtatgtactcaacgtgacgggttcgagtcctcgtgtgggcagcaaccaggcccgcagccaactgacagtgatcctcaagtcctggaaggagcgggaatcggaggatatcagcgaagtgatgaaacgtgtgcgcgacgagttgtcgcgttatcccgaaagcaaggtctatctttcgacgcctgccgtcattcccggtctgggaacctcgggcggtttcgaaatggtgctcgaagctcgcggggatgccggctatgccgatctgcagcgggcggtggatacgttgatgcactatgccgagcagcggcccgagtttacggggctggcctcttcgatgcaagccgatattccgcagctttatttcgacgtggaccgcgacaaagcgcagttggtcggggtttcgatgtccgacatcttctctacgatgaaagcgttcacgggttcgatctacgtcaatgacttcaatatgttcaaccgtatataccgtgtatatattcaggccgacgcgccttatcgggcttaccgcgacaacctgaacctcttcttcgtacggggtgccgacggggcgatgattcccgtcacgtcgctcggtacaacgcactatacgacgggtgccggtacgatcaagcgtttcaatatgttcaacgctgcgaccatcacgggcgaagcggctcacggatacagttcgggacaggcgatggacgagctggaaaatatcgtgcgtgagaaattgcctgcgtcggtgggcgtcgagtggagcggcctttcttaccaggagaagcatgtgagtggacagacgggtcttgtgctggcgctggctttcctgttcgtcttcctcttcctcgccgcccagtacgagagctggtcggtgcccgtcgcggtcattctctcgctgcccgtagccggaatcggtgcctatctgggtatctgggtttgcggtttggaaaacaacatctattttcagatcggcctggtgatgctcgtaggtctggtggccaagaatgccattttgatcgtagagtttgccaaggaggaggtggaaaaaggccgcgacgtggtgtcggcggcactcaaggccgcacacctgcgtttccgcccgatcgtgatgacctcgctggcgttcatcctcggcctgctgccgctggtgttcgcatcgggtccggggtcggcgagccgtcagggtatcggtacgggcgtctttttcggtatgctggtagctatctctgtcggcatcgtcttcgtgcccttcttcttcgtgtggatttaccggattaaagcaaaactgaagaaacgatgaaacgagttgcgatatttgtcattttggctgcactgaccgtcggattctcttcctgttcggctgtgcggcactgtcaggcccccgaggtggagatgcccgggcagatcgcttcgggctataccgattcgctgaccatcgccgatctgagctggtggcagttttacggggattcgacgttgcgccgggtcatcgagctgaccttggaaaataacaaggatatgcttgcggcggcggctcgtgtggagcagatgcggcagttgtatcggataagcaaggccgagcgtttgccgaatttttcggccaaagggctggctgattacgaaacgaacgattatgccgacgaggagtcgagccgtgatccggagttcagtgccaagctctccgtcagttgggagctggacctttggggaaacctgcgctgggccaagcgcaagggcggggcggagtatctctcttcggtcgaggattggcgtgcgatgcgtatgactctcgtcgcggaagttgcgacggcctattttcagttgatggctttggataacgagctttccatcgtgcgtcgtacgctccgaacgcgcagcgagggtgtgcagcaggcgcagttgcggttcgagggcggtcttacctccgaaaccgtttaccagcaggccaaagtggaatacgcttcgacggcgaccctgattccggatctggagagcaggatcgaaattatggaaaacagtattgcattgcttatgggaaaatctcctgactgggaggtgttgcgcggtcaaatgaatatcgaagccgagtttccggacagtctgcctgtcggtctgccttcgggactgttgcagcggcgtcccgacgtacgggcttccgaacaacagttgcgttcggcgatggcttcggcggggatggcctatgcagatcgttttccccggctgaccttcaatctggtaggcggttgggagaacgatgcgttgcagggtttctttcgctccccgttctcgtatgtggccgctgcgatcgccgctccggtcttcggcttcggacgcaagcaggccaaatatcgtgcggcattggcggcatacgacgtagcccggctggggtacgagaagaaggtgctggaggttttcaaggaagccaacgatgcggtagtcacttaccgtaacgtccgcaaaacggccgcgttgaaggtcgctctgcgcgatgctgcccgcaaatacgtcgaactggccaatttgcagtaccggggcggcagtatcaattatatcgacgtgctggatgcccagcgccggtatttcgatgcccagatcggtttgagcaacgccgtacgggacgaacacctcgctttggtgcagctctataaggcgttaggcggcggctggggagtggtggcggaatagctttctgttgtcagatagtcggatttagcattaaaaaccggttctgaagggttgtatgacagtttttttgatttttgtctcgtaaatttccgggcaaaaattttgaggaataaaaaaaaccgtttatatttgcactccgaaataccactaatgcggaaatagctcagttggtagagcacaaccttgccaaggttggggtcgcgagttcgagtctcgttttccgctctgaaacgcagaggacaatcgaaaggttgtcctctgcgtttttcagtgtattgaggtccggatgaatgatcctgtatctcgtctttcgaggggcgggagtatcaataaaagtttgcgaaattacctgtcgaagcgctggttcgaattctgtttccttcttcatgaaaagatggtttattattcgggagaagagttgatgctcctgcgtgattccaaatatattatcagacgggatacggataagttcagagaatttttgaggaaatggagagtccgttgttcctgtttgacaaggcaatggaaagatttttggcaataaaagaaaaactcctgcttgtcaccgacaggcaggatataattggatccggggaaatattttgagggaccgaagccaaaagccttttattttccggcagataacggcgtctgtttcactctctttcgggaattatcgctctaaaaccgactgttggctctggccgaccagtttcccgtttcgatattcagtcggagaaatcccgacgtactgtttgaaatatttgccgaagaaggattgggtcgaaaaattcagttcggaagctatttccttgatacttaagtccgaggaacggagcatctgtttggcgtcggcaatgaccatgcgaatgatccactgcagggccgaaatgcccgatttctctttgatgattgccgaaaaatagcggggtgtcagatattgttcctgggcgtagtaggttacctcccgttccatgcggtgattctggtaaagagagattatgaagttctggaacacatggtctttccggtccttgtgctggggctgttggggttggcgtgcgaaatagatgctcagaatttcataatagagtacttcgcccattgccgttaccaactcgtgattgatgatcttttgttgcgtatttgtcaccgaggtgtttattgccgcaatccgcttccgcaatgcgtcgatcaattggtcaatgtgtacgtattgttctttcgtcagagacaggcaggggttttcgtagatgaaaaaattccaggtcggatggaatgtctttttcgcattggtcaggacgtaatctatatcgactgtgagtacgacgcccttcagatccttgctcctatgttttatctgaatggacataagaagaggagagatgtatatgtctccctggcggatgtgatatgtcttgtcttcctgaatgatgtcgagttccccgccttggcagaggaaaaggctgcatttatccgttcgggagaaggtataaccttcttcctgcatggtggatgtgagaggtggaacagtagaaaattctactggagtcgtcatagaatacggttttttgtaatttggtcgcaaaataggaaaaaaggatataaagcacaaataatatacaatattccgtttgataatcgtacaaataggataatgaataaacagaattaacctgccggatttcccttgcgaaggcaataccgttgccgggatttcatgattggaaatcggaactgtttcgtcggatgtttgtaccgatggtttttcgttttccctactcgttgtcgggtggggagaaaggatgaccggacgcaactttcgtagagaaactgcgtccggtcgtcggaaggagatgctacgggaggaggtttttcaaaaagcgacggatggccgcccatactcctgttttgcggaacactacggtcaggagtattccgagtgcgatgccggtaaagagcgtgcgaaacagattgccggaagattttttccgggtcgtcgaggcgtgtgtttcacgcaggagggtcgtatcgcgggcgaaggaggaaaggtttcgcagaccggtatggcttgcgaggctgtccgattgccgctgccgccggaaagtctggtttgtcagcagccatgtacgccgttccgctcggtcgcttataccggtgacgatgagcgaatcgtcctgtttttcggctcggatcgcggcccgtccgctgcgggcggtgtaggccgcacccgggggaagacgttcgaggtctttaagcgggatcgccagccgggtccggtccgtcggcagggattcggtcgcgatcagcagggtccgtgatgtcgagtcggactcctgttgctgttgccgtagttgtcgtacgaggctgtcgcgttgcgatttttcgacgcttcgttccgaatgtattcgggtctgtatgtccgaggtctgcgtcgtggtgcgggtcgtcgcacatccggctgccgtcaggagcagcagcggcagcagcacgggccgtttttttcgtcggggaggtttcatcggtttttttctgggttttgcggttgaagtttttgcggagcccttcgacttcgcgggtcagtttgtcgattttgcggagcagttcctgttgggcgaccagccagtcggctttttcccggcgcagggtgacgttctcctgcagtacgtcgttgtacttttcgcacaacaggtcgatcgagcgctgcatgtcggccagcatgtcgttgcggcgcttgcggcggctgaccagccaggtgacggttccggccagaaagccgctcggcagggcataggtcagtaggtcggtgataagtgtcgggttcatttcggtagttcgtgtcgaaggaggttagagaatgccggtttcccgaagccatgcctgcacgtcgaacgatgggcaggctttggctgccagttcgttatgccctacgacggctgcgccgggaaatcgggcgacgaaatcccggacgtagtgttcgagggcgctcttttgctgcggagtgcgggtatcgcagggggtcgtgccgtcggcggcgactcctccggcgtatgcgatgtggcggctggtggcgttgtagccgcaggcgccgttggtgatctcccagggatcgaccgtgcggtcttcgttgttgggaacgagccgttcgacgctgccgtccaggtggatgaggtcggtataacccacctgacgccagcctcggccgccctgggaaacgggggctgtgtgccacctgcggatatcggcggcactcacttcgcggccgggcggcgtggccgtgcagtggatgacgagtctttcgagttttgccataataaaaaagtgtgaaaggggttggaatcggggcgatgaccggattcggacgggagtggataaggttccgcccgaggagacgggagaaggtagcccgtttcggattgggtcggcgaagcgcaggacttcggggcggggtgacggtttccgcttttttcggaaaagcggggagaggccgatgggtgtttgcaaagataacgggagacgccccggaatacaaatcggagggacatcctgcggcttttcggcggcatgatgtcggtttattccgttgcgatgcggcggatttccggtttttcggattatctttgaaacggttcgacggctcgggatatgaaatttccgaaatgcacgtttgttgttcgatatgaaacgtaaaataaacacatagcgaaaaagtaaatttgggca

SEQ ID NO: 10421 - DNA, 66972 bp, Unknown
  gut microbiota DNA sequence
acagagccgatgatataaaaaacgatgagtatgatcggaaaaataagggaaagtctgctggttaactcaaattgaaggaattaaatgactatccctaaattaattaatttatgaactcggggccgaacgatcaaaaccgcccctcattcggatgaataaaagtggttctatttttaacagcaatcatatagtaatgtaccattatccgacggtcacctattcgcaactcgtggctgcgtctgtaattctgcctccacgtatccctcctcggaggggactcggggcgctacgcccccaaagaagtacataaagtatataatcacttttataataatatctcgaaaagccgcttccgacatccgttcaaggaccgtatccgttttggaagcaggtagtagactccgttttatcgggccgtattcgacggcccgcatattcaaccgcacaagcacttctccgtttatttcattcgtcaatactataaattccctgacgcttcctctctcccggcagaaaacggcacgccgcgacacctctatttcaagtcttttcttaaaattattgtaaagataaacaaaaaaatgaaaccaacggctatattctaacaattttttgacataaagaacaaaagacagatcgaagacattctgatcgtgctgccgggaattcatcgggaatctgtataaaaaacgcttcggcccggcaaaatattgccaggccgaagacgaatcggaacattatcgaccgttacagctccttgcgcaaccgccgcagagtgacagcgtgtgcaatcaaatcgacaccggccagcagcagggacaatcccacccagaacacgactacaccgacaccgataatcggattgaacagaacgagaaacgcggaaataatcacgagaatacccagcgtcatcgtccagccggcgcccttgatacccacacccatcatctcgctggcgacgccgacggccatgaatccccggaagaggagccaaaagccgagcacgaacggcaggatcgtgaagagcatcgacggggtgcacagcagcaggatacccagcaggatttcgattacaccgcctgcgatgtaccatcccatgcccgacccggtgggagccttcgtacccaaatacagttcgaaagcgcccgagagaatcacgacgatcccgaacagcacggaaagcgcgagataagtgccgcccggctcgaaaaagacgacgatgcccacgatgaagaaaataataccgagcaacatggagagctgccaattgtcgatggagtgtcggaatcgaccgacatcataaattttatctgccataataatacgaatttaagtttctacctggtatccgcaagaaacctgccaaacccggaatcgcctttcgaccgcatggattcggagagatggagcgctcttcccattttttgaatttttctcttccgattcttaattgttatttctacctttgccgccgtcaatacgactaacttttcaaaccaagaaaatggaaacaatcacaaacagcgaggaactgcgccgggcactcggcagccgggaccggtccggcatcggattcgtcccgaccatgggtgcgctccacgcaggacaccgttcgctggttgaacgcgcacgccgggagtgtgcgaccgtcgtggtgagcgtattcgtcaatccgacacaattcaacgacaaaaccgacctgaaaaattacccccggaccccggaagccgacctgcgcctgctcgaagaggtcggtgcggactatgttttcatgccttcggtcgaggaggtatatcccgaacccgacacccgcacgttcgacttcggcatgatcgacaaagtgatggagggtgcgacccgacccggccacttcaacggcgtggcacaggtcgtgagtcggcttttcgatctggtgaaacctgccaaagcctatttcggcgagaaggacttccagcagatcgcggtaatccgcgaaatggtacgccaactgcgcattccggtcgagatcatcccctgcccgatcgtgcgcggagaggacgggctggcgctttcgtcgcgcaacaccctgctcgatacggatcaccggacggcggccccttatatatataaggtattgaaggctgcggtcgaaaaatcccatcagacgacacccgaccagctcgcagcctgggttacggcacaggtagagagcaatccgctgctgaaagtaatctactttcaggtcgtagatgcggcgaccatgcagcaggtccgcacctgggaagagagcccggctatacagggctgcatcgccgtacaggccggagatattcgtttaatcgataacatcaaattgcgatgaaattccagatcgaagttctcaaatccaaaatacaccgcgtttcggtcacacaggccgacctgaactacgtgggcagcatcaccatcgacgaggagttgatggatgcggccaacatgatcgaaggcgaaaaagtacaggtactggacgtcgataacggcgaacgcctcgaaacctatattatcaaaggagagcggggcagcggtgcgatctgtctgaacggccctgccgcacgcaaggtgcaggtgggcgacgtcgtaatcatcgcctcctacgccctgctggatttcgaagaagccaaagccttcaagccctgggtgatattcccggatacgaaaaccaacaagctgatccggtagaaaactccggcaaacgatcgaaaatcctgccccgcaacggcaggattttttcatacgcggtacgaaccgtcaaaaatgcccctaaatatttggtgacgcagtcgataacccatatatttgcataaaagttcccgaaaagcgaggacatacgccaaacaagttcggcacagcctgacggagaaccgaaaaaaacgatgcaacctattttgccggccgcatttttatggacatagcgctttcgatcgcagcattcctgttttcgatcacaggcatcgtcggatgtatcgttccgatcatcccgggcgtagcgttgagctacgtgggattactctgcgcctccttttgcagctattccgaaatatcgtccgcgacactttggatctggctggccgtgacagtggccgtttcggtcatcgactacttcctgcccggctatttcgcacgtctggtgggcggtacgcgggcagggtcgatcggggcgaccgtcggcatgatcgccggatttttcgcgggcggattggtcggcgtcatcctcggccctttcttcggcgcggtcatcggcgagctaatccacgaccgcagcgactcggccaaggcgttccgttcgggcttcggctctttcctcgccttcatcgcaggtacgggattgaagctcgtagccgccatctggatgatctgcctcgtctggtcggacacctaccctgtcgtaaaaaactggatcgtaacaacattctaaaatataaaccgtatgaaaaaatttctgttattaatcgcggcaacggccttcgcgctgcttaccacggcctgtaccgattcatccgggtacacgtacgaaacggtcaagaacgacccgctcaagacccgtatctacacgctggataacggactgaaagtctatatgagcgtcaataaggcagaaccgcgcatcgaaacctacatcgccgtgaaagtcggcggcaagaacgacccgagcgaaacgaccggtctggcccactatttcgaacatctgatgttcaagggcacccaacagttcggcacgagcaactacgaagccgagaagcccctgctcgaccagatcgaacagctcttcgaggtttaccgcaagacgaccgacgatgcggagcgtgcggcaatctaccgtcagatcgacagcatcagctacgaagcttcgaaatacgccatccccaacgagtacgacaaactgatgtcggcgatcggtgctctggaaaccaacgccaacacctcgatggaccggacggtctatatcgaaaacattccttcgaaccagatcgagaactgggccaggatccaggccgaccgcttcaagaacgtcgtgatccgcggattccacaccgagctcgaaacgatctacgaggagaaaaacatgtccctgacggacgacaaccgtaaggtttacaccacgatcggcgaagtgctctatccgaaccacccctacggcaaacaatccgtactcggcacgcaggaacacctgaaaaacccgtcgattaccaacgtaaagaactatcacacgcaatattacgtgcccaataacatggccatcctgctttcgggcgacttcgatcccgaccagatgatcgccacgatcgacaaatatttcggcgatatgcagccgaacgagaatatcccgcagctcgccttcgaacccgaagccccgatcaccaaacccatcgtcaaggaggtttacggtcccgacgccgcgaacgtaacgctggcatggcgcacggacaacgccgcatcggacgatgcggaatacctgctgttggccagccggatcctctacaacggacaggccggcatgatcgacctcgacctgatgcagcaacagaaagtactcgacgccttctcgtacccggatcagcgggccgactacggagccctcgtgctgcaaggtcttccgaaagcgggtcagaccctcgacgaggtccgggatctgttgctcgcagaggtagcgaaactccgcaacggcgaattcagcgaagagctgatcaaggcggtcgtaaacaacctgaaagtatcgaccatgcgcgaggaagagacgaacgtgggacgtgtcgaaatgtacctttcgtccttctacaacgacattccctggagcgacgaagtgaccaagctcgaccgcatcggctccatcaccaaggaacaactggtggcctgggccaatgaaaaactcggcaccgagaattacggcattatctacaaacgccagggagaggaccccagcgtgcagaagatcgccaaaccggccctcaccccgatccagatgaaccgcgacacccagagtgcattcctgaccgaaattcaaaattcgacggtaactccgatcgaacccgtattcgtggatttcaaccgcgatatggagattttcaaaaccgattccagcctcgaagtcctctataagaaaaatgacatcaacgaccttttctcgctgacctacctcttcgataccggcgtgctgaacgatccggcgctcaacaatgccttcgcttatatcgactacctcggcacccaggccaagacagctgcggagatcgcatccgaactctacgacatcgcctgctactacgacctgtcggccagtcagaaccgctgtgcgataaccttcaagggattgagcgaaaacatgggacaggtcatggatatcttcgaagacctggtagccaatgcacagggcgacgaagagattctcgccaactacaaggccgacctgctgaaaaaacgtgcagacaacaaactgaaccaggaagcgaatttcgcagccttgcagcgtttcgccttcttcggcggagaagctatccagcgcacgaccctcaacaacgagcagctcgaagcgctcacgtcggacgtactgatcggcaaggtccgcgacctgctgaaaaagcagcacaccatcctctattacggtcctaaggacaaagccgggctgctcgccgacctgaaagcacaccaccaaacgccggaagtgctcgaaccgctgactcggggaaatatcgcgttccagcctacggaacagaacaaggtctgcctggccaactacaacgcgccgcagctctacttcctccagtactcgaacctgggcaaaaaattcgacgtagcggtcgatcccgctctgaaactgtacaacgaatacaacagcggcagcatgggagccatcgtcttccaggagatgcgcgaatcccgcagcctggcttacatggccttcacggagtggatcaatccgagctacctggacgacaattatcttttcgcagcgatcatcgccacgcaaaacgacaaaatggcccaggccatcgacgcattcgatgagatcatcaacaacatgcccgaatcggaagcagccttcaaactggccaaagaagccgtactgaccaatctgcggacctcgcgtacgatcaaggacgaagtgctctggaaatacatcgccaacaaagatctgggcgtaacggaagaccgcaacaaagccatcttcgaaaaggtccaggacatgaccttcgccgacctcaaagccgcccaggaacagtggatcaaggaccgcaaatacacctattgcatcctcggcgacctgaaagacctcgaccaggattacctgcgcaagctgggcacggtacagatcgtgagccaaaaggagatgttcggctattaattccaccgacccgatcattcaaaacgtcttcggatttttccgaagacgttttttatcctcctttccccggaggcaaagcaagcggtacgtcctgtttcggatgcaccttactcgaccaatcgcccgcagcccgaaacaataaacccggcgtcagataaactgacgccgggtttattttcgggcaccgaacggaacccgatctatttttaataccgataatgctcggccttgtaaggaccctcgaccggtacgccgatatagtcggcctgttttttcgtaagctgcgtaagctccacaccgaggttatccagatgcagccgggcaacctcctcgtccagatgtttaggaagacgatacactcccacctccagtttcttctgccacaactcgatctgcgccagacactggttagtgaacgaattgctcatcacgaacgaaggatgtcccgtagcgcaccccagattcaccaggcgaccttcggccaggataaagatcgaatggccgtcgaggaaggtgaacttatccacctgcggtttgatgttggtacgcacggcatccgaagcctcaagacgggccatctggatttcgttatcgaaatggccgatgttgcagacgatggcctgatcgcgcatccgctgcatgtgctcgagcgtgatgatgtcgcagtttcccgtgcaggtcacataaatattaccctcggccagagcactctcgacggtcttcacctcgaaaccctccatcgcggcctgcaaagcgcagatcgggtcgatctccgtaacgatgacccgggctccgtacgaacgcatcgaacgggcgcagcccttgccgacatcgccgtaaccgcaaacgaccaccaccttgccggcaatcatcacgtcggtcgcccgcttgataccgtccgccagcgactcgcggcaaccgtacaggttgtcgaatttcgacttggtgcaggagtcgttcacgttgatcgcaggaacgagcagttcgcccgcctcctgcatctgataaaggcgatgcacgccggtcgtcgtttcttcgctcacaccccgccactcggctaccgttcggtgccatttgccgttatcttcggccagaatcttcttcagcgtatcgagaatgacctcctcctcgtaagacgacggttcgtaatccagcgtcgaagcgtcgttttcggccttgtatcctttgtggatcagcaacgtggcatcgccgccgtcatcgacgatcaactgagggcccttcccgccggggaacgacatggccatcgccgtacaccaccagtactcgggcagcgtttcgcccttccacgcaaagacgggaacccccgcttcggcgatggccgccgccgcatggtcctgcgtcgaaaaaatattgcacgagcaccaacgcacgtcggcgcccaactcgaccagcgtttcgatcaacacggcggtctgaatcgtcatatgcagcgaccccatgatacgcacgcccttcaacggtttctgcggaccgtacttgcggcgtatggccatcagtccgggcatctcgtgctccgaaatctcaatctctttccggccccattcggccaatgacatatcggccactttgtaaggcagggacaaatccaaaaacatactttttatcatttaatcaattatacataatctcttgccgaatcgtcggctctcgtcggccgcattgcgacaccgacttccgccgaagggaatcgaagccacgaagcggtaaacacggcctccggccgaaaaacggcataaaccgccgcacggtcatcgccgccgattctccgaactcaaaatacagctgcgatcccgttcgatctggcgctgcaactcctccagcgaatcgaacttgcgctcgtcgcggatcttacgccgcagctcgacccggagtctccgaccgtagagatcgcccgaaaagtcgaaaatatgggtttcgagatgtcggggacctccgcccaccgaggggttgctccccagattcgacatggccttatactccacaccgtcgatctccacataggactcatacactccgctttcgatcgtatccgcatccgcaacctccatattggcggtcggaaatcccaactcacggcccagttgccgtccgtgcatcacctctccttcgatccagacagacatagcctcaaatcttttcggtcagcttgcgcaccagggaaatctgggagaaaaactccttggcgaaaacccgcagcacggtataaagcggtatggccagcagcatgcctatcaccccggccaacgaccctgcaatcaggatcacgagaaatatctcgagcggctgcgccttgacccgctcggagtagagcgtcggttgcagcacgaaatcatccagccccttcaaaatcaacagcgatcctgcaatgaccagcatcgtatggccgatcgacatcccttcgatcggggtgatgatacccatgcagaccgaaacagcaccgccgatggtcggaccggcgtatggcacgacgttcataacccccatgataagaccgatgaaaaaggcatcctgcgccctcatgccgaaagccatcatcaccagcgatacggccaacatcaacaggaagctctcggccaaaatcccccgaaagtagcggaacagaagcactgtaaccgaattgagggcatgcgtcacgttctgttggtatcgatccgggaaaagtgccgttaccatcgcatagaaaagtccgtcgtcccgcaggaaaaagaacgtgatgaacgaaatcgaaaaaaaggcgatcacgctcgaaacggccaaactcaccaccgatgaaaacgccgtattgatcgtgtcgaaattaatcagcgactgcaggaacaagatcagcgtgtccttgaacgacacctgggtttcgggcaacgagaagaagtgagtgagataatcctgaatacgctgcagcggctcctcgacagaagtcagcaccgtcgaaaaatcgaggtgcgccaactggtagagcttgttggtcaccagcggcacgaaaagcccgcacatcaccgcgaaaacgatccagatcaccagcagcgtaacgagcgctccgcaccagcgcggcacacgccatcgcccgatccgacctcgggatatccgggctaccagcgggcgtcccataatggccagcaccgccgaaaccagaatgtagatcacgatggagctgaagtaccacatcaaaaagaggacgacggccgtaatggccgcccccaccgtaaaacgaagcaatgtttgaggtgtaatactcatacgtaccgcaacgcgaaaaccgccgccaataagttacttcaaccgggcgatgggagtttgcgatcccacgacaggatccccgatctccacgagcagttcggtatccttcggcagaaggatgtcgatgcgggagccgaacttgatgaacccgcaaaccgaattttgctccaccttcgagccgactttcatataggaaacgatacgacgggcgatcagacccgcaatctgacggaagagcacctccttgccgtcgggggttcgcacgacggtcgtcgtccgctcgttctcggtcgaggacttgggatgccacgccaccaggaaacgccccggatgatacttgaaatactccacggtacctccgaccggcacccaattcatgtgaacgttggtaatcgacatgaagatcgaaatctgcagcatctcccgatcgaggtattcgctctcgtgcaccatttcggtcactacgacccggccgtcgcacggagcgaagaccaactccgcatcatggatcttcacacgccgcggctcccggaaaaatgccacgataaagaaccaaaacagcacaagcagaatggatccgaaccagagcagtcccgcttcggcatggcgcgacatcagatagtacatcagcgcccaaagcaggaaacaaacgactcctgtcagcccgataatcttgtagccttccttgtttattttcatattcggatagtaagttttcttatgaaatatacagcaataccagataagcgaccacgaacggcaacgagaaaatgagcgcatcgaaacggtcgagccaaccgccgtgccccggcagaatattgcccgaatccttcacgccggccgcacgcttgaacatcgactcgatcaaatctcccaacacaccgctcacggcagcgatcgcagctaaacagcaccacagccaatagctaccgtcgagccaccatgcggcaaggcaacccatggcgatcgcaccgacgatgccgccgaagaacccctcccacgacttgttgggcgaaatccgctcgtaaagatgatgtcggccgacgctgacccccaccaggtaggcgaatacgtcgttggcccaaataatgaagatgtaggccaaaatcacccagggattccagccacccttccccgtcagcagaggcagataggccatcatcgacaaaggcacggccacataaaagacacctccgagcgtcgcccccacatcggcggcggggcgggcacgcttgaggaacagttcgcagacgaacatcagtggtatgagcaaaataaaaaccggcaacaaccacaagaggacggaaagcgctctcggcaacaacgccacctgctccgcagaaaccgccagcaggaaactcgccacgaaaagagccgtacccgtaaccagtccgagccatttgagagggtaaatatcctcccggcgggccatccggtaaaactcccacataccgccgatgagaatcgccagcaacagcactccgaaactccactgcgaccaaagcaccgctccgactaccacgacagtcaggacggcaccgctcaaggttcgcaccagaagattccttattttatcagacataattcaacctttttcgggtaaacctcgttaaacttcaggcgtttccgccgacgattttccgtccgacacagcggaagcggcggttccggaaatcttttcttcgtcctttcggggctcggccgacgcaacctcttttttcccggctgcctcttccgcatcgccggatgcagctttccgctccgccaaagccttctgctcggcctctttccgttcccgcagaatatcctttttccgtttaccgaagatacgctccgcatcctccgtaaaaaccacttcgcgctccaacagcagttcggccaactccttcaaaccgtcggcatggctgcggagcacctccgccgccatcgcataggcttcggcaatggtatttttagcctcggcatcgatctgctgggccgtcagttcggaatagggcttggtcagcgccatgtcgctctggcccgtagagtcgtaatagctgattgtcccgaccttctcgctcataccgtaataagccaccatggcatacgccatcttggtcgcccgctccagatcgttgagcgctccggtcgaaacctcgccgaaattgatctgctcggacacccggccgccgagcatcgcagccagctcgtccatcatctgctcgcgcgtggtgatctgccgttcttcgggcaggtaccaggccgcgcccaacgacttgccgcgcggaatgatagtcaccttgatcagcggactggcattctccaaaatccagcttaccgtagcgtgtccggcctcgtgataggcaatcacccgcttctcttcgtcggaaatgatcttgttcttacgctccagaccgccgataatgcggtcgatcgccgccaggaaatcctcgcgcgacacatatttcttattgtgacgggccgcgatcaacgccgcctcgttgcagacattggcgatgtcggcacccgaaaagccgggcgtctgcttggccaggaaagtacggtccagctccggatcgagcttcaacggacgcaggtgcacgtcgaaaatctcctcgcgctccttcacgtcgggcaatcccacctcgatctgccggtcgaaacgtccggcacgcatcagcgccttgtccagaatatcgacccggttggtcgccgccaggacgatcacgcccgtattggtctggaaaccgtccatctcggtcagcaactggttgagcgtattctcccgctcgtcattgcccgagaacccggcgttcttgccacgggcccggccgatggcgtcgatttcgtcgatgaaaagaatacagggagctttctgcttggcctgctcgaaaaggtcacgcacgcgcgaagcgcccacgcccacgaacatctccacgaaatccgagccggaaatcgacaggaacggcacattggcctctcccgccaccgccttcgccaacagggttttacccgttcccggagggcctaccagcaacgcgcccttgggaattttcgcaccgatggatttgtatttgtcgggtttcttgaggaaatcgacgatctccatgatctcgacctttgcctcctccagtccggcaacgtccttgaaagtcacctttttcgagttctccttgtcgaacacctgcgcccgggccttccccacgttcataataccgccagcaccgcctccggccccccgcgacatgcggctcatcaggaagaaccagccgccgataataatgatccagggaagcatctgaagcagaatcgatgtccaggaattctcccggttctcgtacaccagcaccaccttgttacccgactcggccgtcaccttatccaaatcctgacggaacgtatccaccgacccgatattgaaagtaagctgagcccccgtttcgggcatattacggaaacgcgggtcaacagcatccttacggtaccggtccgcagcatccttcttaaggtagatttccgccaggtcacgattgacgacctggattttttcgacgtcgccctgctcgatcatctgcgccacggtattccagtcgctcttgaccgggactccgttgccgggtccgaacatccagtagccgacaataaaaataatgatgacgccgtatatccacatccacgaaggacgcggcatattcattttgttgtttattttctgttgtgccataaaatattattcgtcatactcataacgggtcgccggggcatcggcccacagctcctccaatttgtaaaattcacgcaattctgtctgaaaaatatgcaccaccacatccacgtagtccatagcgatccacagcgcattttgctgtccttccacgcgccagaccttctcgccgagggtttccaatacctgctcctcgatacccgccgcgatcgcagcgacctgcgtggtggagtcggcgttgcaaacgatgaagcaggagcagatcgccccgtcgattttcgaaagatccaacgatacgatatttttacccttcttatcctggattgcacgaattatcgtgcctgtcaatttttccatagtttgaatttaccggtcaatacaactttgcaaaggtagcgaaaatgagggcagaacaaaacaaacccgtttgtttttttatgccgaacgcatcccgcttcccgcaaagatacaagagaatatccgaaaatttgctctgcaaatatccgtcccgaatccctattggcgggaaactttcgacaaaatagtatcgatcaaggctttgatgatcgaacttttgacataggtccggcgcacggccacggcgatcttgcgcgaagtagcccccttggccagcgttttgacctgacaacgatgctccgcaggaatgtattccacggccatttcggggataatcgtcacacagtgcgtgtaatcgacgatccgcatcaacgtatcgagcgaaccggattcgaacgtatagtgcgaggggacctcccgtttggcctggcacagctcgatgatctggtcacgcatacaatgccccggacttaacagcaccagctccttgaggtcgatatcctcgatacggacgttcgtgcgttcaaaaagcggattctcccgggacacgtaaagatggaacctgtcgtcgaacaactcgtgttcctgaatcccctcgccgcaggttccgccggcgaccaatgccgcatcgatccggtcgcggcgcagcgcatcgacgatgtcggcggtcaccatctccgcaatctccagttcgactttgggatagtcccgcacgaaatcgggaataaacttatgcaacaggtaaggtgcgatggtcggaatgacgccgagccgcaaccgaccggaagtttcgcctttgagttccgcgaccgcttcgcggatatgatcgtaagcccggagggtttcccggatttcggcaagcaccacctcgcccgcctcggtcggaatgaccggtttcttgctgcgatcgagcagcaccacgcccaattcttcctccaaagacttgatctgcatgctcaacgacggctgggtcacgaaacagtgttccgctgccagagagaaactgccgcaattggctaccgccagcaggtattcgagttggatgatagtcatagtttatcttatttgcacgcacgaaaatataaaaaaaaccgatacttcgcaattattattcgaccatcggtttagtttttcgtacatttgcagactatttattattagaaactttttaactgatgggaaaaatcatactcaccggagatcgtccgaccggcaaactccacctgggacattacgtaggttcgctgcgccgccgcgtggagttgcagaattcgggcgaattcgagaaaatattcatcatgatcgccgacgcccaggcgctgaccgataatgcggacaacccggaaaaagtgcggcagaacatcctcgaggtcgccctcgactatctctcttgcggactggatcccgcgcaatcgacgctcttcatccagtcgcaggtgccggaactctgcgagctggctttctactacatgaacctggtgaccgtagcccgtctgcagcgcaatccgacggtgaaggccgaaatccagttgcgcggcttcgccgaaggcaacgaagaagagggatcgcagcgccagggtattccggtaggattcttcacctacccgatcagccaggcctcggatatcaccgctttcaaggccacgaccgtaccggtcggcgaggatcaggaaccgatgatcgaacagacgcgcgaaatcgtccataaattcaactccgtatatggagaaacactcgtcatgccgggaattctgctgcccgacaacgcggcctgcctgcgtctgcccggtacggacggcaaggccaagatgtcgaaatcgctgggcaactgcatctacctctccgactcggccgatgaagtgaagaagaaggtgatgggtatgtataccgatcccgaccacctgcgggtggaggacccgggcaaggtcgagggcaacaccgtcttcacctacctggacgccttcagtcgcccggaacattttcagcgatacctgcccgattacgcctcgctcgacgagttgaaggcgcactaccgccggggcgggctgggcgacgtgaaggtcaagaagttcctgatcgccgtgctgaacgaaacgctggagccgatccgcgagcgccgcaagcagtacgaaggccgcatcgaagaggtctatgaaattctgcgcaaaggttcggagcatgcccgggcaacagccgcgcaaacgctcggcgaagtgcgccacgccatgcggatcgactacttcgacgacaaggagctgatcgccgagcaggctcgccaataccagcaacagcgataacgcgcataaccagcagacaaggtacccgaaatgttcaaacgcataacaccgcagacgatcgcggattggggcgaacgtatctacatccgtttcctggaactcaccaaacggttcaccagtacgcagatcatggcgctgctggccgttatcgtgggtgttctggccggactgggcacctgcctgttcgagttgctgctttacggaatcaaagccggactgacccactggtttcccgtcgaacagtcgcatttcctcttcctgttctacccggtcatcggtatcatcctggcttcgctcttcgtcaaatacgtcgtcaaagacaacatttcggaaggcgttacacgcgtgctgtacgccatgtcgcgcaaaaattcctacatcgccccccacaactgctggacttcggtcgtaggcggtgcgaccaccatcggattcggcggttcggtcggtcccgaggccccgatcgtcctgacgggtgcggccatcgggtcgaacgtcagccgcctggcccacctgaactacaaaaacaccaccctgctgctctgctgcggcgcgggggcagccctcgcagccatcttcaaagccccgatcacgggcgtggttttcgtgctcgaaattctgatgctcgatctcacctcgcgcacggtcgtaccgctgctgatctcttcgatcacggccgccgccatcgcactcacgatcaggggattcgacccgattatcgccatttcgctgactcccgacgacgcattccggctcaaccaaattccgcttttcgtcctgctgggtatcttctgcgggctgatgtcctactacttcaccacggtcaatgcccgagtgggggccttcttcaaaaagatcgacaacccctacaagaagtggctgatcggcggtgccgtactcggcatcctgatctacattttcccgcccctctacggcgaaggttacgaaggtttcatgtcgctcatgcacggcaacacgaccgagctattcaacaactcgctcttctaccgtttcagccagatcgactgggtggtcattctcttcatcgtaggcacgatgttcttcaaggtgatcgccatggcctcgaccaacgctgcgggcggcgtcggcggtacgttcgccccttcgctgttcgtcggcgcattcatgggcgctatcacggcgctggtctgcaacaccctgttcggatggaacctgtcgctggtttctttcaccctggtaggtatggcgggcgtgatgtcgggcgtgatgaaggctcccctgacctcgatcttcctgatcgccgaactgtcgagcggttacggccttttcatcccgctgatgatcaccgcctgcatcgccttcgccatcgactactacctcgatcccgactcgatctataccaagcaactgcgccagaacggggagttgatcacccacaacaaggacgaatcggtcttcgtctttttgaggctcgacgacctgatccaggacgacggagtttacatccacccgtcccagactttgggcgacatcgtgcagatcatgtcccgggagcgtcacgacgactatttcccggttctcgacaacgaaaaacacctgctgggcatcgtccgcctgaacgacgtgcgggaagacctgttcaatccgcaaaagtacggcaacccgattacacgctacatgctcctgtcccccgacacgatcctgcaacatgaacagatccagagcgtgctgcgccgtttcgacgaaaaccacgtctgggtgttacccgtcgtggacaaggagaaacactacctgggctacatctccaaatcgcgaatcatgaccgcctaccgcgaacaactggtcaagatttcgcaataaaatacagtcccgacctcgctttctacaaccgaagaaactataaaaacagaatagtactatgaattttaattgggctgacgacacgaactgcgccgtaacggtatgcgacaccgaaggcgtggtaatttaccagaacaagcaatctatctccgtcaatggagagtatcgcggcaaaagcatgctcccctgccacaacgagcgctcgaaggggatcatcgcccgcatcctcgaaaaaggcgacacgaatgcctacaccatcgagaaaaaagggatccgcaaaatgatctaccaaacagcctggcgccgcgaggacggcaccgtaggcggtatcatcgaactgtcgatgccgattcccgccgaaatgccgcactacgtacggggataatagagcaccccggaccagaagcatccgaaccactcaacgacaccaggaacttcaaccggaaagccgcaaaaaaatacacgaaacaacccctatccgatacaggagaagagtcaaacgaccgcctttcttccaaaacgttacgaagaggcggatcaaaacggtttacaacactttccacagccgttttccgaaaacaggagcgcccgcgactaatcgcgggcgctcctgtttatttgcttactaccgaaatttctcgaatccgggaagatacttggtcggttcgaactcgacgatcgtataatctgcgatctcatgccggaagaacggatcttcccgcgtaaaggcttcggcttccgcacgattcgcggctttcgaaacgatcacaccgcccgtacgggaattctgcggcccggtgcaaagcaatttgccctgagcgaaataacggtcgagaaaagcccaatgctccgccaggtagcgctccacctcttcgagcggcttcttgtaatcgacgataatcagaaacatagttttcaaagttttatgtcgtaaatctggatcacaccgacaagtttgccttcgtcgtcggtcaccagcaacgaattgatcttatgctgggtcattttcttctccgcagcgatcagcttctcatcgggcccgatggtcttggggttgagcgtggcgatgtccatggcccggatcgagaaaaactccgattcgcggcgttccatcgcccggcggatatccccgtcggtgacgatccccagcactttgtccccctcgcaaatgacgattagacccagaccgcctttgctgacggcgtggatcatatccttggccgaacagtccggagccactacgggcaaaccctccttgtgcatcacattgccgacagtcatcagcagacggcggcccaggctgccgcccgggtgcagccgcgcgaagtcgatgctcgtgaaattgcgcagcttcatcagcgctacggccatagcgtcgcccatggcgatctgtgccgtagtcgaagtggtaggcgccaggtgcaggatgcaggcctcgtggcgtacggccacgtcgaggtgcacgtccgaattgcgggccaacgtcgattcgggattgcccgtcatcgaaatcagcttgttgccgttggtatggatgaacggcacgatcttgagaatttcatccgtttcgcccgaataagaaagcgccagcacggtatcttccggagagatcattcccagatcgccatgaaaagcctcgcccggatgcaggaagaaactcggcgtaccggtgctcgccagcgtcgcggcgatcttgcggccgatcagccccgattttcccattccggtcaccacgagcttgccccggctgtgcaggataagttcgacagcgcacacgaaatcatcgcccagcgtctgttcgagatgcttgagcgccagcgcttcggtatggatcgtctttcgggccagcgagaggatatcggcccgcttgtctgcggtcatattatagcaaagattttattacgttttccaaatcattcagataaagcatgttcggtccgtcgctcaaggcatgatcgggatcaggatgcacctcgaagaagaaaccgttggcaccgaacgcccgggctgcccgggccatggcaggcacgaactcgcggttaccgcccgtcttgccgccggcggcaccggggcgctgtacggaatgcgtgcagtccatgacgaccgtcgaagcgataccgagcatgtcgggaatgttgcggaaatcgaccaccaggttgttgtagccgtacatattgccacgttcggtaagccaaacctcaccggcaccggccttcatcgccttttcataagggtatcgcatatcttcacccgaaaggaactgcgctttcttgatattgaccgtacgtcccgtacgggccgcagcgaccaacagatcggtctggcggcaaaggaatgccggaatctggatcacatcgacgacttcgccgaccggagcggcctgacaggattcgtgaatgtcggtcagcagccgcagcccccacttcgaccgaacgtcggcgagcatccgaaggcccttttccaaccccggcccccggaacgacgaaatcgacgtgcggttggccttgtcgaacgaagccttgaaaatgatttcgacgcccagccgacgattgatgtccgccagcgtcgcagcgaccgtatcgagcaattccgccgattcgatcacgcagggaccggctataaagagaggttttttatccatgattctatcgcttcattcgtttcaaaaattcctcggcggccgccagatcttcgggcgtgtcgatgccgatggtctccacgtcggagatacccacgccgatcctgtagccgttctccagccagcgcaactgttcgagcgactcggccttctccagcgaagatggcggcaaggccgtcacctcggcgagcaccttcgtacgaaaggcatacataccgatatgtttatagaaagtatgtttcgccagccactccgaccgctccacaccccgcaggtagggaatcaccgagcgcgaaaagtagatcgcccgcgactcgccgtcgagcaccactttcggcgaattgggattttcgagcgccgccagtccgtctgactcggcgaagggacgcaccagggtagcgatgtccgtacccggcacgtcgaagcagcgcatgatcgcccgaagctgttccggacggataaaaggctcgtcgccctgcacgttgattacggcgtcgtactcccggccgagctttccataagcctcccagcaacggtcggtgccgctgcggtgctcggacgaagtcatcacggcacgaccgccgaactcctcgacggcacgcaggatccgttcgtcgtcggtcgccacgaccgcatcgggcagcacgccggtcacctgttcatacacccggcggatgacgggctttcccccgagcatcgccagcggcttgcccgggaagcgggtcgatgcatagcgggcgggaatgatcgcaacaaactccataactcgtgactctatctgtttcaagtcgctaaaatacgaaaaaagcgggacattgcgtcccgcttttcaaattaacacggattatttcttctcctcgagagccaaacgcaacacatcctcgttcgtccgcacgtagtggaacgtcagaccgtcgatgtactccgccttgatctccgagatgtccttgcggttgtcttccgaaaggatcagctccttgataccggcacgcttggccgccaggatcttctccttgataccgcctaccggcattacacgtccccgcagggtcgtctctccggtcatggcgatacgctcgcgcaccttgcgccccgtataggtcgaaacgatcgaggtgaccatcgtgatacccgccgaaggaccgtccttgggaatggctccctccggtacgtggatgttgatgtcgttcttctcgaacatttcgggatcgatacccaactccttgtggtgcgccatcacccactcgtgggcgatcgtcgccgactccttcatcacctcacccaggttacccgtcaggctcactttgcccttgccgggggtcagcaccgactcgatgtagaggatatcgccgccgacctcggtccaagccaggccggtgactacgccgaccatatccccgacctcgtactcttcgcgcaggaatttcgggatgccgagaatcttctcgacatcggcctgcgtaagctccggcgtataagcctcctcgaaagcgatctgcttggcccggtagcgggcgatcttcgccaagtgcttgtccagcgaacggacacccgactcgcgggtatagcccgcaatgacctgctcgacgacctcgggagtcagcaccagttgcccctcgggaatgccgtgcgccgtcatctgcttgggcagcaggtggtcgaggccgatccgcaccttctcttcgagaatgtagcccggaatgttaatcatctccatacggtcgcgcagcgccggattgatgttgccgatgttgttggccgtggcgatgaaaagcactttcgaaaggtcgtactccgtatcgaggtagttgtcgtggaatgtcgtattctgttcaggatcgagcacttcgagcagtgcgctcgacgggtcgccgtgattgcttacggtcaccttgtccacctcgtcgaggatgatgaccggattggacgacccgcagcgtttgatggtctggatgatccggcccggcatcgccccgatgtaggtgcggcggtgaccgcgtatctcggcctcgtcgtgcagaccgcccagcgaaatacggccgaacttacgtcccagcgccgccgccacggacttgcccagcgaggtcttgcctacgcccggagggccgtacagacagaggatcggggatttcaagtcgcctttcagcttgatgacggccaaatgctccaacagacgctctttcacttcgtccagcccgaaatggtcgtggtcgagctgctcgcgtgcgcatttcagatcgagattatcctgcgtcacatcgttccagggcagctcgagcatcagttgcagataggtaacttgcaccgaatattcggccacggcgggattgagccgttcgagcttggtgatctccttctcgaaaagttcggccacctccttgggccagttcttcttggacgccttctcgcgcaatccctccagctcgctgtcggcaccttcgcccagctcgtcctgaatcgtgcgcatctgctgctgcaggtagtaatcgcgctgctgcttgtcgatctcctgcttgacacggctctggatctcgttcttcagctcgacgagctgctgctcgcgcaccagaatctccaacaacttgcgggcacgggccagcagaccgggagactccagcagcgactggcggtcttcgtccgaaagctcgaggttcgaacagatgaagttgatgattccccgcttggagtcgatattcttgatggcgaacgccgcctccttgggcatgtccggcgaaatagcgatgatacccagcgcaatgtcgcggatcgaatccacgagagcctcgaactccaggctctttacatcgggagaagagtcgcgcaacggcgtcacgctggcctggaaataaggttccgtggagacatactccttcacctcgattttctccagtccgtttagaatcaccgtcaggttgccgttgggcatctccagaatcttgataatacgagccgcagtgccgaccttgtacatatcgtccggcgccggatcttcgacttcgctttcgcgttgcagcacggcccccagcaatccgttgcgctcgttcacttcgcgcaccagccggatgctcttctctcggccgaccgtaatcggcgtgatcgctccgggaaacagcaccgaactgcgcaaggtcaatatcggcaatatttcgggcacgttgacctcttccaacacctcgtccccgcccgttacgatgggaatgacgtgatggcgtccgtccaggacatcgggcagtgccttcagatcgtccatgtcgatattctttattttatccttcttactcatattctttttattatgtggctaaaaatcgaagtgttttccgtatcgtcggataaattctcccttcggaaactcccgaccccgaccgctttcccctcgctcctcctttccttgaccgggaaagttttgagtacgaaaaacatctactttttttaaaaaattacagattttgcaaagataacgattttcctcctaattttatttcatattagcagaatgttcataactttgcaaatcctgtacaaattattataaataccgcatacaatatcatgcaaatcgccgacaaatactccccgcaggagatcgaatccaaatggtacgactactggatggagcaccgccttttccattccgaacccgatgaacgggaaccctatacgatcgtcatcccgccacccaacgtcacgggtatgctccacatgggacatatgctcaacaacacgttgcaggacgtactggtgcgccgcgcccgcatgcagggcaagaacgcctgctgggtcccgggcaccgaccacgcctcgatcgccacggaagccaaggtggtggccaaactcaaggccgaggggatcgagaaatcgtcgctctcgcgcgaagagttcctgcgtcatgcctgggactggaaagagaaatacggcggcgtgatcctgcaacagctgcgcaagctgggcgcctcgtgcgactgggagcgcacctgcttcacgatggacgaagcccgtaccgaaagcgtcctgcgggtcttctgcgacctctatgaaaaggggctgatttaccggggcgtacgcatggtcaattgggacccgtcggcccagaccgccctttcggacgaagaggtagtgttcaaagagtcgcacggcaagctctactacctgcgctaccgggtcgaaggcaccgaccgcacgatcatcgtcgccacgacccggcccgaaacgatcctcggcgatacggccctctgcgtcaatcccgacgacgaacgctacgcctggctgcccgaagacgcccgggtcatcgtcccgctggtgggccggtcggtgcccgtgatccgcgatacgtacgtggacatcgctttcggcacgggtgccctgaaggttactccggcgcacgacgtgaacgactatatgctcggtgaaaaatacgggctcgaatcgatagacatcttcaacgacgacggcacgatcaacgacaaggtagggctttatgccggtatggagcgcttcgccctgcgcaaacagatcgaaaaggatctcgacgcggccggcctgttggagaaaaccgaagactacaccaataacgtgggttattccgaacgtaccggcgtagcgatcgaacccaagctctcgatgcagtggttcctctcgatggagaagctcgccggaccggcgacgcgggccgttctggaggacgaaatcaagctcgttcccgaaaaatacaagaacacctaccgtcactggatggagaatatcaaggactggtgcatctcgcgccagctctggtggggccagcgcattccggcctggtatctgccccaaggcggctacgtagtggccctcaacgcagacgaggcactggagaaagcccgggccaagagcggcgacgcctcgctgacgctcgccgatctgcggcaggacgaggacgtgctcgacacctggttctcgtcgtggctgtggcccatctcggtattcgacggcatccgccgcccgaataacaaagacatcgaatactactatccgaccaacgatctggtaaccggtcccgacatcatcttcttctgggtggcccgcatgatcatggccggttacgaataccggggtgagaagcctttcggtcacgtctatttcacggggatcgtgcgcgataaaatcggccgcaagatgtccaaacagctcggcaactcgcccgatccgctcgacctgatcgcccagttcggcgccgacggcatgcgcgtagcgatgctgttgagctcctcagcgggcaacgacgtaatgttcgacgaggctctctgcgaacagggacgcaatttcggcaacaaaatctggaatgcctaccgactggtcaacggctggacgatcgacgacaccctggcacaaagcgaaaacaaccgcctggcaatcgaatggttccgtcaagcgctcgccaagacgctgcgtcaggtcgaatcggacttcgcctcctatcgtatctcggaagccttcatgaatctgtataaactcttctgggacgacttcagcggctggtacctcgaaatgatcaaaccggcctaccaatgcccgatcgaccggccgacactggaagccacgtgcggtttcttcgacgacctgctgcgtctgctacaccccttcatgccgttcgtcaccgaagagatctggcaggacctggcaccccgcaaggcaggcgagtcgatcatggtccagcgcatgcccgaagcacgggagatagacgaggcgctgctgggccggttcgaactgacgaaagaggtcgtaacggccgtccgcaacgtccgcaagcagaaaaacattccgcagaaagaccccctgacgctccgggtgatcgccgacgagaactacccggcggaatacgctcccgtcctgcagaaaatgggcaacctctcgcagatcgaaaccacccgggagaaagatccttcggccgtcggattcctcgtaaagaccacgcaatacttcgtaccgatggagggcatgatcgacatcgaggccgaacgcaaaaaactcgcaggcgaactggaatacctcgaaggattcctcgccagcgtgcaaaaaaagctctcgaacgaaagattcgtttcgtcggctcccgagaaagtcgtggccaacgaacggaccaaacaggctgacgccgaagccaagatcgccgcgcttcgggaacaactggcggccttgaaataactcatcacgaaacattcaactcctctctccggcttacaacagcagagagaggagtttatacccgactatgccggaaatcaccatctataccgacggctcggccctgggcaatcccggtccgggtggttacggagcggtcctgatatcgggacggttccgcaaggaggtgtcgcagggttaccgcctgacgaccaacaaccgcatggagctgctggccgtctgcgtagccctcgaaatgctgaaattcgaaggcagcgacgtgacgatctactccgattcgaaatacgtggtcgatgccgtggagaaacgctgggtattcggctgggagaagaaagggttcgccggcaagaagaaccccgatctatggtcccgcttcctgcgctcctaccgccgtcacaaggtccgtttcgtctgggtcaagggtcatgccgatacggtcgaaaacaaccgctgcgaccaactggccgtagccgcagccaacgacagggcgcacctgctggaagataccgggtatgttccgggcagtggagagtaagccatataaagagaataaaaagccccgaaacacgacgaaatgtcccgagactttttaaaaaactatccggtcacacggccgcccgaactcgggacggcattgccctactcacctcctgctcctatctctacttaacttacttccgcacgtaagctcgctcgatttcggcaatatagacctcgtgataatcgtgctggggataccatttcgtatcgcaactgcgatcgacgaacccttcgggccggattcttccgacatagagcttgcggcattgcaggatcaggcgtgcttcggccggcgcgggcactccgtcgtccgtacaggcgaccgtcagtccggcattgcggatcttatcctccgtacggccggtacgactgccgcagtattcgagagccgcacgatattcgggcgagaaaaacgagagggtcgccctctcctcccgatcgacgaactcccgcgtataacgctgcggacgtatcacgaactgcgccacggggcgtccccagatgaacccgatcaaaccccaactggcggtcatcgtattgcaactttctctgttcccggccgtgacgagcatccactcccggccgatggcccggataaaattatcggtaatttcagccggatcgatctgtttgaaattttccatggtctattgttcctttttatgactctatcctgttacaaaaataacattctttccccaaaatcggacaaccggattgcatatcctgattaaattgctatatttgcccctactttactccgaaacaataaccgatccggaatttatgttcaaaacatacatgcggctgctgggattcgtcagcccgatctccaaatacgccgtcccctacttcttttacgcgctgctgtacgccctgttcaacacgctcacctacgccatgatcctcccgatcatgaacacgctgttcgacgacaagaactcctacgttttccaacccgtttacgactttcccatgcacgggctctcgttctcggacatcgacgcctcgcagatgttgagctacgtctatacgcaactgttcgggacgaatttcacgatgtcgaaaatgctcctcctgctcgcctgcggtacgatcgtaatgaacctgttgagcaatttcttccgctacatgagcgcctggacggtcgaaaacatgcgtgtcaggtcgctgcaacgcatgcgcaacgatctgttcaacaaaatcatggggatgaacgccggatatttcagcgatcagcgcaagggcgatctcatgtcgcgcatcacacaggacgtcatggtggtccagtactgcatcaccaatacgctgcaagtcgccttccgcgatccgctgcttattatcggttacgtgatctacatgctcctcgtatcgtggcagttgtccctgttcgccatcctgttcctgcccgtagtggcgctcatcatcggacggatcgtcaaaaaactgcgccacccggccctcaaagggcaggaacgcatgggcgacatggtaagcgtgctcgacgaatcgctttcgggcatcaaggtcatcaaaagctacaacgccaccgactatatccgccgcaagttctccgagttcaacgccgaattttcgcgcctgatgctctcgatggcccgccgccagcaactagcctcgccgatgagcgaattcctcggcctgacggccgtcgcggtactgatcgtcttcggcggttcgctcgtcatgaacggatcgctttcggccggcggattcgtcggcttcatcgccgtattctcgcagatcacccgccccgtgcgctcgttcatcgaccagttcgccaacatcaatcagggtatcgccgcaggcgagcgcatcttcgacgtgctcgattccgaaccggaaatccaggacaagcccgacgccaagacgttggacggcctgcacgagaagatcgaattccgcaatgtacacttctcctacgacggcagccgggaggtgatcgacggcatctcgttcgacatccggcgaggagaaacagtggctctggtcggtccttcgggcggcggcaaatcgaccctcagcgagctgatcccccgcttctacgacactacgggcggcgacatcctgatcgacggggtttcgatccgcgactacacgcaggagagcctgcgtgcccacatgagcatcgttgcgcaagataccgtgctgttcaacgacaccatcgaaaacaacatcgccatgggacgccggggagcgacgcacgaagagatcgtcgctgcggccaaaatcgccaacgcccacgacttcatcatggagtgtccgtcgggctacgacaccaacatcggcgaccggggcgccaaactctcgggcggtcagcgccagcgcctgagcatcgcccgagccgtactcaagaatcccgaaatcctgatcctcgacgaagcgacttcggccctcgacaccgagagcgaaaaacttgtgcaggacgcccttaactccctgttgcaaggccgcacatcgatcgtgatcgcccaccgcctctcgaccatccacaacgccgacaaaatcatcgtcatcgaacggggtcggatcgcggaacagggcacacactcggagttgatggccaaaaacggcatctacgccaagttgatcgagatgcagagcttcgactaaaagccgattcccatgaccgaaaaggagaaaatgcaggccggggagtggttttccccaaatgacgaggaactcgtacgcgatcgtgccagggcccgccacctcacccatcggctcaacgtcgcgctcaaagacaaggacgcgacctatctggcaacgctccgggaactctgtccgagggtcgaagccatgatccgcgcccctttccactgcgattacggatacaatatctccatcggcaaagggtcctacgtcaatttcaactgcgtttttctcgacctcgggccgattcgcctgggacaacgctgcctgataggtcccggcgtacaacttctgacggccgtgcatccgatgaacgctgcggaacgggctacgggcaaagaaaagggagcgggcatcgaaatcggcgacgactgctggctgggcggcggcgtgatcgtctgtccgggcgtcaagataggctgccgctgcgtcatcggcgccggcagcgtggtcacgcatgacattcccgacgattcggtcgctgccggcaacccggcccgcgttatccgcaccgcaaccgacgaataaatccactacttccaaaaatctttcgaggaaatcgtgcaacggcttcctccacaactcgttgcccctcgataaaaaactgtttccggggatttatttattcatattttttcgtaactttgcatgttggtaaaatccgccgccggcttcccgcacgaaacaggcggcacacagcgaattccggcgctgccgaatacgacaaagacaggtaacagctccgcattcggggctgtccggcggaatcgggccggatcggattctgccagcccatgaaaacgacgattgaaaacaacaggatatgaagttcaaagaatataaaggcctcgatctgccggggttggccgccgacgtactgaaagagtgggacgcacaggacacgttccacaaaagcatctccacccgcgagggtcatcccaccttcgtcttttacgaaggacctccctcagccaacggcacgccgggcatccatcacgtcatggcccgcacgatcaaggatatcttctgccgttacaagacgcagcaaggttacctcgttcaccgcaaggccggatgggacacgcacggactgcctgtagagttaggcgtcgaaaagaaactcggcatcaccaaggaggacatcgggcgcacaatctccatagaggagtacaaccgcgcctgccgcgaggcggtgatggagtacacgggcctgtgggaagaactcacgcgcaaaatgggttattgggtcaatatggacgacccctacatcacttacgacaacaaatacatcgaaaccctctggtggcttctgaaacagctcttcgacaaggggctactctacaaaggttacaccatccagccctactcgccggccgccggcacgggactttcgacccacgagctgaaccagccgggctgctaccgcgacgtgaaggataccacctgcacggcgcagttcaaaatcatccgcgacgagcggagcgaaaaactcttcgacggagccgaaggcgatctctacttcctggcttggaccaccacgccctggacactgccgtcgaataccgcgctggccgtaggccccgaaatcgaatacgtgcgcgtcaaatgccgcaatccctatacggatgccccccagactgtcatcctggccaaagaactgctggggtcgtattttacccccaagatggagggcaagttcgaaatctctccggtcacctacaagggtccggacttcgaaggcatccgctacgaacagctcatcccctgggtgaagcctgcgggcgatgcgttccgcgtcatcctgggcgactacgtgaccacctccgacggtacgggtatcgtgcatatcgccccgacgttcggtgcggacgacgaccgcgtggcccgcgccgcaggcatcgccccgctgtttatggtcgataaggcgggcaagaatcagccgatggtcgatcgcaagggacggttcttcctgctcgaagagctcgacccgaccttcatacgcgacaacgtcgatacagcggcctattcccaatgggcgggccgttacgtgaaaaacgcctacgacgattcgctcgccgccgacgcgccgacgctcgacgtcgatctctcagtgatgctcaaggccgagaacaaggttttcaagatcgaaaagcacacccactcctacccccactgctggcgtacggacaaaccggtgctctactacccgctcgactcctggttcatccgaactacggcgctgcgcgaccggatgatcgaactcaacaagacgatccgctggaagccggaatcgaccggaacgggacgcttcggcaagtggctcgaaggtctggtggactggaacctctcgcgctcgcgcttctggggcacgccgctgccgatctgggctacggaggattactcggaaatgaagtgcatcggctcggtcgaagagctcgtcgccgaaatcgaaaaatccgtcgcggcaagtctgatgaaggagaatccctacaagaacttcaagccgggcgacctctccaaagagaactactcgaccgaccggatcgacctgcaccgtccttacgtggacaatatcgtgctggtttcgtccaaaggcgaaccgatgcggcgcgaaccggatctgatcgacgtgtggttcgactcgggcgccatgccttatgcccagctacactaccccttcgagcacggcggcgactacttcaagagcgtctatccggccgatttcatcgccgaaggcgtcgatcagacgcgcggatggttcttcacgctgcatgccatcgccacgatgctcttcgactcggtggccttcaagaacatcatttcgaacggcctggtgctcgacaagaacggcaacaaaatgtccaagcgcctaggtaatgccgtggatcccttcgaaatactttcgacctacggcgccgacgcgacgcgttggtacatgatctccaactcgcagccctgggacaacctcaagttcgaccgggacggcgtggacgaagtgcgccgcaagttcttcggcacgctctacaatacctactcgttcttcgccctctacgccaatgtggacggttttacgggacaggagccggaagttccgatgagcgaacgcccggagatcgaccgctggatcatctccctgctcaatacgctggtccggaacgtcaccgaatcgctcgagaattacgatccgacgccggcggcccgtatgatccaggaattcgtatgcgaaaacctgtcgaactggtacgtgcgcctcaaccgcaagcggttctggggcggcggtctgacacgcgacaaactggcagcctaccagacgctctacacctgtctggaaaccgtttcgatgctctccgcaccgttcgcgccgttcatctccgaccgtatcttccgcgatctgaacgccgtaagcggtcgccacacggacgagtcggtacatctttcgaccttccccgtctgcgactcctcgctcatcgacggtgaattggagcagatgatgtctatggcccaacaggtttcgtcgatggtactggccctgcgccgcaaggtgaacatcaaagtccgccagccgctcacgaagatactcattccggtcctcgacgccgacaccgcacgccgcatcgaagccgtcaaggggctcattatgagcgaagtgaatgtcaaggaaatagaactgatcgaaaatacgacgggactcatcaccaagcgcatcaagcccaacttcaagaccctcggtcccaaatacggcaaacagatgaagcagatcgcagctctcgtagccgggttctcacaggatcagatagccgcgatcgaagcatcggcggaaaccctgctggacgtggacggcgaaaaaatcaccgtcacccctgccgatttcgaaatcacctcggaagatatgccgggctggctcgtagctacggagggcaagctgaccgtagccctcgatatcacgatcaccgacgacctgcgtgccgaaggtatcgcccgcgagttgatcaaccgtatccagaacatccgcaaggattcgggcttcgaggtgacggacaaaatccgtgtggagatcgaacagcaggagttcgtccttcccgcgctcaaatccttcgccgactacatcgcctcgcagacgctggctgtcgaaatcgaaggagtgccttctcccagcggcgaattcgtcgtggagtcggaggtagatgagcaaccggtccgtatcgcggtgaccaaaatttgaccaaaaaaggagaacctgcacgtttccggcaaaaaatttggaagtaacgggaatattgtttaatttagtataacattattacaaataaaatattgaaactatggcagaagcagaaaaaacccgatacagtgacgccgaattggaagagttcaaacagctcattctcaaaaaactggaaacagcacgtgcggattacgaactcctgcgcgccacgataacccacaccgcatcgaacgatacggaggatacctcgccgacgttcaaggtgctggaggagggagccactacgctctccaaagaggagagcggccgcctggcggcccatcaaatgaaattcatccgcaacctcgaaatggcactcgtacgcatcgagaacaagacatacggcatctgcaaaaccaccggcaagctgatccccaaggagcggctgatgaaagtgcctcacgcaaccgagtgcatcgaggccaaagaaggacggattcactaaaggattcaccctccgaacgaatgttcttttcgtatggtatgaaaagaatccgttcgccacgaccggagataaaaataggagcgtccccgtcaggacgctcctatttttataaaaaacatcccgcaactaagtgcggctgcaggatgcttccctgacggaacaataacacttatgaattggaacttctctatattcattcgccggccacgccgctccgattttttttcgtcgtgatctcgatcaccccttccgctcccttctcgccataacgttcgaccccctgctctcctttcaataccgtcatcgcgtcgattcgggagggatccagttgcgaaaggcgatcggcagaaatttcctcgccatccaatactattaaaccgacctgcttcagagaacgaccgttatcaacaactgaaaccgaatccgaatccgctccggtcgtataggtcaacgtaacggtttcctccaaaggctgcgccgacgtggcaatcgatttagacacggaaatcgactttgacacagaagtgcgccccgaggaggcgccggaaggctccctgacaactgtcatcttattaggcgttttgcccgacgcattcgacgaataaaccgccaaagtcgtacgttctccggattcattcgtcgtaaactcgatcacaccgtcccgcgcccgctcgccataacggtccagcaattcgaacccgggttgcagaatccgaacccacagaaccttccccgcatcgatcgacttcaaatagtcatcatcgacctgccggccgttgatcaacacaagcggtcgggctccattgagcggacggatcgtaaatccgtttcccgtatccttgatccgataaagaccgggaccttcctggaaagagtttccacgctcgaaactacactccagacggtcgaactgccgggcaccttcagtcgtcgtcacataaaccacgccatccgccgccgcctcgccgtaacgtccgacagcccattcgtccttcaagaccgacatcgattcgatttccgcttcattcaaagcctttacctcggcagctgcgacccttctgccatcgagcaggaagagcatcgaactcaaatcgtgaccggaaaccacgaacgaatcgttcggtgcagcaacttcggaaatccgcaccttgccctgcccgtccaccggagtattaccggtctgaaccgtaccgaacgacggtccctccggtacggatgcgacgacagattcacctgcaccggacttccgggcctctttttcggcctgtttcgcagcatcacgagtcgtcacaagaatcgctccgacacgggcggcatccccgtaacgctcgactaatgccgggtcacggaatacatcctcccaggaaaaaatctgtatggtttcgatcttgcgggcaggaatcttctccagatcggtgatggaccccacacgcccgtccacagctaccaacggcaacattccgggacgtactccctgcacgttccgcaatttcaatccgctcaccttataggtatttttaccatccaccgatcggaaactacccttcagataacgcatcggattgttgtatttatcataaacggtcacctcgaaatcatcctcacgcgaagccgttttggaaacgacctcgatcaccccgttccgggccgatacgccgtatctggcgaccgtcgcttcgtccggctcggttacgatccgaacggtttctatctcgtgaacgataccgggagtagtaaaaagatagatattcgacaccttgccattccacagtaccaatggccggaattcgaacggcatcgaatggctaaactcgatccgccgcacccggtaagtatcgggcacacccgtcggttcgaaatcgcccgtaatatagtgatacaaatcggaaggcttctgtttctcttcgattgtcacacgttccgactccggacgactcgtatagacgatcgcaccgtaacgaccccgatcgccgtagcgtctgcgtgcctcgccggaggtcattcgggtcgccgtggcgatactcgacggtgacatcgcgcccaactgtctgtaatcgatctcctcaccgtcgagcagatacaagccctcgtccgacagatcaatccaaaaaggaatgagggcagccccatcgctcacctcgacagtcacccactcttccgcaccatcgaccgatttatacccgagtcgttcgagtttcccggcatcagcagtcagcaacttggcaaactcctctttcatgtacgcatcgcggcgggcgacaaactgttcgggcaactcatccccttcccacaccagataaagctccaaatcctccggatcccacaaggacggatcggccggactccaagactccgtataaggataggtctgaaccctaatcgacaacactccgttcgccgcccgcgtaccgtatcccttcagtgcctccggccctttgaccatccaagcaccaatcatcttctgttccggcaaccccaaataggtatccagcgtttcagccgacaattcctcgcccccgtccattatcagaggcggatgttccggatcgaagcgaaaatctgccggatcgccataaaccgcatacactaccggttcatcggatacgggcaggtgggtcagagcaagcgactctttcaaatgaaattccaaggcaatgtccgtccccatcggaattccgaagcggctaccgactgattttactttctgatccgtctcccctccgacaaggtaacaaacgatcggcttctccgtaacgatcgtaaagcggccctccgcatcggtcacaacccgccggccgccgctgcaaataaactcataaccggcccaaggcttatcgtcccggccaaatacgcgtccggtaaaggtgtgcgcccccgattctgccgtttgcttttcgagagcggtacgctcgagattagcgagcaattcggccatggagccttcgaccggtggcattcccccttccggtgtaccgactgtgaggccgtccgcaccagcaggaagaggcatttcaccgtttccggaatttttcgtagttttgtcctccggaagaacataggaggtctgtgcgaaagcgccgagcgccaggcatgcaagcggcaggacatagagcgccttggccctggcccacctcgatgatcttttacgcaacatcatggtaattcggtttttaaggttactatgattaaggctgttggcaattgagtaccacctcccgccaacggccttttttatcaacagcatctgataatctttcgcatcgaccccgcagcggagcacctgctcgtcggcctcgtactcgtgcacagcacgcagttccacacgcaacagccacatcgcggggttgaaccactgcaaacaccccagcaaatcgaccagcagcaggtcccacgaatggcccaaccgctgatgcgcctgttcatgcacgaggatcgtccctccgccgcaggcataatcctcctcggacatcaccacgtatctcatccaactgaacggagctcgaatccggtccgacaacaccaaaacgctcccgtttccaagcggtatgcgctggccgcggcgcgtcattcgcacaacccgcacgatgttgcatacggtccatcccaacgtcgcaaatacccctgcaaaatagatgattccgagcaaaacgccccagtcgaacggttcgggagcaggctccggctcctctgttatcatcaggtcccgggtatcgtcggggattcggttttcgaataccatgtcccgccggaaataattttccggaatcacgtcgatcccggcggcggataccccgggcaactccttctcgacggtaattacgcacaaaggcagcaaaaacgacagcagtaacactccgcacaacaacaccctgttcatccgatgcagcgtatcgcggctcaacaacaacttgtaaaacaggtagaagaccgccaggcatcccgcagccttcagactgtaaagcagaaaggtcggcataggattatcgtttttcggtttgactttcgatttgccggatcaggtcgcgcagatcgtccacggagattttctcctcccgtacgagcgacgaaaccaccccgaggtaggaattgtcgaaatacttgctcaccacgcccttcagcgtcttgcggctgaactcctcctcgctgacgagcggataatactggtaggtgccgccataggccttgtgtccgacgtaccctttcgcctcgaggccacgcaccatcgtcgataacgtattgaaatgaggtttcggttcgggccagagcgcaaccagttcgcgcacgaataacgggccccgcgtccagaaacaacgcatcagctcctcttctctaggtgtcagcttttccataatcaatgtcggttaaagtcgaacgaaacaggacctgcacaaacggcagcacagctccgcattgccggctcctgcacaaaaatcttctgaaacaaagataactaaaaaaatttcacatacaactattttttatagttttcaaactaaaaaatttagttttgcaggagaaacagagagcaacccgctgtaaaacaacaaaaaaataatagacaagataaaaaattcttgtctattatcaggattaagatatggaaaaatcttcctattcctcgtcgcggtgcagcttctctacgtaaatggcatgctgcatggcgatacgcttcgcaaccgaaggtttggtgaaatactggcgacgacggagctccttcaggacacccgtacgctcgtatttacgtttgaatttcttgagggccttctcgatgttctcgccctcttttaccggcatgataatcataattcgttgctttttttattgttttttactctaatttctaatggatcgtgtcttgtatcggggcgggactccatccggacgacgccgactccccgttcggtatgtctttcgaggcttctcgtaccgtaaaccgaagatacggggccaatcgctcggcctcacgcggggttaatatgtgctcttcaaccaactcttcgacggtactccaacctcctttcaattgtcttttactaaataacttcctaaatacggcgggcggcaaataaggatgccccttgagcgtactcggaggtgcaaagttaatatcaatttttcgaattttgaaactatcgcagtaaatttgtttcacgatccgctcgaaattggactccgtgacctgcggaacctcggccaactgatccacgctgtaaaatccgccgagccgctccctgtatcgaataatggccatgacgctcttctcaccgatcccgactaccgagcgtaaggtcgccgaatcggccccgttgagctcgatcaatccggagcgaacgggctccggttccggaaaaattacataggggagcaaaagatcggccaccgaatcggcgatcatatagcaagcccgaaaacccgcttcgtcccgaagaccgtcgtaaagatcccgataacggacaatggcctcggcctgacggacggaaaaaccgagcgacgcgagataggatgcggacaccgtatcgatcctgaatcgttcgcggggcacgatcctcctcggctcctgcgggacatactcccgatattcccgacgcggagaaggtgtcagcgcatactcgcgcccaatccgaatatagggttccagaataaaatagaccgaatcggtcatgccatagcaggtagccacatcctcggggatccgaaacactttgcccgctgcgcggtacttcagcaggctgaccgccatgcgggacgagagtcccagccgccgcagatcggcatattccaccgtattgggatcgaactcgaacagcctcacggagtccgccgcaaccgtcgcttccatctccgcctccacccggtcggcggataccgcgctcttccgccgttcggccaggagcagcccggcaacgaacactcccgccagcaggagaaacaccacgagcgcccggcgctcacgcgtctggaaaaatccggccatcctctaccacgcagctttgtcggacaacaacaacgtccggtaacggtcggaaggcgactcgagtcgctcacccaaaccatattccacccaacgttcgtccaccttccgaacgacctcgggcagcgaagtcaccacattgggaaaacgcgaagggttgcccgcaattccgggccgcttgctccgggcatccacgcacagcacaccgtcgcggcactccacatcccgccggggatcggtattggctgcggcgagccacagcagctcgtccgggcgcatcgtccgggcgtgtccgtcgaaaagaacggcataacgaatcccccggcacggatttcgggcaaggaaagcggccagatccggcttctgttccaccgcatcatcggcaaagagcagcaaggctccccactttccggcaagtccgtccgcgacctcgaccagaccgggcgtcagctcgaaccgctccggcacccgaacggactccgccggagcggacggatcgatctccgtcaggtcgaacgccagtttaccgccgaacccgggcgtcgcggtcgcatggtcgagtacgtcgtaaactccctcgcttacaatcaaatcgcgcgggaactcggcccggcgcaacaaggcggccaaccggtccggatcatgcacgtcgcaatcctcgcccgtaatgacgaggtatttattgaacatcatctgcccggccccccaaagtccctgcgctactttatgggcttgtccccggtagcgtctgtcgatcgacaccacggccaaattgtgcgccgtaccgaaaacaggcatcgtcagctccttcacttcgggctgtacggccagccggatcggagccaggaaaatcttctcggtggccttggcgatataggcgtcctcctgcggaggaatgcccaccagcgtcgcaggataaacggcatcgcgccgccgcgtgacggccgtcacatggaagcggggatattcatcggtcagcgagtaaaaacccgtatggtcgccgaaaggcccttccaccgtcttcggctccgacggatcgacatacccttcgatcacgaaatcgcagtcggccggcacataaatatcgttggtgatacacttcaccagtttcaccgggcgccggcgcagaaaccctgccagcaggtattcgtccatgttgtccggcatcggagccgtcgcagcataagtataagccggatcgccgcccagcgctaccgacacgggcattcgccgcccggcacgcctgtaaccttcgtaatgacgggctccggtcttgtgcaggtgccagtgcatgcccgtcgtgcgggcatcaaacagttgcagccggtacatgcccacgttgcggattcccgtttcgggatcgagggtgtgcaccagcggcagcgtcacgaagcgtccgccgtcgcacggccagcacttgagcaccggcagcgcatcgagcgacgcctcctccccctgcagcacgacctgctgacattcgccccgcgacgacgaggtacgcggcaaccagcgcgacatctcggccagcaaaggcagcatccgcaatttatccaggagcgaatttttcggcgtgacggcctgctgcaacaaatcatcgagccgtcgcgtcagttcgtcgagcgactccacgccgagcgccatcgccatccgacggtcggaacccatcatattggtcagcacgggaaacggcgtccccgtctgctcgaacaacagcgccttgccgccgtccggctgcttggacatgcggtcggtaatctcggcgatctcatacaccggatccaccggcacgctcacgcgctgcaattcgccttcccgctccaggcgggcgataaattcactcaggttgcgatacataaatccttacattgattctgctccgaagttttcgaggcatacaaagttaaaaaataatccggcgaatccgccggattatcccgattatcgttcccgcccgcagaagcggcaagccgaagcaactaccgcaggaacagcagctcccggtacttgggcagcggccacatctggtcgtccacgatctcctccaggcgatccacgtgtttgcggatctggtcgaaatagaccgccaccgtatcgtggtacgcgagcgccttctcccgctgatcctcgatcttgttggccaccttgcgggcttcgatcatatcgtgggtcagttgctggatcagagccgtatgctgctgaatacgtttgatgagttcgacatcggccgaagcgtcgagcccctgtccgatttgcgaaatcttatagaccttatccagcagcagagcttcgtaacgcgaagcgatcggcacgatgtggttcatcgtcaggtcgcccaacacgcggccttcgatctgaatctttttggtataggtttcccacttcacttcggttcgggcttcgagctccaccttcgagagtacgcccatgcgggcgaacatctcgaccgacgaaggatcgaggtagcggtcgaatacacgcggcgcacaggtttcgcaatcgagcccccggcgtgccgcttcggcccgccactcctccgaatagccgttgccgtcgaaacggatcgcccgcgaagagcggatcatactcttgagctcctcgtaaatcgccttttccttcctgactccggcctcgatacgcgcatccacgcgctcgcggaacgccgtaaactcgtccgccactgcggtattgagcacgatcatcgcctcggcgcaattgtccgaagaaccgacggcacgcaactcgaaacggttgccggtaaacgcgaaagccgaagtgcggttgcggtcggtattgtcccgcaacaaagccggaatatgcgaaatgccgctcatcttgaagacgttcttggcattgaagcggatcgccgaatcgctgcggctggcctcgagtttatccagcacggccgaaacctgcgtaccgaggaaggtcgaaataatcgccggaggcgcttcgttggcccccaggcggtgggagttggtggcgctcatgatagccgccttcagcaggccgttatgcttgtgcccggccgaaatcacattcaccaggaaggtaatgaactgcaaattctccgatgcggttttacccggactgagcagattgacgcccgtatcggttcccagcgaccagttgttgtgtttgcccgaaccgttgattcccttgaaaggtttttcatgcagcaacacccggaaattatgacggcgggcgatcttgtccatgatggtcatcaacagctggttgtggtcgttggccaggttgcactcctcgtacacgggagccagttcgaactgattgggagccacctcgttgtgacgggtcttgaccggaatgcccagcttcaggcattcgtattcgagatcggccatgaaagcgatgacccgcgtggggatcgccccgaaatagtgatcttccaactgctggttcttggccgattcatgccccatgagcgtacggcccgtcagcatcaggtcgggacgtacggcccaaagactttcgtccaccaagaaatattcctgctcccagcccagatactgaatcacccggttcacctccttgtcgaaatagcggcacacctcggtcgcagccttgttcacggccgaaatcgaccgtagcagaggcactttataatcgagcgcctcgcccgtataggcgatgaagacggtcgggatgcagagcgtaccgcccacgatgaaggccggcgaggtagggtcccacgccgaataaccccgtgcctcgaacgtattacggataccgccgttcggaaacgacgacgcatcgggctcctgctggacaagcaccttccggaaaattcgtcgagtacacccccgcagccgtccggctcggcaaaggcgtcgtgcttctcggccgtaccgcccgtgagaggctgaaaccaatgcgtatagtggtcggcgccgtggtcgagcgcccactggcgcattccggcagccacgccgtcggcgacttcgagcgtcagcggcgtcccccgctgcatcgtatcgagcagttgggcataaaccgtcttgttgagataccggcgcatggcctcgcggccgaataccttcgtaccgaaatactcggaaggacttccctcgggagccttcacttcgacggctttgtgatcgatggccgcctccaccattttgaatcggagcaatgacatgggatcacttcgaattatgaactcggaataccgtaaaacccgtacacttccgcccgggtgacggacggcatcctttctgcgcacaaagataaatatccgacacgacaaaaacgcacaaaaaaccgcatcttccagaaaaaaatcgaatatttttcgaaaaaaccaataaaaaaacaacttttcccgaaaaaacagcctaaaaattcgtcataccggtcgatttcagacattattttccggaaaatagcattttttcgaaaaatcgccccattcatgatccgggcatttccaaaacctccgccgaaaagagccttcgttggtacaaaccggctattttccgcatttcttgcttacaatccggcaattattttatatctttacgggcagtttaaaagcaattgaacatatttcaatactaatctctaatttattatggcaactaccaaacgtgaaaagttgtttaccgaatttccgccggtttcgaccgagcagtgggaggaggtaatcaaggccgacctcaaaggtgcggactacgagcgtaaattggtgtggaaaacgccggaaggtttcaacgtccgtccctactaccgggctgaaaacctcgccggactgaagttcctcggctccgaagccggggttttcccctacgtgcggggcacccgtgcccacaaccgctggaagatccaccagacggtcatcgtcaattgtcccaaggaggcgaacgccgtcgcgctcaagatcctcaatgcgggcgtcgattcgatcgaattccagatcgttccggagaccttctccgcagaagatctgaatacgctgctcaaggatattcacatccctgcagtcgaaattaccttcagcggcagtaaaaccgcccatgtggcagagttggtgatcgcaaagatcgaaaaggaacaactgcctgcggaagaggtgcacatcaatttctgcatcgacccgctggtcaagaaactgacttcgaaaggcagcttctgttcggagaacggtgccaaatgtttcgagaagatcgccgacctggttcggaaaaccaaaacctacaaaggtatccgcgtaatcacggtatcgggcgaaatcttcagcaacgccggctcgacgatcgtagaggcgctcgccttctcgctcgctgccggtcacgactacctggtacgcctgatggatatgggcttcacgatcgaagaggccgctaaaaagatccgtttctcgcaggccatcacctcgaactacttcatggaaatcgccaaattgcgtgcaggccgtatgttgtgggccaacatcgtgaaagcttataaccccgcgaagaactgtccctgcaagatgttcacgcatgccgtgacctcgacgtggaaccagacggcatacgacccctacgtcaatatgctgcgcggcacgaccgaagcgatgtcggcatcgatcgccggcgtacactcgctcgaggtgactcctttcaacaaggcatacgaagatcccaacgaattttcgatgcgcatcgcccgcaacgtcgaactgctgctcaaacacgagtcgcacttcgatcaggtcgtcgatccggccggcggttcgtactacatcgaaaacctcaccgactcgatcgccaacgaggcgtggaaactcttccgcgaaatcgaggagaagggcggctacaccgcagcctatgaaagcggcttcatcgtagagcgcgtcaaggcatcggccgcagccaaggacaagaacatcgcaacgcgccgcgaaatcctgctgggcgccaaccaataccccaactttacggaggtcgccggcaaggagctgaccgaagccgccgtaacccgccccgtgagcgaaggcaacacgctggctccctaccgtggttccatggcattcgaagccatgcgtctgcacgtggaccgcagcggcaaggcgcccaaggcgttcatgctgacctgcggcagcctggctatggcccgtgcccgtgcccagttctcctgcaacttcttcgcatgcgccggcatcaaagtaatcgacaacacgttcttcaaatcgatcgaagagggcgtcaaggccgctctggaatcgaaagccgagatcgtcgtagtctgcgcatcggacgacgactacgcagaggcggctcccaaagtgaaagagctgctcggcgacaaggcgatcctcgtggttgcgggcgctccggcatgtatgcccgaactggaagcccagggcatcaagaatttcatcaacgtcaagagcaacgtactcgaaacactgaagttctacctcaaagaaatgggtatctaaaaagcaaaaatcatgagagcaaaattttcagatttaacatatgacggaggcgagcagaagagctgctgcgcttcgaaaggctgcggccaaaccgaaccgtggctgactgccgagcagatacctgtcaagggctcctactcggcaaaggatctggaggagatggagcacctgaactatgcggcaggtatcgcaccgttcctccgcggcccctactcgacgatgtacgtgatgcgtccctggaccatccgccaatacgccggtttctcgacggccgaagagtccaacgcattctatcgccgcaacctggctgccggacagaagggtctgtcggtggcattcgacctggcgacacaccgcggctacgacgccgatcacccgcgcgtagtgggcgacgtcggtaaggccggcgtgtcgatctgctcggtagaagatatgaaggtgctcttcaacggtattccgctggatcggatgtcggtgtcgatgaccatgaacggcgccgtgctgccgatcctggcgttctacatcgtgaccggtctggagcagggatgcaccctcgatcaactgtcgggtacgatccagaacgacatcctcaaggagttcatggtgcgcaatacctatatttatccgccgaaattctcgatgaagatcatcgccgacatcttcgaatacacctcgaagaacatgccgaagttcaactcgatttcgatctccggctaccatatgcaggaggcaggcgccacggccgacatcgagttggcctacacgctggccgacggtctggagtacctgcgtgcgggcgttgcagccggtatgtcggtggatgctttcgcaccccgtctgtcgttcttctgggcgatcggtatgaaccacttcatggagatcgccaagatgcgtgcggcacgtatgctctgggcgaagatcgtcaaaaaattcaaccccaagaacccgaaatcgttggccctgcgtacgcatagccagacctcgggctggtcgctcaccgagcaggatccgttcaacaacgtagcacgtacggctatcgaggcgatgggcgccgctctgggccacacccagtcgctgcacaccaacgcactggacgaggcgatcgccttgccgacggacttctcggcacgtatcgcccgtaacacccagatctacatccaggaggaaaccaacgtctgccgcgaagtggatccctgggcaggttcctactacatcgaaaccctcaccaacgagatcgcccacaaggcttgggagcgtatcgaggaggtcgagaaactgggcggtatggccaaggccatcgaaaccggtattccgaagatgcgtatcgaggaggcggcagcccgcaagcaggcccgcatcgactcgggcatcgagaagatcatcggcgtaaacgaataccgtctggatcacgaagcaccgatcgatattctggctgtggacaacacggccgtacgcgagagccagatcaagcgtctgaaggagttgcgtgcgaaccgcgacgaagcagccgtgaagaaggcgctcgaggccatcaccgaatgcgtcaagaccggcaagggcaacctgctggaactcgctatcgaggccgccaaggtacgcgcttcgctgggcgagatttcggatgcctgcgaggtggtcgtaggacgttacaaagcagttattcgttccatttcaggtgtatatagttcagaagtgaaatcagatcccgcattcgaacacgcgaaggaactggttgccaaattcgcgaagaaggagggccgccagccgcgcatcatgatcgccaaactcggtcaggacggacacgatcgtggcgccaaagtcgttgcgaccggttacgccgacatcggcttcgatgtcgatatgggtccgttgttccagactcccgaggaggcagccaaacaggctgtcgagaacgatgttcacgtagtgggcgtatcgtcgctggccgccggccacctgacgctcgttccgcagatcatcgccgaactcaagaaactgggccgcgaggatatcatcgtcatcgtcggcggtgtgatcccggcacaggattacgatgagctgtatcgtgacggtgccgccgccatcttcggccccggtaccccgattgcgaccgcagcgatcaagatcatggagatcctgctcgacgagcagaaataatccggatcactcctctgttattatcaaagccccgcatcaaaagatgcggggctttttaatggggtaagcgaaccggccgaccgaaaaagaactttgccatcgaccttcataattccatcgccggcctcacctccagagtccgcgcaaatacagcggcggatctcaaacaacgaccgaatacatgctgtcacagtgccatttccacaaaccctacaaattatgtttgtaggccatatttcccgttagacagacagcgaatatcctccctccccgactctcgaaaacagccgatttcataccgcaaacacctatccggaaagaaactcgactgccgagaccgtcgttctcctcccccagccccaaagacttccggaatatacgataaaatcacggacatttcgaagatgcggaaaaagagaatggcggattggccggactaccactccgagcacctcacagaagagaattcaggaaaccggctcttatcgcttttaagaagagaagtcatccccctatgccatcgcaataacgacaataaaaaagaggaatgtataagctacatccctctttttcggccggaactattccggaaaaaatctaccggtaacggttaaaaatacttgccgcgcaagtcctccacattcgacatctgctccaggaaatcgaacagacgacgctgaatcatcccctgcgacgacgcctcggcacgtaccttttcagcttcgatactctgcggagtttccgcctcctgaatatccgtcaccacgaaaacataagcacctacatttcccttgaccggctcggacagcgtattcgtctgctccgttgcggtaatcgctccgatcacacgaggctcgacacccatgttacggataaagaacgatccgtaacggacatcttcgaaaggaacgacttcggtaccaaggttttgggcgacctcttcgatagtcgaacccttcatttcgctgacgatcttttcaaacttcttatcggttataagcgtctggcgaatattgttcgctactttctcgatcggcgtataatcctcattgtcgatctcagttaccactgcgaccacatagtcatcacccacagggaaaatctcggaaatcgcgcccaccttggcatcgtatgcccagcgcaccaattcacgcgaatcagccagtccctgcagcagacggtcaccctgcgtgagtttcgcttcacgaggagtgaggtttcccttattcgctgcctcgttgaacgcatcgacagaacccttgccctcgacagagaaaagacttgcctgactatgcacattgcgacgggtcgccgacgaagcctcaacaggataagtgatcgtcgcaaggcgcatgtgcttcgaaggtttgtccagacgataaacctgtaaaatctgaataacgtcacccacttcgacacggagaatatccccctgcttagccgtcgaaagaagtcccgaaagctcgtccgggaatgcagagaaaggcatcacgcccgcatcgcctccatttccggcatcctgcatatagagcgaatgggtacgagccgcctgtgcgaaatccgcaccttgccgcaaagccgtcatcagactgtcggccaggtcgcgttggtcgtaggtgagtacaatatggcggacgcccacggaatccggagcgttcaaagtttcaacgacacgggtcatcgtccaggtatcgttcttcaggacgggaccatactgcttgccgttggccagcgcttcggcctcatcgtccagaagctgggcaaccgaccgataattgtctgtaattttaccgaaacggttattcttggcaaatgctttcggatcgtccgacgcggcaaattcatcgccgacttcccgaacggtcttctccaaagtcgccatatcctctgcactcggagccacttcgaacaccacataagagagcgtgcgcgaaggtttctgctcataacgggccttatggctattgtaataagccttgatttcggaatcggaaaccgagaacagagaatcaggcatatcgtgataacgcttgccgacccaagaaccgctgaaagtcttattctgcgcatcgacgccttcttccgcttccagccgattgacatatacaccgcctttgaccaagccgttatacttattgatttcgcgctcccgcatagcctgtccgaccaaagccccccacatatattgcatctggggatttccggttgcctgggcgataaaatcactcacaccctccacactgtactgtcctgtacgggggtcggtgaaagccgcagccatcgtcccggaataatactcgccgctgataagtccctcacgctcggcatcggtcaccgagattcccatcttctcgaaaccgggcaagtacacgtggttggcaatcagagtctgccaagccatttcagccaactgatccatctgctcttcattactttcggagatgttgctctggtctttcaggttgttgtatacctcaatatattccgaatatctgatcttcgaaccgtcgatcacaccgaccttggggtcgttacccgaaagtcccatatccgttttaagcgagagaatgaatgccagcagtgcaaacgcgatgataatcgacaaaaccacaccgaatctggtccgtaacgtgtttaaacttgccatataaactattttaatttattgtttcaaaatgagtgttcaaagataataaatatattctgaaaaccatgataaacgaccaaattctttcgtcattttccgcatccggcatatcgaaaaaacgcacttgcccctcaccggtcgaaaatatcccgtaaactacaaccgtttcacgcgcgccaactccaaccgggaacgggtcctgcgcagaatcttgatctcaagatgctcgaaacgcacggtttctccggccgccggcagcccttcataccggaaaatgatatacccggccagcgtttcgtactcgtcactctcgggtatggcaagcccgtatttttcattgagatattccacttccaatcggcacgaaaggacaaattccgaatcgccgacctgtttctccgtaaggtcgggcacatcgtgctcgtcttcgatttcgccgaaaatctgctccagaacatcctccaaagagataataccggccgtaccgccgaactcgtcgatcacgaccgcaatattgctcttatgacggatgagccgctgcatgagtgcttgcaacggcatcgtctccgggacgtattgcacctccatcagcacctcatcgatcgacgtcggatgccggaacagcgacttcgaattgacatagccgacgatattatcgacactctctttccagacgaaaatacgggaatacttactctcgacaaaacgcgccgtaagcgctttgatcgaggtatcatcgatatcgaccgcctccatatcgatacggggaaccatgcaatccctcacgcgcaaatcggcaaaatccagggcattctgaaagagtttgatctcattatccggttcatgctgcgcctccggcttccccgattcgaacaagctggccagatcggtccggtcgaaaatgggctccatcatcgcaaccttcggcttacgccccatcagccacaaaatcccctgggaaatccaggtcgtcagcttggcgatcggaaaaagcagcagataaaagaaatagatcgcaggagcaaacaggcggtaataaaaattcgggctgttccggaaaacggatttcgggagaaattcggcgacgaagatgatgatgattgtcgaaaccgccgtttccagaacgacggacccgccgcgagcgatctccgtccaacccactgccgccgcgagcgagcgcaacaacagcgacatatagagcgaatagataaccagggcgatattattcccgaccaggatcgtcgtgatgtactgcccggggtgacgggcaaaaatgtcggcgatgaaattgaacagccgactctgcttccggtcgatctccagtttcaggcggttcttgctcgtaaaagcgatctccatccccgaaaaaaaagccgaaagcaacaacatcagcagaattataaacaccgaagttatcataaggaacgatcgttactttctacgggagtcagttgaattttccggtcgttcccccgtatcggccgggccggtttgacaggctgttcggaaactgcctccttcgcagcggaaacattgtccgcaacgggtttcaccgacgtagaatccgcgtcccgtgtcggctcgatattgacccacatacgccctttgattcggcgaaatttccagtctttcaactgatcgtccgactcgaatccttcgacgatgtaggaatttccgctctcttccacgatcttggaatcgacgttagaccagatccggcgcgttttctcgttccagaacaactgctgggtgtagagctcctgtccgttggattttttcactacgacatttcctttggcttcccataatttccgattcccgtaatgaatcgcatagttagccgttagcgtagcatcgaccgctccggtactgtccttctgatatgtcacgatatccacgcccttgcgaaattcctgataaggctcttttgccaaagagtaaccttccaccaaaggagccgtaaaaacataggatttccggccgttctccgtattggtcatcgtcaaatgctcgctgtactcggtcatcaaagcctcatcgttaggctcttcggccaccgactccttgtcgcacgaatatagcaagatagcacttcccgcgatgagaagtgctacctgtgcatatcgttgaatgcttcggagcatcgttcgtacaaactatgtcgctaccgggggcgtacggtcgtcacgataccgcgggccggaccgcaggtaatcgtataacgtgcaccctccatcaattcgttgaagaagcattcctcggcagtcgggaatccgcgacggtagtttgctgccgcatcacgcgccgtctgagcgaaattgccggcatcggcgtcgttggcaagcaggttggctgcctgcgtcatcgtatcgtaagcgacccagaaaatagcctgaccctccagtccggagcaagatgcagccgaagccgcataagcctgcgccagggcgaaataagccataccgttattgggattcagcgccttggcctcattagccgcaactgcagccgccgtaggattcttggctgccagttcggtcatactcaaacgcaccagaagcaattctttctgaacggcgtcttgttcggcagcaatcgcctcacgcaggtaagtagtcgatttggcgaagtcgccccgctcttgaaatccttgagccagcatcatggccgtctgggcagaaggttccatcgcataatatttttcggcgatctgaaggaaaaattcggaactgcactgcgaacgggacatcagcgaaaccgtctgcttgagcaactccatatcctccggagccgcttcgatacgcggacggaacatcttctccaggttctcgcaatcggcagcaccgctacccgcaaaacaagtatcgaactgtgttttcgcctcctttactccaggagcatcactctcgaaaatcggggccagacgagcgtactcatccaaaacggcatccggatagacctcgcccatcttataatcatcgcacaaattgctgaaatataccaatgcgacatccggcagcgcagcataaccgctctgcaaaccggcttcgatcgcctccttatacaacttgcgcacgccttcccggtcggaaggattgaaagtcaggtattcacgagctttacggtcaaggacataagccgtaccgtaattgggactggaaggaaaatactgtacacgcaggtcgtaaatcatcatcagcgaatcgagcagagcttttttctcattcaggtcttgtgcgcgttgcaccttgttcgaataaacctgtgccccccgaataaaggtcgcttcgaaagccgaaggagcctcctgtgcaagcgtacggaaataaacagcggctgcgtcgtaatcgcgggtatcgacagcttccttcagcaggttgctcgtcagaatgttttgcttacgctgttcgggcgtatctccccacggagcgtaccgagggtcactgaaatcctgggcgatcgaagctgtcgcagcgaacaccaatactgccgacagcaaaattttcatgcgattcatattctatctttataatttattttttatgtgtggtttaatcgtatttcggacgaacgaaccaataatcaccgaacaatgtcacacccagcgaaaatttgcaataggtctgtttaaccagactcacctgttcgttgatcgccttgaaactgccgcgtccgccgacttcgacacccagatcgaccgacgacgcacccaatatgccgcccaacaccgtcaggggaataccgacgcccagcgtcacggcgtattcattgacatccactccgccgaaagtctggttataggtaccataacgaactccggcccggtaggaccagcgtttcaatgcgctgcgtacatccgctttattgggggtgtattcgaccccgagtttaaccgtattcgtgttccggtaagccacatcgaaaccggctgcggatttctcgaccaaccgagaattgccgcttcgccagtcctgatagacgtaatccgcccccacagctattttaggcgtgttgtaataaatacctacggcaacctgctggggcagcttgagccccagacgatttcccatatccatagcgaccgtattgaaaatatcgccggtctgcaccttcgtcgtcacattcggattcaagtcgccgccgatatcgtaggtcgcaccgatcgtcagaatacgccgacggttgctgatcggggaccactgtacgccgaactgtcccttaaaacgggaaacgctgtaggtttcggttcccgtcgcgtctgcgataagacctcctccggttatattctccaaaatagcggttttataaatccgctgaatgtcgccccaatagtactgggcagctattccgatcgagaatccgcggaagatctcccagcccagaccgagcttcacctccgtcacgtcgccgtcgccgtcccactggtactgcacgcggccgatattaccccagatttcatcgtcgtccacctcctgtttcatccggtaaccgacgctgctgtaaggcgtcaggctgaagcccaaccccaaatgcttggcaatcggcaactgaaacgcaatgtcgtggaaattgaccgtataataacttgtattgagcgtctgcccgtaatatttctgggaattgtaaaagcactgcccttcaagaccgaaatcgaaaaggaacgacttggggcgcacggcactgtaagccgccggattgagcaaattgacagcagccgcattacgcataccgacgccgacaccgcccatcgaacgtgtctgaagcgttcccggggtccgcagttcacccagaccgtacatcgaatacggtgaaaaagcgttgatactgctggtttgtccccatgccatgcacggtacaatgacggccagcgcgaggcacagtttaacggcggctttcttcacttgcattatactctaaaattcggttcagccccagaaagaccaaatcacaatgtgcaaatatcgtatttttaattcgtttaacaaagaattttgcatccccgccggtaaaaattatcgacaacgcatcgatttccggaaacagccgggcgatatacccctcgatttcgaaggcaatgccgttcatcacgccctgccggatcgcctcgacggtcgaacgccccaaaagcgtctggtcctcacaggattcacacaggggaagcgccgccgtataatcgtgcaaggcccggaagcgcatctgtacgccgggagaaatattaccgccccggaaaaccccgtcggcagaaacctgatcgatggtaatggccgtcccgaaatccacgatcaacagattgcggcccgggtagagcgacgcagcgccgacggcagccgcaagacggtcctcacccagagtttcgggcgtagtgtaaccgttacgaatgggaagaggaagttgcggtgagagccgcagacagcgcccgatgcggcgacgcaccagcgcgacggtgtcatcgaccggaccgcgcgtagtcgcaacaatagcctgcgtaataccgggatgagcagcaagaatccgatctatcaccgcttcgtcgaactcttccgaacatccgtcggaaacgacggtaccgccgtcaaatacagcgtacttgacccgcgtgttacccatgtcgatcgtcaggttcatcgttgaattttttgcttcgttctttccgtccggcacggccgctctccaagttcactgcggcacgaatcgttcacaaccgtccggattcagtttttatagcagttatatacttttcggttaccacgaccgttctcttaccgatttcggcggcaccccacaaccctgcggagcgttatgccgtcctccgaccctctcccgagggaggaacttcgggaaaaagacgaggcatatcggtcgcgttcgggcaagtccatacatcaaaaatactccccagctctttctacaaagatttaagcacctcgtatcccgctgcgacatccttaatccccctaacggtcatcgccaggcgattattgtgttgcttgagaacaaatcggtcggggcgctgcgtcactttgcgcaaaagctccatgaacgtatcgctcttgtagtaaggagaatcgtcgtcgcctacgaaatggacgatcatcaagccgtttttgaccttcacgcgctccatacccagccgcacggcctcccaccgcaggcggaccacattgagcagctcggcagcgggccggggcaacggaccgaagcggtcgatcatcttggcctcgaaactcttgagcatctcctcgttgcgggccgtatccagctcccggtacaagcgcagtttctcggcgggctgctgcacgtaggagtcgggcagctcggcctcgacgtcgatctcgatcacgctatccgaaatatagctcatcttatcgaccacgccctgctcggcatcgctcatgccgggcatctcgagtccctccgagcggagttcggcgatcgcctcctgcatgatcttctggtaggtttcgaaaccgatgtcggcgataaagccgctctgctcggcgcccaacagattgccggcgccccgaatgtcgagatcctgcatggcgatattgaatcccgaacccagatctgagaactcctcgatggcccgcaggcgccgccgggcatccggagtcagcagctcgtcgccgggcgaaagcaggtagcaatacccccgctggctgccgcgtcccacacgtccgcgcaactgatgaagatcgctcaagccgaaattctgggcattattgacgatgatcgtattggcgttgggaatgtcgatgccgttttcgacgatcgtggtcgaaatcaacacgtcgaactccccgtagataaaatccataatcagcttttcgagctgttcggccggcatcttgccgtggccgattcccacccgcgcccgggggcagagccgagtaaccataccctgaagcgtcatcagatcctccacccggttgtggacgaaatagacctgtccaccccgatccagctcggcattgacagcgtcgcggataatctcctccgaaaagagatgcgactcggtaatgatcggctgtcggttgggcggcggcgtcgagatgacggagaggtcgcgcgaccccatgagcgagaattgcagcgtgcggggaatcggcgtcgcggtgagggtcagcgtatcgacattgacgctcatctgcgtcagcttctccttggccgccacgccgaacttctgctcctcgtcgataataagcaatcccaggtcgtggaatttcacctgcttgcccaggatcttgtgcgtaccgatcaggatgtcgatgcgaccctcggccagctcagataggatgcgggacgtctctttcgaagacttggtccggttgagatattcgaccttcacgggaaaatcccggagccgatgtacgaaggagcggtaatgttgcagggccagaatcgtcgtaggcaccagcacggccacctgcttgccgtcggtcgcggccttgaacgccgctcggatcgccacttcggtcttgccgaagcccacatcgccgcaaatcaaacgatccatcggctgattggactccatgtcccgcttgacggcctgcgtcgcggtctgctgatcgggcgtatcctcccacatgaacgaagcttccagctcctgctgcaaataggtatccggcgaaaaggcaaatcccttgctggctttgcgcttggcatagagggcgatcagttcgcgcgagatgtccttgacggccttcttggtcgcggtcttgagcttctgccaggctccgctgcccaatttgtagattttgggcgcttcgccttcgccgctcttgtatcgcgaaatacggtgcaaggcgtgcacatgcacgaacagcacgtcgttatccttataaatcaatttaatagcctcgtgcaccttgccgttctcgttgatcttgaccagaccgccgaaacgccccacgccgtgatcgatatgcaccacataatcgcccatgcggagctgattcaactctgcgacggtcatctgctcgtcgcgcttgatctcgccgttgatccgatagcgctggtagcggtcgaaaatctgatggtcggtatagaaacaaagtttcaggtcgtgatcgacgaaaccctcgtgcagcgtgatcggcagggggttgatctgcgcctccttacgccccgactggtagaaaatgttctccagccgttcgagctgcgcccggttttccgacaggatataggttttataaccgcgctgtccattggaaatgatgtcgtcggccagcaattcgaaattcttgttgaacttgggctggggagccatgcggaacgcgaccgtcgcatcggccggccgctccttcaggctatcacgcaattcgaacaaacgcatcccggccatgtcctgcaacaacaccttccggctcaccagatgggtgtcaatctccgcaggttcctccatctcccccagaaccttgcgacgcagatcgttcacgcgccgcagtacgtagtcgggatcgaaaaaccagtaagtcgcctctcctgcaaatgcgagcagcgaaatccgatccccggcaaaaccgttcaggttcggaacgatctccacctcgttcagccggtcggcggaaagctgactggaaatctcgaatcggcggatcgaatccacctcttccccgaaaaagtccaaccggtaaggtttgctctcggaaaaggaaaacacgtcgaagataccgccacgcagcgaatactgtccgggttcgtaaacgaaatccaccttcgtgaaccccgaatcggccagcaactcctccagctctccgatcgccagccggtcgccgaccttcacccgcacggtttcgcgccgcatcgagtcggggtcggtcacccgttcggccagagcttccggataggtacagataatccggtattcgcccgcagccatttcccgacgcagagcactcaacgccgccgtccgctgcacgacaccctgcgcatcctccgtaccgtaaacgatcgaacgcttgtaggagcccggaaaaaagtaaacctgtttttcgtcgagcagggcataaaaatcgttgagcaggtaggccgccgcatcgcggtcttccgccacgaagacgtgcgtaccgcccgttcgggcgatcagggcagcggcataaaccgagagagccccgccgaccatatcgcgcagaagaacggtccgccccgccgaatcgtacgcacgacgcatcgcgccgagaggctccgctccggcgatcaactgcaagatattcggtttatttccgggacccatattccgcccagctaaaagatgccctgcaggaatcgattccgcaaggcgctcaaacgattattcaactccgtgtattcgtatcggctgcagatcgtacctgcgaccgaacatgtatgtctttccaccttccgcctttgtccggctccggacttcgtccgccttccggccagtaaaaggggccgaatcccatccggcacatcgaccgagtccatgcctccgcccctgcggcatccggtatctctaatccttatacaggtctttgccctccttgtcgtagtagtggacatcgacgataccgacgctctggtccgccacgatcttcaactggatcttatacttccacatccagcggcggcgcaacgaccacaggccgtgattcaagtaggtcgaaacgtaagggctgacgcgcaacttgatatatttgtgccccgcatcctgggccagataggagatcttgttctcgatcttcttgtcgagcagaacggtcggctcgatacgccccgtgccgttgcacgtgggacagacgtccgtaacatcctgcacggcgaccggacgcacccgctggcgggtgatctgcatcagcccgaacttggtcagcggcagcaccgtatgcttggccttgtcggtggccatcagcttgttcatctcctcatagagcaactgacggttcgcagccttgtgcatatcgataaagtcgatgatgacgataccgcccaaatcgcgcagacgcagctgccgggcgatttcgcgcgcagcggccagattgacatcgaaagcagtctgctcctgatcgtcctcggccttggtgcgattgcccgaattgacgtcgatgacgttcatcgcctccgtatgctcgataatcaggtaagcgccccggcgcaacgacacgtacttggcgaagagcgacttgatctgcttcgaaatgtcgaaattgtcgaagatggggacgttgcccttataaagttttacgagtttctcgctttgcggttcgatctgacggatgtagttctgaatctcatggtacatcgcttcgtcgtccacgacgatctgcgaaaaggcgcctcccaacgaatcccggataatggtgttggcccggttcatctcactcatcaactgggccggagcagggttcttgcgaatattttgcagggtcctctgccatttgtccaacagggagcggatatcctgttcgatatcgctgtccttggcctcgacagccgccgtgcggatgataacgccgaaattcttcggcaaaacggcggctgcaatgcccttgagccgcttcttctcctccgccgagcggatcttctgcgacaggaacaccttcgacgaaaaaggcaccagcaccacgttacgtccagccagcgaaatatcggccgtcagacgcggtcccttggtggaaatcgcctctttggccacctgcaccataacggtctgccccacctgcaggtaggagccgatcttgcccgacttttcgatcggcggctccagcttcatcgcatccaggcggattccccgcttgccgggctggtaactcgccaccagcttctgcaacgaagagaactgggagcccaggtcgagatagtggataaaggcatccttctcatggccgatattgacgaacgcggcgttcagccccggcatgatcttgcgcaccttgcccagataaatatcccctacggcgaatcccgtctggcactgctccttgttgagctcgaccagcaccttgtcctcgcacagggcgatcgaaatctcggtcgggtttacattgactattaattctcggttcatatatattttcgtcccgcagaccgcggcgacgattctgacattatggggtttgcggctgttcggcgttcgggaagcacagcccggcttccattgttttcaactcgcctggtccgtagaggacgatattgcggcacattcccttcgcaaaaagcctcttttggcttttcgggagcggattcgatatacggtgatacgttcacaaacacatcgtcctctccttcccgacgatccgacacatcccgccctgcgaacggagcgggaatcggaaaacaggtaaagctaaaagggcctcgcacccttttagctttatctaccttaattagcactaaggcgtactacctactttttcttgtgacgattcttgcgaagacgttttttacgcttgtgggtcgccatcttgtgacgcttatgtttctttccgttcggcataactgtaattgtttaaagtttctattatttatttaacttttgccgcaaaactctttgcaggcttgaaggccggaatgttgtgggccgggatcgtaatggtcgtattcttggaaatgttacgagccaccttcttcgcgcgttttttcacgatgaagctgccgaaaccacggagatatacattgttgttctgcgccagggaacccttgatgctctccataaaagcctcgacgatagcctggacctgtactttttcagcaccggtacttttagcgatttcgctaacgatatctgcctttgtcatactctttatatttataagttaaactctatttcgggactgcaaatataagttttatttgattatatcacaacaaagtagaacatttttttgcaattcacctcgcccgcgtcgcgccgcagttcgaaaccccttactcaaataccgggccataaaaccgcgcttcgatacccggcgggccgaccggagccggaccgtatcgaagaatatccggaaaaaggcaacgcattatcaaacaacccgatagccggaaccggacaccgccgcccgaaagtttcgtccgtcgggcacaataaattgcccgaaattcgcattgtataattggtaaaatcactatttttgtagaagataggatccggttcggcaatcccggcgggcaagcccgcaacctttcactatctttgacatagtcttagatagaatgcgcctcgggaaaccgggacaggttcccgttttctcccggctttcactatctttgtttcaactaaaaccgcgaatatggtcaaaatactttgggtggacgacgaaatcgaactattgaaaccccatgtgcttttcctccggggaaaaggttacgaagtcgatacctgcaacaacggatacgacgcgatcgacatggcgacggagggcaactacgacctcatcatcctggacgagatgatgccgggtatgacaggactcgaaacccttccgaaaatcaaggaaatacgccccactactccggtcatcatggtcaccaagagcgaggaggagaacatcatggacaaggccgtcgggtcgaagatcgccgactacctcatcaaacccgtgaatcccaaccaggtgctgctctcgatcaagaagaacgtccactcccagcagctggtcaccgaacagaccacggccgattaccgggcggagttcggacgcctctcctcggcactccagatggccgacagtttcgccgactggtgcaacgtctatcgccggatcacgaactgggagatcgagctctccgattcgaccgaccaaagcatcaaggaggtcatcgaataccagaagcacgaagccaaccaggagttctgcaagttcgtccgcaggaactactacgactggatcaacaagcgtgacgaaaccaccccggtcatgtcgcatacgctcatgcggtcgaagatcttcccggtggcagacgagaatcccaagaccacgctgctgctgatcgacaacttccgctacgaccagtggcgctcgatcagccccctgctgcgcggctactacgacatcgcggccgacgatttctactgcgcgatcctgcccacggcgacccagtacgcccgcaatgccattttcgccggcctgatgccgctggccatcgacaagctgatgcccaacaagtggctcaacgacaacgaggagggaggcaaaaaccaatacgaagaacagtttctgcaacggctgatgacctccagcggcaagaactacaaatacaccttcgacaaactggtgcgccccgaggcgggccgcaagctgatcgacaacatccagcggatttacgacgccgacttctcggtgatcgtctataacttcctggacatcctctcgcatgcccgcaccgaaacggacatcatccgcgaactcaccgaggacgaagcctcgttccgctcgctcacccgttcgtggttcgaacactccgacctgctgacactgctgcgcctgctctcggaacgcggacacacggtaatcatcacctcggaccacggcacgatccgcatcgacaacccggtgaaggtgaccggcgaccgcgaaacctcggccaacctgcgctacaaaaccggccgcaacctggcctacaactcccgcgaggtatatgaaatcacccgcccggaagacatccagttgccgtcgatcaacttgtcgtcgagttacatcttcgcctacaacaccgatttcctggtctacaacaacgacgccaaccgttacatacggtactaccgcaatacttaccagcacgggggaatctcgatggaagagatgctcgttccctacatcgtactaaaacccaaacaataaatcatgcagaccatccacatcgactctctggacgaattgccgcacgcagcggccgccgtcataaacgcgctcgaaggacgctcggtcgtcgttttccgcggcgaaatgggggcgggcaaaaccaccctgatccgggaaatcgtcgcccggctcggagccgacgacacagtgacaagtcccactttcgccatcgtcaatcaatatacgacccgcgaagggaagaatatctatcacttcgatttctaccggatcaaccggctcgaagaggcttacgacttcggctacgaagaatatttctactccgggaatctctgtctggtcgaatggcccgagaagatcgaagagctgctgcccgaagaggtgatgaccgtgcggatcgccgtcggcgacgacgaagagcgcacgatcgaaatcgactgactcccgattcggcccaatatccctgtatagtacttctcaacacagacttcccgccctccggctccagcaggcgagatcatccggcacacggttgcaacagagagtgtgtgatccagcccggctcgaacgaccgactgccgaaacgaatatcgggcgtagtaagtttccccaccccgcaacgtgaaacgggaaggagtcgggaacccgccggtcagattcggctcgctacactttatcatccttgcagcaaatagggggggggcaggctcaaacgaccgacattcgaagcatacgcagaggacacttgtgaactctaccatgcaaggaataggaaaacagaaagttaagtttggattagcgctcggctttcactatctttgacatagtcttagataggatgcgcctcggaaaaccgggaacaagatcccgttttctcccagttttcactatctttggccccgaaaaataagggcttcgaaaaacggtcgcccgggaaaagcgaaaaatttgcaaaaaaagacaaccgccgcttttgacgacaaacacacgacaatggaaaaatacgaatcgaaacaccaacagatactccgctcggcggaacagatttatacggtcatcagccgtttcgacaacctcactcctgcggtgcaggacaaggtcgaagagtggcaggccgacgaaaacagttgttcattcaaagtcaagggcttcaccgtcaatctgcaaatcgtggccaaggaagctcccaaatacgtcaagatacagagcggcgaagacggcgttcccatcgacttcaccttctggatccagttgcagccggcaggtccctacgatacccgcatgcggctggtgctgcacgcggaactgaatatgatgatgcgtatgatgatcggaggcaagctccaaaaagcgctcgaccaaatcgccgaagccatggccaaagccatgaacggcagcgcgatgtaataccgatgtaatacc

SEQ ID NO: 10422 - DNA, 8596 bp, Unknown
  gut microbiota DNA sequence
ggtttgtttgggttctttcggctggccgccgcaaacaggtttttcagcagtacctcccgttgctcgtcggtgtatcttgtaaatccgttgaaataggcatcatagtagtctatgattatctgctcgacaatgcggaactcaatttcggggatttggctgtccgaccctttccaaatcatcaggataaggttcttgaggaagtctatcttctcgatgttgtattcctcccggttgatgcgaaacggattcatcgtgataggccgttcttcggtatagctgatatacttgccgcccagatactcgcacagtccctcgtatgagtttcccgtatcgaccatgaccacatccgttccctgctcatggagctggcgcacgaccgagttgatatgaaagctcttgccactcccagaaggccccagacaaaagaaattcgagttgtccgtcagcttgttctttccctcttttcccgtgatgtcaatagccaccggcacaccctgacggtcggtgtagtaaatcttcagcggtgtttcctcgctgtgcagcacgcgctccttgtacatcaggcacatcgccgcatcggaaagggtcaggaaacggtcgtattcctcattgagcgtgtagcagttgcccggaaacgaaccgacgaacagttccagttggttgtacgcccgcttgctgatatggatgcccatgcgcccgaatgcgttttccaagtggttcgtacacttttgcaggtctgcaccggcagatacggctaccaccatgttgaagtgcgtatataccagttgcttgctttcacgggcaatgacctcctgcacacgcttgatgtcctcgaccgccatctggttgttcgggttcggaatactcgcgtggcggttcttctttttgtcgagcatcgccagttcccgtttttggttgggtaggaagatgacttggttatagaccaccgtctcggcgtccggtatgttgtccaccaccgaagccagatcgaccggcatttccgtgttgttcacctcgatgttcgtgtacggacgtatcatcgagggcagtgcggcacagtccacgtccacaaggctgtacaccttgcagcgtttgtcgcccatcgacaccgtttcatcgtccgccttgaagttcgtcatcgacacggtgcggtctttgaagttcatggcgaagtagcggtcgacatactcgctcgcctcggctttgttcaggaacctggcctgtacgccgctgtcatgcagttggtcatgcaccttgcggattttcacgaggaaatcgcgccacttcttgttgtcgaacgagaacaggcggctctttttcgcctcctgcgtgatggtcaggtagcaaaggctgtccgtgtagggacgccctttgaagtagcggaaatacgacgccgacaggaactcctgcccgtcagccggttcgcttgcaaactgtttcctgacgaagatatcctgcttgtggatggcgtacccttcgcctaaggtctgcgcaagggcggtgaacaggtgcgtgaagtcgtagtagctatctatgtccgccgaatatttctgtaccggattctctatcttaagtacggcggaatattcgccggtcttggtgtacagcacacccacaccgtccgtttcctccgctgagaaatagatgtcctgaaagattcgcttgcgcttgccgcccgtaccgaacgcatagaccgacaaggccatacccgcgcacaaagcgacaaaacataaaatgatgtatagggtcatttcgatatacgtgtaattaaataggggcaggttcgccttgcttcaagacaaacccgcccgcgttcaacaatcaataaagccatgcacattgccgtgatggtttttctttcgtcagatcttgcgcgagtgggcatacacatacacacccggagcgaccttcttgctatgcagtcctttccgctgtttgagaaggatgagcacgataccgaccgatacgacggtagccagcacgacaagcccggcaatgaaaccgagcaggcagtaggcggcgacaaagccgacaatggctccgcacgtcgtcaccgccgcccaatatatgtaccggccttggatgcccaaaaactcaagaggccgttgcagtcccttgaacagcggatagtccggatagcgttcgtccttgcttttcatacttatccttgatgtttaagcggcaataccgaagaacagaggcaacgccttggccgccgcaatgaggaagatacatgctcccacgaccatcataatcttcttcttgacgtcctgctcctcgttgttcatggcgatatataccgagattgcacccacgatggccacaacgccggcaatggcgtagcacaatttcaccataataggcacatacttggcaatctcatcggcgacagtggataatgcgctcgtaccggcggaatagtcgcctgcggagttctgcgctttcgccaccatgccggacagcagcatgaaggagaacatcattactttggtagggattccgttgacgaatccgaatgccttgcggcacagctgtttggttttctgaaacatacgtttacttttttagtgaatattttatttgtctgcgacctgatacaagtaaggttatatgcggtagccgaagaaagccgggaaaacatagaatgccccgatcaggaacaggcacgcgccgacaagcgtcattatcgacttggtgatgccgtcctcgcccgtgttcatcttgatgtatatctgacaaacggacacgatgacgtaaaccccggctatggtgcaacagatatactggacatagagcatcatcgtcaccacgaagtcgtgcatcgtggccaacgcgtccgctccccagctatagttcacgctgccgcttttggcaaaagccgtgtaggggaacgggaggcacagcgcacatagaatctttttagctttcgacatctcacaaccggtcttgaattgggttccactttatttccggtcggttgtctaaccgtcccttggaaatcatagccttgtacatctcctccgacgtgcgtgcgtccgacaggtaaggcgtggtctcttccatctgttcctccgcctcggccttcagccgttccagtttctcctgcgccgttcccggtttgtccttgatgtcctcctcaggggatgtttcggaagaggtagccgtactttccgtctcgtagttctcgctaccgatactgaagccgctctcgctttccgtgacagccacactctcttcctcttccggtgcgccgaggtcgaaaacttcctcgtccggtttgtccgtcccctttttcccgtagaggtcatgcgctatgatgacggcgtagtaaatgatgtaggcaaccgtcaggacaatggcaaaaatgaaatatgagttcatgtatttagtatgaatattaaaaattcgtattagtatgattttgcaaagaaacgcacgaaatataaaaccataaaataattgagcattaaacatctgtttcgttaatgagatttgtgtaagtttcaaaaatcgaactattaaatcgtactatattgcagtctctatggtgggaaatggagaaatcggggcataaaaaaagctctcgtggtggagagctttaggtggcaaaagagaacattgaatatcagcgtttctttccgcgcaggtagtcgttcaggtctttgtattccgcatagtggcaagattcatcgctgacacgtccgccatacatcccggcaatggtctctgtggttctctgcccggcaaggtcattgtcgagataacagtgaatgtccgaatactcctgtaaacgtgccagcgtctttttcaaattgtttaccgagttcatcacgaggtagtcgcatggtatggcaagacagaccgtccggtcgcctgccagtttcagtgtcatataagaaagaaaatccatgaatccctcgaagacacagacgttttcctgtgtctcttctgtcagatgtcttatcaatgagatgtccttgttattcaggcatcccttgtaataggcgtttcgcacctcgtaaccgcctgatatattgccgaatgcgagagcgaagtaatgacggcctcgcagttcgtaatgcacctccttgcaatacatacggctgatgtccgcgtcgataagccgggattggaggtaagagaacagggcgtgatgacggagtggaatcacgatcacgtctttcatttcagcctccaccggtcggggtggagcggtcagcatacgggttctcggtagtgatgcgccattcacaagcctctctatatacgccagggcctcgctcacgcagtccgtccggcaaatgtattttgccagttccaccaggtcgccaccggtcgcctcgccgaaatcgtaccattcattgatgcggtcattcactttgaacgacggggtacgctcgttccgtaacggtgagagataccagtattgtcccgattttatgtgctgcgtatggtgaccgagacgtgccagaaaatccacgatacgcacttgttttgcttctgctatggtcatgtcttttttctttcacttggtttcacgaaaatggtttagtttagttttttcctatatatataaatactaaagtaaactaaatcatacaggcccgcgcccggcatcattcttcatcaaaaagcatggcctcggtaggcgtcatgtcataatagaacagcttgtcccgtttgatgatgagcttgaggttgtctatcaggtattgcatcagttttatcatgacgctccgaccacgtttgaacccgattgcctcataggagaccatcaggctttgcaacaggttgtcgaatccccggataggcttttccccgaaagcggcggagagggcttcctggtgctgttcgatgctcagctccgtgaaccccgtccgagccttgggcttcgggggctctccgaacgagtgtccttccgcaatgacgggcagcccagtctcgttgatggtgaacgcaaacggcttgaactccttttcccggatatggagcgcatggacttcgctgataccgggattctcgttgctcttgctgatgacaagcacggtttccgccttgttgctcatttccgtaccaatgtgtccccgcacattattatcccctttgttcaaatggagtacacaatggatatgcaggtcgtaccttgaagaccattccatcatccggttgatgacttccaccgattcaccggtgctgttgatgtcaagcatcaggtcgcggatgccgtcaatgatgaccagcccatagcctttgttctgacgcagcgcatagtcgatgacctcgacacgcaccgacggcgaatattcacgcaggcagaagaagtcgagattctccgggtcggttgtcgtgggcagcccggccagccgcaatatgcgctccaataccgagcggcaatggaaacggctctgttccgtatcgacgtacagaatccgctgtttgccttcgggcagatgcgcacggtagttcaacacttgtttcccggccaatgaagcggcgacaagcgcagagacattaaacgtcttcttcgactttgcctttcctgtcgatgcactgaaattgccgagcgtggcaatcgtcgagttgtctatccagatgatttgcggcggggtctcataaatgtccgttgccttgatttgcgaggccagaaggatgtccgacaggcggtgttcatccattcccatatcggctgagcggtcagtctttctttcgttttccattgcgtctcttattaaggaacggttctgtggcggcggcttccgtcgccatgcgcacggcctcgttcactgtaggttcataattctgcaacagccattcgtccaattcctccttggcgaaatagaccattttaccgcgcggtttgtagtgcggtatctccttgctcgatgtgagcttgtacagcatactttcagaaaccccgatatacatacaggcttcctgaaacgtgaacactctcttggtcgtgaagatggtattttccagcaacgtgatacgctccaagagactttcgaccggttccaatttctttagtaccgattcgatggcggcgagccgtccgctcatccgctccatgaatgtcattctattcggcataataacatggtttgatttttgacaatggagatgcaacctccgttatgcagcgcgctaacggaggtcaaaggtatgtccggtaaacgaagatgccgtgatttggggaatgatactatgcgcgtatcattgcaactctcatgcttttacctttcacatacttcgcttcttgtcacttcctgtcattctttcagccggtcaatggtctttcggatgccgtatgcgaccgatgtcatgttgttcttgatggatgacagcgcggaagacagggtcgataccgaaacggaacgtgtcccgtccttggactgcaggaatgcacccttgccgagaacattctgccaccgggactggataagcgagttttcaagaagcgcgtcgaacaggattaccacacggcggatattgttcactcggatggaaaagcctttcttacaggcgaaaagagcctccatgtcttcaatgcgtacagaaacacagaacagatgataagtattggcacaagccacaatactttccatctgttccggggtaaaatcacagccaaaagaaagggagagatctgccggtcggtcaatgtggggcggaccgagcggaggcaacgattccgaggtatcatacatccgtttcagcttcatgcactcgtcaaacgtgaaattcggcgtagcaaagcaaatctggacgaaacgggcgtactcggtcagcagccccttgacgatgtggatgttcatttcgtggcagttccggcaggccgcatggtcgcagtctatgtaccggtgtccgtttacgaaatcgtccacataacggtggtactgtttaccacccgacacaacatcgtggagataaactgtttttgcttcggttagcagggcgaaaagttcattcgccacatccttctccgcagcgaagtgctgcaggtgttggctccctccaaaaagagagaaggccgtcttcaggtcttttcatgtcgatttacctttttgagtttataatatgtgatgaaagcattaacttcggttgcgttcacaaccggagcaatgccataaattgatgtttgtaaattagacatgaaccacatagtgccgtcaattagtgaaacaaaccgtttacaagattcactgcctcgtccttcttcttgttgataatcttggcatacacctgtgtcatttttacgtcggcatgaccgagcaacttcgagacggtatataaatccgcgccgagcgtcagcatcatggtggcgaatgtatgccggctggtgtgataggagaaccgcttggagattccggctgctttcgcccaaggtttgagctgcatcctgattgtattggcggacggcaggtcgaacacattatcttccgatgattttcccccacgttccggcatccacttcaacgcttcaggagagaggggcaggtaaataggctctttggtctttttcatggacacggccaaacggtactgtccccggtcaacgaacacgtctttccatttcaacttgattatatcgctgatgcgcaatccgcagaagcaggagaacagatacgcgcattttactatctcgtattcctcgtggggcataggagtgtcaatcaacgcctgtacctcttcgatggtcatgtacgaccgcatactctccggcttacggattttctccgacttctcaagctcgttgaaagggttggccttcatctttttcttcctgacggcagagttcaacgcaccgttcaacgcacggtaataattgtgaagcgtgtagtttgatatgtccttgcctttcggatgatattccgtcaacagataagtgatgtagccccggcagaagtccccgtcaatctgatccagtgtgaccatttctccggcatagtctttcagtatgcgcatggcaatcttgatttggttgccgtctttcttgcccgcactctcttgggcttccatgtaaaccttcatccagtccaacagataagtcttgtccttacggaatacgattcctgcctcattgctggtcagttcgataatacgtttcgacttgatggcattggcggcatccattgtcgcctgattctgcctacgggcattattatccgtctccgggataatatacatcttgaggtattcatacgtccgctttccatcgcggtatatatccagatatagactcttgctgccatcgctcaacggcttcatccgaagacgaatcggctctttgacttttgtatgattcttaactcgtgccatagggattcctttctcatttttcctattgcaaatatacggataagtatcgagattaagaaacaaataagaaacaaaattgcaccaaataagagccaattcactgaaagtactgaaaacaactgaaaataaaaataggcttataaaacactgatttatagcttatttattatcactttattgggtgttgtttgcattttgtatatatactgcgtaaatctggtaaatttaattgcgatgagaataagcagacctaatctcccgccatatcctattggat

SEQ ID NO: 10423 - DNA, 40099 bp, Unknown
  gut microbiota DNA sequence
cattctccatttgcagaagtgtagaagtaacaatccgtcaaaggagacaatgaaggaaaaccataaggcatacacggttacatgctcattcttcatttgcagatgtgtagaagtagcaatccatcaatggagacaaggaaaagaaaccataagacatacacggttacatgcccattcttcatttgcagatgtgtataagtagcaatccgttaatggagacaatgaaggaaagccataaggcatatacggttcacagcccattctccttttgtagatgtgtaaaagtaacaatccattaatggagacaatgaagaaaaacaataaggtgtatacggctacctgccattctccatttgcagaagtgtaaaaataacaatccattaatggagaatagggtatggaaagggcagatttccagtacatacgtctcccttattcctgaattatgggcgtaagtcacatgattcaggagagacagccacctttttatggggagagcagccggcaaatgcctgatggaaatgacccgaaaatcacaggagaatagccgtacaatgggctgatacacaattcctattggagaatgttgtccccattaggggacagcaagttgtgttttcgtttaacgaaaacaggacggtttaacggagaatacaccgataaaccgttacttatttcaagctccagcgtcgctttttacatatctaactataattcatttgaaatcacaaaacagattgaaccgaatgtggttagtttgtctgtttatttcatgtccgaatcattagtatgctatgttgcaaagttcgtattcattatgaaaaaatccgcttacgagaacaagatattcaggtaatttgccatcctttccccaaagaagttcgatgttaaaaagttcagaaagcgttttggctatgtcaaatccgaaggcttcgagtgacggacgcactttttccgggtgtcggcatggtgtgccgcagttacgcgtacactcgttatctgagcagtgaagacatttacctatataggcaaatgaacgccctccatatttccgttccatatccaataattcgctctcgattcgtatccgttccggtaaaatgagtttttgtgtatattcaatcggaatatctttgtcttcagggattatcttcgttgccataagatgtgcatacttgtattgtcggagaaacgattccgtatcaaaatcaaatggaggacacccccaacttttaccgtaattggtacattgtttgcaaagttcaagaaaatgtggttcgtcacggaattcggcgatatatccttcaacagtgatgtctgaagtaaaattttctacagtgtatatactcattgtttcaaaatcattgtaccgcataaggagtcgaaacggatgttttcattttggaaaagtctgtcaatgtatccgcttttctgcatttcagacgcggtcaagcaacttaaattcggggtatctaacaatgctatcgaatcgcacatggacaacgcgatgtcaagttcatgtgtcgagaacatgatacattttttctcgtcgtggacaagcctacgaagcaacgccacaagttcgtagcgattaggcatgtcaagaaaggaagtcggttcatcaaggagaatgataggagtatcctgtgccaatgcacgagcaatcatcacacgctggcattcgccatccgacattttatccatcgtgcggtttgcataagcctccattcccaccgaaatgagcgattgcatgactatctccttatctgtttcttgcatcctacctatccagttggtataaggagcacggcctatggctacgacatccttgcaccgcaggttggcgatgcgcgtgcgctcggtcgtgacgacagccagcgtttttgccatatcttcggttttcatgcaggcgatgtcgtgcccgtcgagaatgatttttccggaataacaccggttcagaccggctatggcgcggagcaacgtcgattttcctgtcccgtttcttccgataagggctgtcagttgacctttttttatcgtggcatttacctcgtggagcaacgagttttctttgtaacctatggaaaaatgctgtaattctatcatgcggtgatggatttgttgcgtaaaaccacccatacgacgattgggattcccaatagagctgtaatggcgttgatcggcaaggtgaatattttagaaatgatgtcgcaaagaagcaatatcgatgctcccgaaagaattgttccgggcagaaggacatgatgatcgctattttggaaaagcattcttgtgacatgaggcatagcgagacctatgaaacctatcggaccgcaaaaagcggttatcgttccggcgagcagcgttgtcgagagaaacaacaggctgcgtgaacgccgaatattcagtcccattgttacggcatattcctctccgaacagcaggaggttaagcggtttgatggtcagtaccgccaacagcagtccggcaaacaccgatggaacaagaatcagaagttgtccggaggtgacgtcacccaaagcccccatcgtccaaatgacaaaggctttcagcgattcctctttgctgaggtactgcaatatctgcacgacagcacctacgcccgatgagaacatcatgcccagaatcaggattaccatgatgtcttttattcgctgtccgacggcagttatcacgagcaacacgacagccgcacccacccacgctgctccggcaatgcctattgatgaaccgatcccggcaagtaccacaagtgccacaccgagacttgcaccggaactgatgccaaggacatagggaccggcaagaggattacggaagagggtctgcatctgaagaccgctgaccgataaggcagccccggccaacagtgccactatagcttttatgaggcgtatgttgagtacgattttttccgtggcacgggaacaatttcccccggtcagtgctgcccatacatcgcggatcggaatgttgacagctcccacggccaagtccagtaaaaaaagaccgaccgtgagcgtaatcaatatggagaataatatagtcgaacgggaacgcatctatttcagttgcttgtaatacacacactcttcctgcaccagttcaggatggaatatcttcacgaggtcgcggagcacgatgtcaggattcacgacggcagactcgtaatagtcgttacccccggctgtgttggtacgggcgttgttgttatacacctctccatttttgaaacatcgggtatcggtgaatttcggacatgatgccttcaagtcgtcaagggagttcgccattcccacgttcagccacatgtccgcatccgacgcgagcagatatgcttcttctaagtcaatggggatagaagcgtttcccgtgttcttctggtagatatagcggcctcccgcatcagtaatcaagcgggctacataactttgggttgaaggcatgaaccacgagtcgccatagggaacattaagcataaccgaaggagtgccgagggtactgtcggccactttctttttcaaggcgttgtatctgaccgggattgcggcaaaggctttttcacccttctcacgttttcctgtgacttctgaaagcactaccatccattcggccttgccgagaggcgactcttcaagataatcgccgacatacatgaacggtatgtcgagttcttcgagtttgctttccattgcgcttgcgccgttcaccccatagagcagaacgaggtcgggatcgagcgagagcagcaactcgtagttgatgttcccttcatagccgacatcgccaatactgtcgcggcgggcttggatgtctgggttggaaatgtagtcgattcccgaaacgccggttatacaccggacttcaccgattgcgtcaagcatggcgatatgagtggaagacatcgccacgatgcgtttggcgtctcctttgagtacctgtcctgcaaacccttcgggaacctcttcaccgttgcggacgataaacagccatgtggttacactgtccgctccctgccagggattcctgacggttatcagtacgctttccttcccgcccgcccctttgatgtcgaagccggaggcatattcgggagcataaagcagcaggttgaaatcattgatttttgagcttttgttgtggcagcctgtaaatgccagagaaagcaacaaaatcaggcttaaattctttaatgcgttcatattgatgcagattatcgtttactatttttgttttttccgaacttgggtgttatgccgatgaatatctcgaaattgatgcccggcatgggacgggacaatacggaaaggtattcttcatcgaacaggttgttgatgctgccctttagcgacagatcggcccatcggaaagagagctgtttttccagtgtcacgttattcatgaagtaagggggcagatagcccgtcagggtatagtcattactcgacatggtataacgctggctgtaataacaccatttgtaaagcaggctccatgtccgccatgacagacgtccggtcaccgttgcggaaaactccggcacgtatggcaactgtttgccgacggattggtctgccggactcatcggttcgctctcgttgatcgagggagtccacgagaaagttccgttcatatccagtttccagtcctttccgagcattatatcaaggtgggcgttggtctctgccccgtaagcatgtacctttttgaggtttctgggggagaagaatcccttggttgtgggtagccagatgatccagtcgtcgatgtgcgaatcgaaccagttgataccaccgctcaaagcatatacattttctttccccaccgagaacgacaaccccacgtcgtatgtgaagccgtgctcgcttttcaggtcgggattaccgcccggcagaaaatagaggtcgttcagcgtgggaaaacggtagttccgggagatggatgctttcgccacgatattgccttttttcgacagtaccccgtcgatgaagaaagccgggataaccggggcccattccgtaccgaacatatcctcgcgaaggacaagcgaggcggcaaaacgatcgacaggccgccatttcgcagaaacggaaccggaaaactcgacacgtcccttgtcatacccgacaacagccttgttaccttcctgcgagatgatatttttgtccgcgctttccaccaaatgctggtgtacggaaacaccggccgtgaacagccatttctctgaaggagcataatccccgtccgcacttccgtagaacgtgttaatcttactgcgtgagcgggtcatcgaagccatttcgccgtttcccttgtcccgcttgtaatcataggccatccatgtgtgtatatagccgccttttacaccgaccttccatttctcccgcacgcgatcccacgagaggacgccgcgaaacgtctgctccctttggcggttctcgaagtccatgtcgttcccgtaatccgtgctgagcatcgccagttcccggttggaattgatataccaggcgtttagcccgaacttgtcgccttcgcccgtgttataataaatttcctgcaagacgtgcagatccttataagccccgctgcggttgcgttccgtcgggtaataggaaccgatgatgttcttgtcctcgtcatagatgttttccttcttgtcccggtttcggtatttgtagtcgttgggggaagaggaatacaccacacgggtggaggactgccagtgtttgtcaccgtaggtcaggcggagaaactcgtcgaacgtgctgaacgaccccactccctgcacgtactgcaacccgaacccttcatggttggccggagaagtggagagcctgaccagaccacccaagccgccgcccgtttcgtttaccgatgacgttccgtgcagcagcgaggcatcatcgataaagtaagaagggatggtggaaaaatccgtcatgcccagcatcgggttgttaatgcgcataccattccacgtcacttgggtatgcgagggagaggtaccccggaaagccacggtggataacgtggcgcgtccgtagttcttgacaaaaacggatgagttgaatgtcagcacatcggccatagacaaggcgatgttctctttcatggcgatggaatcgaaacgggttcgttgcacgcctatatccttcataggtcgtttgcccaccaccgtaacctccggaatacgtagtacccttttggtaatgctgacggaatttttctgctgggcggcaagcagaaagggcaggcttacccccacgaacaatagaataagatgtcttttcatttttgtcctccttcctcgttatttccagcagaaagctcccggaatgattcccacgtaaaattcatcgatcagcttgccttgcggcgaatagcgatacacgataccttgttgctggtaatcaatagcgtcggccacatatacctccccgttgttgggattgaccgtaaggccgtagtatttggtgtcccgaaactccagaaaaggccggacgggaacacggtcggcttccaccggcattcgccaaatatcgttgttgatccagtaaagtatatcccgtgtaccgttgagctggacttccgaaggccagtcgcccagcttaaacttgaactgtttctctacggtgaaagtctcggcgtctatacgatagagagacggtgcctcgtaaccgtatgggctgccctcgtaaccgccatccgtgatggtccacatcttgttgtatttgtccatgaccagcgaagtaggttgtatgccgatggtcagttcgtccacgaccttgtccgtctccgtgtcgattttcaggatgcggttctggtacgaccagcagttcacatagacgtacttgccgtattgtaccatttgttcggtggaacccgattccatgtccatgtctggacattcgatatagccggtaatctcgtatgtcttggggttgatgatgaagatacggtagtcccatatctgcgtcacataggctttctcatccgacagaaaatggatataccggggtgaggtgaaacctgtgatacggcccacttccttgaaagtattgatgtcgatggcgaaaatcacatgcgagttgttcaccacgatccagcctataccgtcccggataaccatagactgggccacatcgcccaacttgaacccgttggcacggtaaaacacttcattctccacttcgcacgtggcgggatcgtagtaggaaagcgtggcattgctgtactggaaattcccctcgttggtaatgaaaagaccagaggccgatacagagaaatcttccatctctccgtaatcccatttcatgcaactgccgaaaactggcaggcagaaaagaaaaaggcaaatccgttgtattgttctgctcattgtcattcggataaaaaagagtacccgaatcattacgggtactctggttaaggtataaggtttaatcctgctgcgtatattgtttgtccttcatattttggaaggttgggttatacccacatttcgtcacgctccaactttcccccgtaatcattccgttttctataaacttgccgaagaaagtgtagtcggtaaatttcgtcaaaccgtcaaaaacaaccccatgcaaggtctccaacttctccatggaaagtgtttcctgagaaagagaagtcgcactttttatctgtagcgtaccatctatagtctgtaatttatcacaagtaatgcctgttgctttattaacgaacaacccttcacctcctacgtgaagcaattccggaatatccagcgatttactttgtaaagatattgctaacgaaccctctccctctttataatatacaggagaagctgaacaacaaactttggatagtaagggcaagttacaactggtaaaatttccagataaatagaactgtcctcccacttctttcaagactggcattgtgattgaagcaaacatgggtatttggatatatccatatccatctatgatttccaagtcgggaaatttggcattgcttcgcatttggcctgtcacatttagatttccatatacatgttgaattgtcgatatggtataatcgatattgttggtggttggcttacaagtgaagtctttgatattcttgaacgtgatttcagggaacttattattcgtgagactggtgatgacaaaatttacatttgacaaatcttcggctgtttcaattttggagagctgcaccttgtttataatttcaatctggggcgctgtttctccgaaggtttcaaatcgggcgttcggcaacagcagtgttccgctcacatcttcaagataatccagcgtgatgcttccaagtgtggtgatcttgctccagtcgggaagttgtttgagtgccgtgaaattctttatctttatctgtccctttatcgttgtcagtttgtccattccaccgaaagcctgaagcacgtcatttcgttggggaacaaaactaccggtaggaggagcttccatattggcttccataataatacttccgtttactgtttcgatttccggaaggttgatggtttccaacatcacggggacggtatggaaatcaaggccaccggtctctttcagcttaaggaagctcatggaagtcagcttggcaagattgtttacggacaagacccctccgacacttgtcagttccggtatttccaaagacgcaatcgaaccggctgctgtgttctcttcattgagtccttgaagattcagatcctgacctacagtagtcagaaccggaaactcaaaactctgtaacgacgacgcattgaacatcacgcttccttcaatagttgccagtttctcgaataggacatacgtcacttggtcgttatataccgatatgtctccggagagtgtttccaatgctttcatggaaatcatgtgaagttccgtagctttcgaggcgacatcggccgaacctacctgcaaacctccggccgaaacgatattttccaaccctgtcaagtctgcaccgttgtaactgttacgaatgacaatgttgccagtaacctctttcaaagatgccaatgctgatatgtcagtgattttttctgcctcttccgcatcagagccgataatcaggttccctttgacaacggttgttttggttgcggcaaaagaagctacctcctcggtggtcttcaactccacatctccgtcagattctatttcgcttttcaccactttataggcatattcgcgggcatctccgttataggatgtcacccggaaggttcgttcgttatcccagtccgttaccgtttcaggatcaggtatgattgttgcagaagttgtgtacttgaattccacttcggcattgttcagcgataccgtatagggaacggttattgttactgtattgtccgcaatgtcggccgtgtacgatttcccgtccacggtcattacaactgacgtgatgaaattctcatctgcatcttcaggtataatttcatcgtttttgtcacacgcacccaaaaagaacaaggataggagcatgggaagaaaataatttttcatacttgcaatttttattatttggttaaatcctcaaaagaaaatacttccgttgaaacttcgcccagccagccgcttttggccaagacaccgcattgtactttgataaagtcaatatattgcagattggcttccgttccatcggcatggatggcattggaaattttgaaaccgttcctttgaccgcttccatccaccgtactgccgccttctatctggtcgtttccgaaattatccacgtacccccagtcataactctgattatcccaataaccggtttgtgaatcttgggtgttgcgggcggccagacaagtgcctgtcagggtgtaactgttttccgaaatccaagccggataataatagtcctgcgtatgataagcggacagatagtctacccaaccgtttctaccatcggaactgatccattggacatccatttttttgccttccggacggtaataagtcacttcaaagttctgtattgtttcttccttgcctgcttcagatcctttcagttcgtaccactcgtcatccggcaatccgtttccgtttatatcttgcatgacccatacgatacccggttcggaactgccgtcaaaggcgttcccctgaacacagaaatcatattggttacccgaattgggaatactgtggtcgaagccgacgatgatataacccccgaaagaacctaaagagacgtgcagtttgtctttcaaacgctgtgttgcccatgcgacagccgcttcaggggatgtttcgttgccggtcataccacctatcgtgctcgtctcgttgataaattggccgggagctggggtatattcatagactttattccagagcttggaacttcccgaagcccggaagccgtcttgttcctttttgtccacacaaacgacttttacggtggcagtgacagccgttttccctttgtcgatattcctgcttattttttccgtcggtgtgtcttccgacacagtacaggagacggtgtattctccgggtgcggacggcgtgaacttgaacatgcgtttcacttctccttccatgacctgaccgtctacactccactcaaaacggggattgtcgaaatactccaacaacggacgcaggaaaacagggcggtcggcaaaagtgtacctgtccgtggatgtttgctggtaagacggggtcgggaatttgacaacgtagggcatcgtttccacgacctctacgcttacgtctttcgttgttgtcccatctatattggaagcgttgattgtcaccgtataaacaccgagttctttttcattgaaagtataagtattctcggtggaaacgatttttccttcccgtacccattcgattttgaacccttcgacatccgaatgctgaatatcgggagtaaatgtgtaatcggtattccggacgacttttagcccctgcgaaggtagtgccagtgagatgaccggaggggtgagttctttcacttctactttcagttcctcttcggcatagccttccgcattgtctactcttagtttgacataaaaatccccgcattcattccatgtacgttgaagagacggacccgaagaaaccagcgtaccgtctatcgtccaagcaaaaagagcatcttcaacattctggtatgtcggggcgatagtcaattcgtgatcgaccttgaccgtgtaaataccggtctcgctgtcaagttctattataggttgtcctcctacttcttcggtaatgacttcatccttgttgcaggaggtgaacagcatacaggcagaaataataaaatagtaaaaacgatgcatgatgtgtggattttagaaaaataacagtgatacccccgacagaagggatatccctgtattctttttattgtatggtgatatcatcgatacagatataagccggagtattcaaaccgtatgctcccgaatccgaaccctcgaagttgaatttcacactttgcaccccttcggcattgatttcccaataatcccatgtcgtgataggatcaacctgttgttggccgttacgataatcggctaaaagacgtttgtaagtgcggatcagaccgccattcgcatcataacattccagattcacttggaaataccctttcatctctttcagaggagtcgctacccccgtagaaccgaactgattaccataagtaatgacaccataagtgtatgaggtgttgcagatccacaggccgaccaatttccggggaacattgaaataaaattccggtttagccatccatgcctgattgtaagcatccacatatccgtaaacgacaccgaaattggaaccgctgtgcccggcttccttattctgtccttccgcttccaccgcagtgttatagacagaacattggtttagataagaataccaccagtctccggtatttcccgactgattggagcggatgttccagttggaaagtgcgatgccgccgctggaatactctgtgcttccacctacagtattaaacattgaaaggaagagatattcttccggagtattgtcgtaaatggtggttacttgaggatacccttggtacgaataaagattttctccggccgaggtaggtcctgctaacatgccggaatcgaaatcgtcgaaagtgatagtcaaggtaccgtccggatttgtcacagcacgggtttgcggagttccggaataaaccggttccatcaaaaagtcatcgtccgagctacagccggagaacaaggcggttgcggtaaatagacaggcacctgccagaaagcgtaattttcttttcaaaggtcactcgttttaatgtaaaacatattattaacaaacacaaaaaaatcccgttcgtgcggacttacacgaacgggaatatgtctgtcttcaaatattgaatggccgatgagctattccttatttgattacgacctgtatatcccgcaggtgtaaatctcattccggtcatggcaggtcttctgactcgtcccggtcatcgtgccttcccggtattacaccagtggcaaaagttcgatgttcgttttttgtggactcacagcagcgggtactgtcccggatttttaccgggttcccttttcattcggaaggcgtaaacctcccgaaaccattttccggctgcaaaattatctatattacatgtcatatccaaacaattcacataatatttacgataaaacacacaaagcatgataaccgtgtcgctttaattagagcattcaagtttacgacaaacgaagacggtaattatcatacacaatatccataaagcaccaaaacagcttgccattttccatagcaatgcgttctggaatagataaccgttagctgcaattatacaagcaaaaaaagcagacagaataatgactattaatatcatgcaccagaaattaatcctataaatttatggaaaacaagtaagggaatggaagttccgttgccgcatggatgcaggtgaaggaccttctcttttaacgttggatacgccaatgcacgccaacggaagactctgatattatctgtttggaaaggatataggatgtgcgttactttgtcgcatattcagaatcttaaaaagaattttagtatggaactgacaattattgaaacaagcgcgtattaggagttgagaaagctggtcagcacgctggtcgtacagatgggcgacttccagaaaaagattgccccgcctgcgccggacaagtgaatggatgcgcaggacgtatgtgatggacttatgcccaaacactttctgaagagtttccagcagcatccccttgagtatggccagaacggcaaatgcgtggcgtccgatgtgcggggtgacctcgccccggagttgcatttcctgcctatgattccaagactgagccgcatggcattgtattcacctaccggaaagacacattcggggagtctttcttttcatccgtacccctatatttttcaatcagttcgatagcaatgggcaataattttacgacatacgccactcccgtttttatacggttgcccatcagccatgtaccgccgtcggagtcggtatggatattatcgtatgttatggctttcaagtccacataggaaagaccggtgaagcacatgaacaggaacatgtcgcgcatggcacgctggcgtttgtatctcggttctatatggattatcctttgcagttcctcttcggaaaggaaagaacgcctcttgtattcgggcatacactcgaatgatgcgaacggatgaacccgtatccagcctttttcctgcgcgatatacatcagccacttcaaggtattgacacgcccgaagacagtggagtttgccaaagcgcatgtaccgagcatccagttgtagtaatcctcgatgaatgatttctcaagttcttcgatgacaatatcctctgcattcttcttgcttttcatgaaaagcaggagactcttgtaatcggcaaccagaccgcagtaggtgctttcggctttctctatgccgattttctttttatacggttccagctgttccctgaaaaggttcataagggtgtggcattcctctgagaagccgacatagcggttatagactttcttggctgtaacaaaactgtcgtggtcgcagatgtactggtagtgcctggtgatttgcgccttgatattgtcaagctcctgattgagtgtacgggcctcctcggacttgcctttggcccggttggttttgacgtcccacaaagcgagggacacttctttcttacaactgaaaccggcttgggttccattgatggtgatacggcccataatcggtgtctttccgttttttacagactgtttattctcaaaacacttagctatacatggtctgcgataagctaagagagattccccttacacaaaagcatggcatctccttgtcgtatctcgcctttatacttttatgtatagtagtctaccggatcgaatgaacaagacctatcccatacataaaccaatttagactgctatgttatttttgaggaagaagatggaatgagaccagataccctctttaaggctgactgtaagtcgattaaatgtagaaaaagattgcttttgtcacaagtaaagtgtatatttgcattgaaagaatcgttctttgacagaggcaaaagaaaacagaatattgtaattcgctcgtttctaaatcgttacctgatattagttaaacagaaataactgtttaattttcaattagatagagattgtatgatgtttcgatttgttgcacgggttcgactatacggcctttttcggcaaatccgatctggaacgggccaaagcgatcagcggaggagtcgattttctgcaagctcccgaacgcgaggagccgaagaagctgtttatcaaggaggcgctgctgttgcggcaggcgttgtcgctctgtcagagtttgttgaactacgagcagcgtctcgaagcggcctatttcgaagctgtgcgcacgctgttgacgcgcatcgaaggcaagggcaaaatgtcgctgcgcgaaatcaacgcacggatcaacgagctgctcaaacagagcatcaagagcgacggtgtaatcaacctcttctccgacgtcgaggaggagttttcgctgttcgatccgaaatttctcgaagagatctcccggatgaaggagagaaacttcgccgtcgaactgttgcgcaagctgattgccgaataggtgcgaatttatcaacggaccaatacggtgcgggccgaaaaattctccgagattctgtcccgtgccatgagcaattacctcaaagggttgctgaccaacgaggaggtaattcaggagttgctgaaaatcgcccacgagatcgcccacggcaaagaatccgacaaagcgctcgatctgaacgacgaagagctggcattttacgatgcgctgaccaaacccgaggccgtacgcgatttctatacgaacgaacagttggttgccattacacgggaactgaccgatgcgctgcgctgcaacaagacgatcgactggaacctcaaggagagcgcccgtgccggtatgcgtcggatcgtgaaacgactgctcaggaagtatgattatccgcccgagggacaggaagatgcgttgagtacgatcatgaagcagtgcgacatgtggagtgaaaacagctgacggattggccgtcggaaaagcgtgataactccggtctgccggggaatcgttatgtcttggatattcctccttcggccttgcggcttcgttccgtgaattttctgctcatcgctgtttgcgaaccgtatcctgtcggtctcggatcgccttgcggatttgtcgctgctcggcactcacccctgctgcatggcctgttcgagcgcgcctacgatccgctccttttcgctgctgccgtccgtggagagacgcagaagcggcaggccgatcttgacgagaataccgtttttgcgccggtcgcgggcgacctgcacctcgtcgaagcggtggtggagcacgccgtccacctcgatccccagaatcggcgtgttgtccatccggttgtagagcagaaagtcgagatgcgagcggcggcggacgaagaggcgctcctcgtcggacagctcgacgttccgtccgaccagatcgtacagccggtagtgtcggtggacgccgatggcggaaaaccgatcctcctcggcgagaattcctccgatgagccgttcggcgatccgttcggccggcgattcgcgtttcgcatcggaggcgaaccgcatggcggcgtactccgtatgctgccgctcgatccagtcgcaggtggcgtcgatctggcgctgattgtagatccggccgttatgggagtaggttttcgaggcggttgtcgtcaggaccgtaaagggatagtcgcccttcggttcggtcatgatgagcagctcgttccggtaatatttccggttgcagaagtcgatgatgagcggatggcagcggtaatgttcgcgcagcagcgtgacgggcagccgttccccgaagacccgtttgaaggaggagaggatgttctgccgcacgtaatcgtaagcgtcgggcacccgatgtttgtcgcgcagctcctcggccttcgccctgagctgctcctccacgatatgcggcagctgccggctgtcgccgatgatgatgatattccggcaacaggcgcagcagacggccgccgtgaggatatcgacctgcgacgactcgtcgatgatgacatagtcgagcaggtgccccgcgccgatcgaagcgcacagcgaatgggtcgtactcagcacgaccggatagcgttcgacgaaggtgcggaaatgcgtccggtagttctgcatcgtgaacgggggccgctcctcttgccgcgcttcgttcaggcgttcgtatttgcggtagagcatatcgcggaacagcgcttccgacaccttcccgtatgcttcgatcaggctcttcgcacgctgctcgtcggacggtgccccgagccgggcgatgcgggccgagagctcggcgatataggtttcgtagaacttgcgatcggcataggcgggcagcagctccgcatccgcgaacagccgcttcccgggccacgcgccgcaccggaacagcagtccggcccgcaaagcgagcgacggccttccgccctgccacctctcggtaacgagatgccggaacgacagcgcacgccggctgtcgatcggacggaagaaacagcggtcgacccgccgcatccgcgcttcgtccagcggttgttcccacagcagatgacggtactcgcattgggcataggagcgtttcgtccgcaggtcggccagctccgcgttgacgcggaaaagctcgtctatggccgccgacagctcgcccagccgcgttcgcagggccgtgcgttcctccgccggcaaccgccacgtagggtcgggcatgaaatcctgctgtttgtccgcgaaaaaggcctgccgtctggtccggtttcccagttcggccatcaacgccccgtactcgtatttcgacagtttgtcgcgcacgttgtccaccgccgcattgttgttggacacgacaccgacggtttttccctgcatcagcagattggcgacgatgttcagaatcgtctgcgtttttcccgtgccgggaggtccctctaccacgctcacccgattgcccagcgcccgctgcacggcgagtttctggctggcgttgcagccgaagggatagacgagggccacgttgtcgacatcgcacgccgccgtccgcccgttcagataggcatacagcgccgtacggggatcctgcggatcgatgcactgcatcgtctcggcgagcagggcggcgatcgaacttttcttctccccttcgggaacctcctctgcggcttccgtatcggtctccgactccagagaggctttggctgcgagaacctccgcgaaataggaaagtagccgctctttgtctgcggggagcggctgcgcatcgaccgcttcgatccgcgacttctcgatcgccggcgaacgcaagccctctccggcgcccagccggacatatttcccgtagtcgaacagcgtatcgtacggctcctgcaacgttccgtccttgtagatgcgtacctgccggcgtgtggcgagcaggggataacagactacatgctctttgcgatagcggaatacccgcgccgcgccgtaatcgacatacacatacgctccggccggtcgcagcccgacgatctccgacgtcttgtcaacgtaggcgtcgcgccgcttgtcgtgtacgaaaatcagttggtcggtcatcgttcgggtcgtttatcgggaattaaaaaccgctttaccctcacaaagatagtcattttgccgcgatgggtaagaagatgataattggtccggtattattcgcattcgcgcgaccatagctcgtaaagttcgcggctgagcgcgatgacctgctcggagagggctttcagctcgcgcgtgcggcgctccagaagaagcacttgtcgcggaatcgccgtatgcgaaaaatgcgtgttgacggcccgtacgatctggttatagttgttgcccacgcgctgtatctgctcgtaaaactgattcagacgggtcacatatcggcccaaggtcgggtcgatacgcaccacgcgaaactcttcggcgaagattcttttgacgataaaccggctgcggttgtgttccagtccagcctccgcaagcatccggcagaaacggatattttgctgctcatcgagccggaacgagtacttgtaactggcttttctctctttgtgctgttcttccatatgtcaaggtttaagggggcgcgactcgggagcggcacccggcctcgcagagcaaggacctttgtcggacaaacaccggtttgtcggacaaaggtacaccttgctaccgtccggcgacggtaaatgcgtcgagacgacgcagggtacgaccgatggttcgaacccctcggcccgcggtgcttcccgggctgcaatattacaacgcttttcgcttgataacaagtcgtttgatcggcctggaacggcctccatgcgacatacgtcgaaagcatccgaagggatactatcttcgctccgcgagatgaatgacagccctcctgctatcatgcgatgacagctgtctgtcacggatgtactgctatcgatgaagtactgctatcatggacgtatatccatcatagctccgattcattgcacgaagtaattcattcactgacttcattccgtcacggacgcaagtcattcacgatacgcatcaaacttcgttttgccgattatctccgtaacgaccaaagcgagcggcccgataagggccgctcgctccgttaccgtgccgtcggagtcggtatgcagccggcttcgtgctcaacggcggggtaatcttcttttcctcgtgtcgatccgtccgagacctcgacgacctgttattcggccgaagccgccgacgccagccgctcgccgaaagcctccatcgcgcggccgatgaccgtctcggagaatttggcgtagtggcgcgtcatgttggtgttcgagtgcccgagaatcttggccagcacgtcgatcggcattccgtattcgacggccatgcaggcgaaggtgtggcgggcgcagtgggtggtcagcaccttgtcgatgccgcacacggccgcgatctccttcatgtaggcattcatcttctggttgctcggcgtgggaagcacgcgcccgcgagcgaggcacgcctcgtcccgctcgtagcggcgcaggatttcgagcgaggccggaagcagcgggatgcggctcatgacggaggtcttttcgcgcggcttgtggatccaccaccgcccctcgtcgtcctgcgagaggtgctcgcgccgcaggtggtcggcgtcggcgaaggccagccccgtcaggcagcagaagacgaagacgtcgcggatgcgggccagccggtggtcgagctccttgcgggtcagcagttccagttcatgcgccgtaaggtgctctttggcctgcacctcgtcctctttgagtttatagtagcggaacggatttttcgtgatccactcgttgcgcaggcagtagaggacgaagttgcgcagacagtccatgacggcgaccgccccgttgtggcggcagcggtgggcggtttgcaggaagaggttgaagccgtccagaaactcgtagttcatccgctcgacgggaatgtcctcggccttgccgcgctgggcgaggtactgtttcaggtagcgcagcagccgttcgtacttgtcggccgtgcgctgcgtgatgcgcacgcccacctcgccctgccgccgcttcgcgtagtcggcgaggcctgcgatgagcatcatcgtgttgcaggtcgggttgaggtagcgctgcttgatctgcgccgcattggccgcatagccctcggccagcagcttggtgcggatgtcgatgattttgacgcggaaatcgttcagtcgctcgttgacctgaatggccagcttgttcgttcccatcgcgcgctccttgtgctggttccacgtttcgggattgctgtcgcactgagtgtagacctcttgccggagccctccggtcgtaatgcgtgcgaagatgggcgccaatccgtttttcttcggtcgtcctttccgcatcaagaaaagaatggcaaatgtctcttgtctcatgacgttgaaattttttggttaacaaaacgtccgcaagagagaattattacgacgtaaaacgcagcgaaacagtgcattgcaaacgtactcgggagcaaattccgtcgcgcagcccgtttttcgcctccgctccctttcgtgctcccgcgagtttgctgcgaaatgctttcggcttccggttcagagaatttgccgacacctttgcaaaacgatgatatacaatcaatttgcacttgtttgcaccgaacgggcaacgaaaaaggagcccttcgaaaaggctcctttgtgcggataaagggactcgaacccccacgccctaaggcatcagatcctaagtctgacgtggctaccaattacaccatatccgcaaatatccgaacaggaactgcaaaagccgggtgtaaaaccggatttaggcggtgcgtgaaacgcgtcctgtcctttgcaaagctaccggaaaacgagcgcaatcgtgcgggattgtccgcaaagattaccggatcggttcctgtcctttgcaaggataaggaaagcaagcgacaagccaaacaaattcgagcttgcccgagccgcctcttatctgttggcaaagataacgaaaaaacctttttctcgaatggatgccgggcgattttgccgatttttggttacttttgcaaactatttcaatcgattatgccgtataaactgacactggttcttactccgaagcaggctgccgacgtaaaatactatactgaacaggcggctcgccgtgcgggtgtcgcggagcaggatgtggctttggtgcgggtcgtcggacggtcgatcgatgcccggcagcggcagcccaaagtgaatcttacgctcgaagtttatgccgattgcgaaccgcagcccgcacctgtgcatttcgactatccgtcggttgcggggcgtacggaggtcgtgatcgtcggttcgggccctgcggggttgtttacggctctgcggctgatcgaacgggggtatcgcccggtgattctggaacggggacgcgatgtgtcggcccgcaagcgggacatcgcgcagatcaaccgcaacggtgcggtcgatcccgattcgaactatgctttcggcgagggcggagccggaacattctccgacggcaaacttttcacccgcagcaagaagcggggcgactacaacaaggcgctgcaaacgctggtttttcacggcgccacgcccgaaattctttacgaatcccatccccatatcggaacggataaactgccgagggtgatctccaatatccggcggacgattctcgaagccggcggatcgttcgttttcgatgcgcgggttaccgatgtcgaattgcacgacgatcgcgtaaaaggggtgtgggtcggagataccctttatgaaggagcggctgtggttcttgctacgggacattcggcccgggatatttacgagttgctgcaccggcggggcgtgcgtctggaagccaagccttttgcgatgggcgtgcggatcgaacatccgcaggcgcttatcgactcgatacagtaccactgcgagtcgcggggagagtatctgcctgcggcctcctattcgttggtcagccaggagggtgggcgtggcgtctattcgttctgtatgtgccccgggggattcatcgttccggcgatgaccgatgcggccgaatcggtggtgaacggtatgtcgcccagcggccggaactccgttttcgccaattccggtttggtgaccgaggtgcggcttgcggatttcgagcatctgcgggcagagtggggcgagctggccgggctgaaattccagcagcagttcgagcggctggcccggcaatacggcggcgagcatcagatcgctccggcccagcgtgtcgccgatttcgtggcgggacgtgcgagcggttcgctgccccggacctcgtatataccgggcgttgtgccttcccggctggataagtggatgcccggatttatcgcctcttccctgcgggcgggtatcgccactttcgggcggcggatgcggggattcctgaccaatgaagcgttggtcgtgggcgtcgagtcccgcacctcgacccccgtgcgcattccgcgtgatgcgcagacgctgatgcaccccgaggtcgccgggcttttccctgcgggcgaaggggccgggtatgccggcggaatcatttctgcggcgctcgacggcgagcgtatcgccgatgccgttgtaaattacttgaaaaaatagcgtatggataagaaggaagtggtggtcgtcgttcctgtttaccggccggaattgaccgtctgggaacgggcgtcgttgaggcagactgttggggtgttacaggaaaattatccggtcgaactcttggttccctgcggtatggattgctcggcgatccggcgtgagttctccggactgccggttcgggaggtgtcggacgaatggctgggccgcaagaacgggattgcgggatacaaccggatgatgctttcggccggattctacgagttgttccgcgattacgaatatctcctgatctgccataccgacgcctggattttccgggacgaactcgccgactggtgccgtaggggatacgactgtgtggccgctccctgggtccgccgcaaagtgtatgatctgccgattctgaagcaatacctgcggtggaggcttcgccgtgcagagcgggcgggccggatgatccggcagtcgctctacgggaagatcggaaacggaggtctttcgcttcgccgcgtggagagttttcgggccgcgtgcgaaaaatacggcgacgagatcgagcggttttgttcgatgggcaaccacctgggcaacgaggatgttttctgggccgtcgttcccgaagggtttcgttatccttcgcaggaggaggcgctgcggttcgcgttcgacaccaatccccgctattgctaccgtttgtgcggcagtcgcctgccgatggggtgccatagctggtcgaagccccggatgtggcgcttctggcagcagattattccgctgcccgacgcggcgagcggcgccgcagcggataagtgatccagtacgccagagtattgaccgtcgtatggaaaaggtgcttgcccagcccttttcgcttctggtcattgaccatcagaacggttttgtagcaaatcttcagccggttgtgccggacccataccgagagcaaccgttcgctcaaataccccatcacgcgtccctgcacggggtcgtcctgaatctcgatccgccgctccacctcgaacagaatatcgaacagccatgccgagtaagcctcgaaccgctcgcgcggcaggacgaacatgttgaaatgcgagaggcggttgttgcggaagaacacccggtcgaaatccggcaggtaggccggatatttttctgcgatcacctgccgtgcggtcagcaggtcgctttcgatgtggcacttgcaataatccgtgtagaggttgtagggatagatcttcggccgggccatgacgatatcgcagcggctgaaaaggcggtcgaagtcggggaccggatgcgatgccgagaagaaggcttccgagcgaaccgtccgcagcgagcaggccgaaccgccctcgaagtcgaaatagcggcgatagtggttcaacccgatgtagtctgcgtcgtgcaggtttttccaggcccagtagtgggccgtgagttcgcagtagtggcggttgcggtcgctgatgttgtcgcccgtgtcgtcgccgacggcgaacggaagttccgtttgcgaaatggcccgtccgacctgaacgggctggtagggcggggttttgaggcatgcgtcctgcttgtgggcgcagaccaggatgacggttttgctcatttttctaaagggtaagtttgagagcgctttcgatcactttgtccatgtcgtagtagcggtattctccgagtcggccgccgaagatgactttccggtcccggtcggccaacgccttgtagctttcgtaaagtttcgtgttgcgctggtcattgacggggtagtagggctcggctccatgttcgtacggggccgggtattcccgggtaatgatcgtgcggggctgatcgccgcccggttcgaaatgcttgtgttcgatgatccgggtgtagggaatttcgcgctcggtgaaattcattacggcgacgccctgatagttgggggtgtcgagcgtttcgtgttcgaagcgcagcgagcggtactccagctctccgagtctaaaatcgtagtattcgtcgatgcggcccgtgaaaacgatgcggtcgcagaggctttcccagtgcgtgcggtcggcgaagaaatcggtgtcgcagcgcacctcgacgcctgcgagcaatccgtccacgagtttgttgtagccgccgatggggataccctgccagcggtcgttgaagtagttgttgtcgaaggtgaagcgcaccggcaggcgtttgatgatgaatgccggcagttgggtggcgtcgcgtccccactgtttttcggtgtaacctttcacgagccgttcgtagatgtcgatgccgaccagcgagatggcctgttcttcgaggttccggggctccgaaatgcctgcttcgtgacgctgacggtcgatcatctccgctgcctgggcgggcgtggtaacgccccacatggcgtaaaaagtgttcatgttgaaaggcaggttgtagagcttgcccttgtagttggccaccggggagttgatgtagttgttgaattcgacgaagcggttcacgaactcccacacttcgcggttggaggtgtggaagatgtgggcgccgtatttgtggacgcggatgccttcgcgctcctcgcagtaagcgtttccgcccgtgtggggccgtcggtcgatgaccagcgctttcttaccggaccgtgcggcccggtaagctgcgactgcgccgaaaagtccggctccgacgatcaggtaatcgtatttcgacatgatgcagcgggtttatatgtgaatcaattgggtaaggcgtcgaagcagcctgccggagagagttccgagggcgaagacccaccggctgcgggctgcgactttccgatcccggcgatcggtgagaaacgcggggtcgaaggtcgaaagatactctttgcgggcattgcgggccgctttcgcggcaatatgcagctcctcgttcgttttcgacgccgcgaccgcctcgcagcattgttgcaaccggatgcgggctgcgacataacgcccttccggggtaggtgcggcctgtaggaaaaggtcgtgtagctggcgggaaacacggagaatcagctccgtcggcttgcgttttttggagaggccgctgccgaggacccggtagtggtagggcgttttttcgttgatgacgatgcgcgaaacgtggggaatgtattgcaggaggaagatttcgtcttcccggtgcgagagcccctcgatgaagcggagcccgttctcgtcgatgatccgtttgaccagcaatttattgacggtgaatcccagcatgtcgtgccgccgcagggcgacgatggcttccgtgcaggcttggccctgtacgtccatggcaggcgctgtcagccgccggtccgatttgccttcccggtgttgcaggatgcctgtcacgggcagcgtatgttcgtccatgcctgcttcgacgaattgttgcaggtagtctgcatcgacccagtcgtcgggatcgcagaaggtcaggtattcgccccgggcgtgttcgatacccgcgttgcgggccgtgctcaatcctccgttgggtttgtggacgacccggatccgggagtgttccctggcatagcggtcgcagatttcgcccgaggagtccttgctgccgtcgtcgatgagcaggatttcgtaatcctggaaactttgctgcaacaggcggtccaggctggtgcacaagtaggcttccatgttgtaaatcggaacgatgacggtgatgagcatttgtgtcggggtaaaggttaaaccttacaaaaataactcttttttcccatttccggtgcaatttgcatccggaaatgggaaaaaagagttataagatgtgattgaagatttatattatgccgcacaaacattatgttcgtacggcataatttttttgaaagatgaaattcattgatggaatagataaaaacgatacatgagttcttttgcatatctttatgcaactgtattctttaaacgatgtttttgttgcttatatacttggctatatgggaagaatgccgtgctgcgaagcggcatagtcggtcttccgaacggttgggacgacgtttcttacaaagattcccgccgaaaagcgggaatcttttttcggttatatgtcgggttccattatttcatcggaatgagtttgattccgccttgagtaacgaagatcgcggttttattctccgattggtcggcagctacgattgtgggatggtattcgagactgtattctccgaagaacgggttgacggtaatcacgcctttttcgtcgactgtcgcgggaaaagtctgccccggagtgtcgtagatggtttggtagaatggttcgtaccccagaagatagtccgttttagtgtcgtccgccatgaccggaatttccaaatcggccggaacgctcagctgttcgttttcgtcgatctccaagaaccatttgggcccataattcttgttggcagactgctcgtccggccagattccgtccgagatcatctgttcggggctgctgaattgggcggtgccgtcgccgttgtcgaatccgaaaatacccttgatgaccagtcggtttttcgcacggtattcgctctctgtcgcgtcattcacacctttggctatttccacgatgagttcgacgggggtttctacccactcgcaagagttgatattcatcacacgggtggtcagtttgtattttccgggcagtctgtcgtacagactttccgatggagcctcctcgccttcggttgtcgctgaaacctgtttgactaccgtcgcatagtcgttgcgggctactacgcaggcgaggtattcgattccgggcttaaggttttctgtgagcagtgtgaggccttcccccattgcctgttcgaattgttcctcttccagaggcgacacgcttcccataaccgtcgcgatgagcgtttgctcgtcgcctccggtaaccgcatcgagttcggctttgggcataatcagtgcatatattttcgtcgcatcggtgacttgcaactccatttcgagtttcgttttgggatcctgggctgcgggagacacctcgagcctgttgatggtcggacccgtttcgcctgtgggggcgtcggcggtcgtgaatgcttccgaaaggaataccttcgatagtacttcacccgagttggtatccacggcgaacgcgaacgtgtagtattcggtctggggcgtgagtccgctcagtgtccacgaccccttgccgcgtttggatttcttctcccagaattgtgcgaaggtctctccctcttcgagctgaacttcatagctttcaaggagcccggcaatgaatgcgtcctcaccggccttgtcgtattcggctttggtcacggcatcgcagaagtagtggacggtattgtcattcggggtggtttcaaccgaggctgtcgaagccgaaacgtccttgacagaaagtgtgacggagaatttggagggtttcggatcttcatttccgccgccgttgtcttcgtcgcaggcggtcgccagagatagtaaaactgcaaataggatctgcagcatgcgggtgtaaagttttcggttcatacaatttttttagtttttaggttgttaaacgatgataaatacctgttggtggaattaaattagtaaataaatggctaataaaagttgtacatatcattgaattgtagtatattagaagtggccaaactttcaatacacactcggtttatgcacaacttatgtccaatatttgcaaaaattttcgatatatgcaagctgcttgcaggaaatttagtcaacggacgtggaaatctacctcgatgtggcgctgtcccgaaattttctgacttggaagtgatagctctcggtatggcttctgaatccattggcattgatagcgaatctcttttgtttgctaaattgcaagagtataaatcagagattccccatttgatatctcggcggcaatataatgacaggagaaaattcacgtcatctctttgctccgtcattcgtagaaagattgcggaagcgattgatggcagtgaagactacttctgcatagattcaaaaccaatagaggtttgtcgtcctgcccgtgccaagcgatgttctatgggtaagaaagatgtagaaagagcgccctcgtttggttattgtgcctcgcaaggggcctattactatggttgtaagctacatgccgtatgtggattaagtggagtcatccactcttttgacctgccaaaagcaagtgtatatgacattcactatctgaaagacgtcaaagaggactactcaaattgtcgggtaatcggtgacaggggatatatcagcgcagatgtacaactgaacctttttgaaaccgcccatatcagattggaagttccgtatagaagcaatcaaaaagatgggaaaccgacatttacgtgcttcgcaaaagcaagaaaaagaatagaaacgttattttcacagctctgtgaccagtttatgattgaacgaaattatgcgaaagatatagaaggattgtttacccgaattatcgggaaaattagcgcactgacaatcctgcaatatatgaactacaaaaattacaaccctattggaagaattaaatatgcgctaatttaattccgccaacgggtcatgataaatttctaatagtgcctgaaatatagtaaaaaaaatgggaagtatcgctccaatgcggtatttttagagggctgtccggtcgttgccggatcgattcccggcgaatttagcgggcgaaactgcggggaagatctttgaacaccttgtgccagaacattatcatccggggatgacggtagcgctcccgccaggcgaggcggaccgagagatagggctcctcgttccagtggctgccggcggctttgcggatccgcagcaggtgtttgcccgcgatcgagaggcggcagatcaggggcgggtctatgagccggaaggtttcttcgaggatgcggagcgtttcgatgtgcttgcgtcccgtgacgatcgattctgcggtggtgttgctgtcatgtacccggtagtagttgaggggttcggcaagatagacgacatttcccccccccgatacgatctgtatccagaacagccagtcgccgcaataacggtattgggtgtaattgtcgtctgcggggagcgcactgcgccgcaccagtgccattcctgcgttgtagatggtgttcctcgggcagagaaaacggtagaggaagaaacggctgccgaatcggatctgtttgtgtttgggatatttgacgggcgcctcctcccgtatggtccgggagtgggaatcgacgatatagctgctggtgaaaactatgctgcaatccggacgggtgtcgagaatccggacgcaccgttccagaaaacagggagaggaaaagtcgtcgctttcggcgatccacacgtaatcgcccttggctttcgacagccccttttcccactgtttgaaaggcgagccgctgttccgttcattataaaaaatgccggaaactttggggtgattgcggtatcgttcgagaatttcacggctgccgtctgtcgaacaatcgtcgagcagaatcagttcgaaatcctgaaacgtctgttgcagaatactttctatacgctgttcgagatagggtgcatgacagtagtttgggacaatgaccgaaacggtgggcatacgaaaaatgtattatctctaatccgcctgcaaagatagcggttcgaactgaaatattgcctgtgcaggtcattaatcttaaatttatgatttttgccgatcggatttcggaatgtttttaatttcggcgacttttgggcaggagttgtgggcgaaggacggcaaggtgtgcttcttctatatcgggagccgctgccttgcgtcgagataaacggtctttgcattgctccgttgcgcatccggttcgaatcgggattcccggtctttgtaccggagccgtggagtgcaaaataaaaagtgacctgttacagttgttttcggtagtggatagggaattgatttcgcttcgcctgtcttcaaacgtcacgactcggcggctcgaacggagttcgtccgggtctcgctgctccgtttgttcgaatggggttctcctccccttgtcccgttgctccggagagtcagtaataaaaaaagcgactattacagtcgctcttggtagtggataggggattcgaacccctatgtcgtgcgtgagaggcacgtatcctaacccttagatgaatccaccgttgaaatttggtgttgcaaaggtaatacgatgttttgaatttacaaattttttttcgtgaaaactgttgtttttttctcgggccgtttgttcgtccgtctttttatgtacatttgtagaagataggatgtacttgggcataacccgattatatgcggttctgcatgggacattcgttatatcttgtttagaaaaaatttcggattcgtatgaaacgtgtgattctcctttttcttgtttttgccggattgactttcggatcgtgccgccggcagaccgtgatgccgcaattcgatatcgtggtgacggataccgtagcggtacgcggcggaataccctgtcgcttccagtatgcctttacctcgatcgccaatgccgacgaagctccggcattgcaggcgatccaggaatccaatatgctctatttcttcggactggagcatttccagggcggggtgcaggaggctgtcgattggtctatcgggcagttcatggacgagtatatcggtaccctggatgagtcggtaccccagtgggaaaccgaaatggagatggcggtcgagtccgaggcccgtgtggtggatacgttgctggtctatacgatttcgagttcgaactatacgggcggtgcgcacggtatgtacagcatcaattgccataattattccattgcgggcggttatgagctggctttgtccgacttgttcgatgcggcacgacaggaggctttgatcgggttgatccgcaacaagctttacgaacagttcggtgtcacgggggacgaaggtctggtggcgcagggattttttcccgaatacatttccacgaccgagaatttcgaagtgaccgaggacggcattacgttttactataatccttacgacatcggatgctatgccctgggcggtgtcgaggtgcatatcacgcgcgaggagatgcaggggttgtgacaggatgtgggcgtgcggctctccggcggtagtcgtcggatgaaaccggtataaaaaatggaggcgacaagatatcttgtcgcctcctcccatcaaaaattaaccctaaaattatccctttccaagaatgtccgaaagatagcaatcgagataatacagatctgcatcgtcgccgatcacttcgttcttcatcagttcttcgtcggagatagaccttgatgtatccgttttgtcgttttcagtcataggaggccttttagtatttcttttttagttcattacattaaagaaacggatggcctccgggctttattgcatacggattaagataaaataagttctttttccctaatcatgcgccgcaggttgataagtgcatagcgcatgcgtcccagcgctgtgttgatgcttacgccggtttgctcggcgatctccttgaaactcataccggagtagtagcgcatcatcaccacctcgcgctgctcctccggaagcagttcgatcaggttgcgcacgtcgctttcgatttgcgaggagatcaattcatcttcgatcgtcttttccgcgaaacgcagcgatcccagtacgttgtagccgctttcgctttcattgacctgcttgttctgcttgcaggcgcggaagtggtcgatcacctggttgtgcgcgatacgcagaacccacgaaaggaacttgccgttgtcggtgtagcggccttcgtcgatgacgcgtatgactttgatgaatgtttcctggaagatgtcgtccgctacgtcgttgtccttgaccatcatgtaaatatagtcccgaacccgacgcttgtggcgctcgatcaatttggaaatggcactctgatcacccgaacgataattattaagcaagtgctggtcgcttaatacttgaatgttcatactcttttctcctgaattagttattaagagtagaatgtttcgataggcaatcctttaagttgttaaattactgttttttgatataccgaatacttgtttcggcatcttttgtgtcggaaaggtagaaataattatccaaaaaaacaaactttttagatttctatttttccggcagggtgtcgatgaattaacaataactatgccaaaaataaaatctatcagatatttttatctttctccgagtccgaagatgaaagtttttcagtttcgatcggttctacatgaatggaaatgagcgtattggggccgaatcgctctttgagctggcgttcgatatcgacggtcagttgatgggagcggagcacgctcatccgaggatcgacgcggatatgggcttcgatggcgacggtggctccgatacggcgtgtgcgcagatggtgcggttcggtcacctccttcgagtgagtcaggatgttcagtatctcctgctcggttgcggcgggaagggcatgttcgagcagttctccgaggccgcttcgcagcaggtcgaacgcgatcttgaagatgaagaccgaaacgacgagggccgccagcggatcggcgatgcgccacttgtcgcccagaaaataggcgagcccgatacctgtcagggtgccgatcgacgaaagtgcgtcgctgcggtggtgccaggcgttggctacgacgctcggactgtccgtctgacgtcccacacgaacggtatagcgatacaggacctctttggcgacgatcgaaattgcggcggcgatcagggcgatcgcgcccggtcgtccgattatttctccggtcaataccagacggatgttgcggatgctgtcggccaggatgcctccgccgacggcgatcagggtcaggctgatgaggatggaggcgagggtttcgtacttgccgtgtccgtagttgtggccggcgtcttcgggtttggaggagatccgggcgaagatcagcacgatgacatcggtcgccagatccgatatcgagtgcacggcatcggcgatcatggctccgcttcggccgaggatgccggccgcgagtttcaggagggagagggcgatattgacgaccattccgatccaggttgcccggtaaatttttcgggtgcgttccgtgggttgattcatgtccggttgctgtttgctccgggtggtgtcgtacccggatgtaggttatccttgcattttccgctccacgacaggatgtcgagccggataatctctgtccggtggaaagacttttcgacatattgcctgccgattgtcttgtactccggggaatatttgccgatcaaatggttcagggccctccgacgctcctccgctgtgagccccgtgcgggcccggcagtcgagcaggatgctttcgtagaaggtcgtaaaccgtgcgggcagcacctgcgttttgccgacgatgcagaaagtgacgcggtcgcattcccggaggcagtgcaacttgcgtccttccggggcacagtggatgtagatcgcgtcggcttcgtcccagacatagttgaggggcactccgtagccgccgccttcaggacgctgcatgcagagtatgccgtattcgccccgccgcaacagctccgtcgcctccggttggtcgagcaagcggtcctgccgacggactgaatcgttttgatagttcatgacctgtttcctgcaaaaacgaagacggacacttctctgaatggcatccgtcttcgttgtgataattcggtatcgacagcgtttagtagctgcgggcgaaaagtacgcggcgatgcgacggtttgccgctgaatacgcatttgccctcctcctcgaccgcatccatcgggatgcagcggatcgtggctttcgtagcgtccttgatcgccacttcggtttcgaccgtcccgtcccagtgggccgagatgaagccgcccttgttttccagcacatcgacgaattcgtcccacgtgtccactttggtaatcatcgaattgcggtagtcgagcgccttgcggaagatattctgctggatttcgtccatcagggccgccacccggtcggtgagtccctcctggggaacggtttccttttcgagcgtatcgcgccggaccagttcgatcgtgccgttctccaagtcgcgggggccgagagccagacgtacggggacgcccttgagctcgtattcggcgaacttgaagcccgagcggacgttgtcgcggtcgtcgatcttcacggagagtcccttcgacttgagctcttcggcgatggtgcgaagacgttctacgatctgccgcatctgctcctctcctttataaataggtatcaggacgacctgaatcggggcgagtttcggaggcagcaccaggccgttgttatccgagtgagccatgatgagcgctcccatcagacgggtcgaaacaccccaggaagtggcccatacgtattcgagtttgccctccttgttgatgtattgtacgtcgaatgccttggcgaagttttggcccaggaagtgcgacgtgccgctctggagggccttgccgtcctgcatcagcgcttcgatcgtgagggtatcgaccgcaccggcgaaccgttcgttcggcgatttgtgaccgacgattaccggtacgcccatccactcctcgacgaatttttggtaaacgtggatcatccgggtagcctcctcgatggcctcctccttcgtggcatgggccgtgtggccctcctgccagagaaattccgccgtgcgcaggaacaggcgggtgcgcatctcccagcgtacgacgttcgcccactggttgcagaggatcggcaggtcgcggtaggactggatccagcccttgtaagtgttccagatgatcgtttccgaggtgggacggacgatcagctcctcttcgagtttggcatcgggatcgaccacgacgcccttgtcctcgggatcgtttttcaggcggtagtgggtgaccacggcgcactccttggcaaagccttccacgtggtcggcctctttcgagaagaacgacttggggatgaagagcgggaaataggcgttctggtgccccgtgtccttaaacatcttgtccagggccgcctgcattttctcccagatggcatagccgtaaggcttgattaccatgcagccgcgtacggccgaattttcggctagaccagccttgaccaccaggtcgttgtaccattgcgagtagttgtcctcggctttggttacgtctttaagttcctttgccatatcttatttattttttaacttccgggaatcgtgtcaccggcttcggagccggcgtatgtcggttagtcggcaaaattaacgatttatgcagaaattcgcaactgcgctccgataaatcttgaatttgcccgctgcgaggggccgctttgccccgtcggtcgaaggtgccgatggctcgttttgcgtttttgaagtcggtgcgttttcttctctggcccgaaatccggtctgtcccggataaaaaacgacaggacttccggtacgggaggttctgccgttgcgatatgtcgtgcgaaactaaaagcggaagctgaggctcagggccgcgaagtggcgcttgagtttggtattgtagatgccgctgccgtttatgccgctcggagattcgaagtagtagaggttgtagtccgtctgctcggtcgaggaatagttgtaggccaggtccagtgcaacgcccggagagagtaaaaatcccaagccggccgaatagtagagcatctgcttggtcatgggggccgctgaaacttgctcttcgtcctgcagcatggaccccatgtagccgaaaccgccccggatcgccaggaacggcagcggtttgaactccgcgcctatgcggacgatattggcgcctttgtaccaggagcggaacgtgtcgttatagatttcgttatcgccgcccgcgggattgtttttcatccgcatcccgttgtaccagtcgcgctcgtaatccacggagatcagaccccggttgccgaaggcgtaggagatgccgaacatcaggcgggccggcgtggtgaactcccagttgtaaccgcccgtatcttccagtacgggagagagggcgtccgtatattggttgccgtccggacctggtttgagaccgtcggggtcgttcgggttattgacatgcaccccggaatcggtgtaggcctgataggtacggtcgatccagtaataggtcggggtgtggaaagcgaagccgattcgcagattctgaatgggccggtagatcatgccgagcttgaaattgacccctgcgccgtccaggatgacttcctggttgaagttcgaatagagcagttggtagtccaggttcggatcggtgccgttgccgggatagacgtaatcttctccgtaatagtaggttttgcgttgatacagggactgaatgccgaacgtggccccgatatagaacttgttgttcaggttgaatcctgccgaaatgtcgtattcgcctatcgagccattgcttacgacggtcgtgtagttgccgatatcgacgttgttgccgatccaggtcggctgccacttgccgccgatttgatccgtaaatcctgccttgtatccgaggatcgaaccccagagccgggggttgaagttgctccagttgaagccgccggtgatctgatccctgttgataccgctgtattgcagcatgtcggagaaaacgtcggcgatcgagctgacattgccctgtgtataataggagtattggtagttgaggtcctgcaggcggttgtagccgaacccgatattgacgctcacgagcggtcccgatccttcgtaaacattggccgtaaagccgaagttgccgatcgaaaaccggtttttactgttggagttgaatgccggagcgttgttttccgcccgtgcgaaactcatcagaggcgtgatcgaaatttcgttgcgccggtacatgcccaggcccgccgggttgatcgccatggacgtaagatccgctccgagggaggtgaaggcgcctgccatggccatcgaccgcgccgttccgaggctgaaggtcgtttgcgagagttcgaagaggtcggacggggtgacgatgtcacggtccatcaataaacctccggagctttgagccgacgccggggcggttgcgaacaaggccgctgaaagcagcgccaaaattccgagatgtttcataacaaaaatcgttgagttgttttttcgtttccggcgttcgggacagcaggggcggaaacgatcgccgctgccggtcgaaaccggtcgttgcgttcatattcgtttgccgcctgcgtgtgcatcctgtgcgccgtccgtcgaaatttgccggggtgatcgtttaacggccgtaagagttacgtccgctgctgtttccgccgcggacccctccgcctccgcccacgaagctgccgctcgaacctctgttcggttgcgagggggccggggtgtaagtccctctgttcgttgtcgaactgcttccccggtaggagctgctgctgcctccgaacgaaggattgcggtaggtcgagctgcctcgattgactgacgatgagccgcctcggaagctggagctggaattgctgttggtcctgccgccccggaagctgccgctgccgaccgtagtgccgtttctgtagccgttgttcaaactaccctggccgcgccctccgaaactggtcgatccgatgttcgatcccgctcccgatccgtaccggtaggtagagcggtgtacgacgttgggccgatggtgcggcgggtacgggtggtggtgatggccgcctccccagccgggataataaccccagtaagggtaatagcctccccagtaaggataaccccaataggggttgtagctgtaataaggccagccgaaaccggggtatgcccagggatagggattgtaaccccaactgaaataccagtcgttataaagacctgcgctccatccgaagctcactatgctgggagaaccccatgtgccgaacatcgaagtaatgtatttgggttcgacccacacttcgtcgcccatgacgatgatgttgtaaacggccgggtcgtaggccgaaacgaattggtaggtgccgttgtaacgaaggttgaaatagctcgtcggcatctgataggtcggggagctgaatccccgcaaacgacgggcataggcgctttcgtacgtgtcggccaacacgccctggtaggagtcgtccgatgcgtagtatgcggcttccgcctgccgggcctctatttcggcgcgacgggcttccgcttcggccttgcgagcttcggctatcgcctgtttttcctgggcgatgcgggtgacatcgtgttccgcgtacatgtcgtcgatgttgtaggcgccggattggtagagtgccggcgaacagcttgccgcgaagagcgacacgagcagagcacctattttgaaatttcggtttttcatcgtgtttcggagttactgtgtggttatattttcaacgaaaaccgtaccggttttattgccgatgagtcattatctcacaaaagtagcaataaaatcgggaaatacattgagcgggtgaaaatagaaattcgaatctttttttgttccgaaaatgctttttttgcgaaaaatagctatatttgcactccgaattaccggccgaagggttggtgatggaccgggagagatgccggagtggtcgatcgggccgcactcgaaatgcggtgtacgggcaactgtaccgggggttcgaatccctctctctccgcaaatgaccggaaggtcggttgggttgcaaacgaatgtttgcaaccttttttattttcggggtggacaaatttgtccggagcggtttgaagataaaagttggtcgtatggctggcaggcgaaaatcaggagttcacaaggtcgcctccagcccgacggagggaaggacgggcggcaagtggtaacgcgaagtcgagcgcgctctgccgaagagtggaaacggggcgaaatgttgtacggaagcacagcttttttgtctctgcaacgcggcaaagtcgttcgaattagctatggcgtctgcattgagcgtgaggctgtaaaggggctggcaagttttttatcttccgagaatcgcat

SEQ ID NO: 10424 - DNA, 17763 bp, Unknown
  gut microbiota DNA sequence
aggagtaggagtaggagtaggagtaggagtaggagtaggagtaggagtaggagtaggagtaggagtaggagtaggagtaggagtaggagtgtcggtaatcgccccgttttttctgtttcggcttggtttccgattcccgctcttgcgacctcttttttggcgctcgatcgtgggcttggccctgtttgtcctgtatctttctgtttttttgttttttatcccgaggctctttccgaaccggcgaataaaaagacggtgtatcataacaggcaaaccgcttcgttattatcggtatcgcggctcgattatgtacggtcaggacacgttcttcgccgtgaacctcgatgtctgttcttacatacctgaaaggggatgcgccaaatttctcaatttgacacatccccttcgggaatgaatccttcctgaaattagtatcccagggttttcgcagccgcgtaggaaattttcagggcattcgcgcggcgaagttcctgcttgatctccgtgatacggcccatagtcgtatatcggtcggccttcagacagatcgtcatcaaggcacgctccgactcattgagcttgtcacgctcggcagctacgaactggccgatatcctgagcggttttgaaggcatcgttgagctgaatacggggtgcaggaccgtactgttcccgccaaacgccgatcggctctccgatgtggatgtaacttacgagtgatttcttctccagtttctgcacctcggttgcttctggaacttggtattttacatgtaattcctgatcgcgcatggtcgtagataccatgaagaagaacaggatcatgaagatcacgtccggcagcgaggcggtagagatcgggggcaaacttttgttgcctttctttttaattactgccatactacttttttcctcctaaatctctgggttctgcttccgagatactcatgggaacggctttggctacgataccgcgctccgcttctccgagatccgagaatttcatttggaatttattcttcgaaacttcgtcacggatttcgttgatcgcacgcgtcagctcgttctgtaccatgatgtagatctgatattgggtatctttggtcgtttgcagcgagagtacgccttttccgaccggatagctccatttgctgccgtcggggagctcgaactcctcgacctctttttcgggcaggttgggatcgtccatcacattgaggaggaagtccttcgcccggtccttcaactggtggatatcgacgtactcctgttcgccggccctgcccacgaagatatcgccgcggccgttcaccagaacgggcagaaggttacgtatcttcaccttcatatcctcgaccttttgatcctcggggggcatcggcggcaggttacgggcgatacccgtatcgacgttcatcgtcgtagccaccaggaagaatatgagcagcaagaaagcgatgtcggccattgaaccggcattgatctcctgtacttttcttttatctataggcatcgttcaaactctatttgaaagctttgtatatctctgtgaaaatagctgtcagaacagcggcacccagagctacgtaggttaccagaatgctggcttccgtgataacggtttcaggatgcgggaagaagcctccgttcgcgacgtccggaatttcgatcgtatgtccgcgggcgatcaggtaggctgccgcgacgatgacgatgatcagaagtgtcgaaagcagcgttcctttgatgcctttggaactgttgaccataccccaaacggccgtgaacagtgctgttgcaataccgactgcgatcaggatataactccagatgaggttcaggttgatcgcctcgttgctgccgccggccaccattgcatatacggtcagaatcaccgtaatcagcaggatgacgcccagcaatatgtttaatatttttttcataatagggaataaagtctttataagtgcgaattatttcttgtaagccgtcaggatatccatcagggtgatggacgaatcctccatatcgtttacgagcgagtcgatcttggaaacgatatagttgtagaacaactgaagaataaccgcagcgataagacccagcagggtggtcagcagggcgaccttgataccgccggcaaccagcgtcggagagatatcgcccgcagcctggatggcgtcgaacgcctcgatcatacccacgacggtacccataaatccgagcatcgggctaagtgcgatgaacagaccgatccagctcaagcccgactccatgcggccggtctgtaccgaaccgtaggaaacgacggctttctcgacactgtccaaaccctggttgtaacgatccagaccctgatagaagatcgatgcgaccggaccgcgcttgttgcggcaaacttccttggcagcttcgataccgccctttttcagcgcttcttcgacctgtgcgatcagtttcttggagttgatggtggaaaggctcaggtaaagcatacgctcgatggcaatggcaagaccgaataccaagcagaggagcaccggaagcatccactcccaaccgccttcgaggaacttctgcatcagcacctggtgcatcggcttagcttcggcaagctgagtgtccgaagccggaacttcgtccactacggtttcttcaacgactgcggtctcctcggttgcaggcgtagtcgtctcctgggcgaaagcgttaacagtaccaagcgagaagatggcgactgctacaatcaaaaaaagttttttcatggttgtttaattaaaattttgattagttgatcgttttttcgtttgcgttttttatttcaaaaaatgtaatttttttttgtcctgtctggcttatcgcggttcaaattcgttttattttagcttttttcgacaatccggctgtctggtcggaaaaatgccccggtttctcttttcggcagtaatattctctgcaatgaattgagcggtaatgttttatcctttttcggacagtctgcgtgcctctctccgagaccctgtcgatgcgatttttagctccgaaatatacaaaattattttcgtacgcacaatgttttagtcggtaaattctcctttgaggggcgtgcggagcaggtcgagcgtttgctcgcggggcagttcgagtccgaggacgtacatcaattttgtgacggccgcttcggtggtcatgtcgtggccgcagagcacgccgatccgctgcaggcggagtcccgtttcgtagagttccatcatgacccgaccgccccggcactgcgtgacgttgaggacgatcagtccccggtcgatcgcctcttcgagcacgcggatgaaccattcgctggtcggggcgtttcctgcgccgaaggtttcgagcacgacgccccggagcccttcggccgagagcatcgcgcgcagggtccgttcctcgatgccggggaagagcttgacgacggcgatacctccgctcaggcgggcggcgatgtgcaggggttcgtcgtagcgctccggctggagaatgtattcggtgtggtaggtgatattgacgcccacgtcggccagggccggatagttgtacgaccagaaggcgctcaagtcttccgaactgcgtttggtcgtgcggttggcgcggaacagacagttctggaaatagagcgacacttcgggaacggcggggcggccgtcgatgcgggccgaagcgatttcgatggccgtcatcaggttttcgcgcccgtcggtgcgcagcacgccgatcggaatctggctgccggtgaagacgacgggtttggccaggttttcgagcaggaagctcagggccgaagcggtgtaggacatcgtgtcggtgccgtgcagcacgacgaacccgtcgtagcgggcgtagttgtcgcggatgatcgccgccaggtcgagccagttgcgggggctgacgttcgatgagtcgatcacggggtccatcgtgaataccttgatgccgatgttcaggctttggagggtcgggaactcctcgaagatgccgctgaagtcgaacggtacgagggcgccggtcgtcgggtcgggcttcatgccgatcgtgccgccggtatagataatcaggatcgaaggtttcatatcgattcggtagggcttgaatggtcgtttgtcgtctgtcgcgccgcgtcgaagccgaacatccgccgggcgttgcgggtcgtggctgccgctacctcttcgggtgtcgtgcctttcagcgctgcgattttgttgcaaatataaggaatatatccggattcgtttcgctggccgcgatagggaaccggcgtcaggtagggacagtcggtttcgagcaccaggtcgtcgagctccatttcgcgtacggtatcggccagccggctctttttgaaggtcaccacaccgccgatgccgaacaggaagtcgccgcactccttcaactgccggtaggtgtcggcgtcttcggcgaaggcgtggaaaacaccccgcaggcgcagccctttttcgcgggcggccttcgtttccgtttcgacagtgcggcacatatctttccaggccgcccgcgtatggatggcgacgggaaggtcataggtcgcggccaggcggcactgtttcgtgaatgcctcgagctgttcggccttgaagcggtcgtcccagtagtagtcgagtccgatttcgcccacggcgcagaatcgtccgacgccttcgggtggcgagcagaggtagcgttcgaccaacgccagctcttcccgccaacggggattgtcgttgatggaggtcgggtgcagccccatcatcggggtgcagtggtccggatagcggcgcacggtgtcgaagaggcgcccgtggctctcggagtcgatcgccggcagcagcagccgctccaccccggcttcgcgggcgcggcggatcgcctcgtcgcggtcggcgtcgaactcttcggcgtagatatgcgagtgggtgtcgatcagataattcaatgtttcggaaattttgtcttaaaatattttgtttatagagttggtgtctcgttgttctgattcggtgggtatattatttaattcggatttttttgcttttatttcatcaataatgttgtttatttcctgaattgaatctacatctttactcaacaagtagtgagttgtacttgatgtactgccatatccgtttccgctgcttccagatacttttacatatgcttgctcgaatttccaacccaatgcggacataatgttaagtgcttccacccgggaatagaagatttcagctttttcattttcgttttcgagtctgatatctttctttttattgcgttcttgcccgtaatcgaggtatattcgagtttttttctgacttacgatttgttcaataatttcacagaaaattttgttttgtgcaaaagtgaaactgattgggctgatagtaaataaaagaaataagatgacgaattgtttcataggattgggatagtgtattttgtatttattttttattagcgtagtttcatatatcggttccccggaagctgccggacggctccggccatttcgagtcccagcagcagggccgaaagttcgccgaatccgagccccgagagttcgcaaagctcttctgcggatatcgggtcgtcggtgcggaagcagcccagcagcccctcttcgtcgcgcgtgagtgctgcgggagccgctgtcggccggtcgatcagatcgccggggcggttctggtcccacatcatttcccgcacgatatcttcgcccgtgcataccatttgggcacgctgggtccgaatcagcagattggctccggccgaggcgaagtccgtcgcgcgtccagggacggccatcagcgtgcggttgtagccgtccgccagccgtgccgtatccatcgacccgccttcgacgggcgattctacgacgaccgtaccgccgcttatgcctgccagcagacggttgcgggagtggtaaaagttgccgttctgcctggtttgggagtgcagctccgaaacgacggctccgccgtgttcgatcatatcccgggcgacggccgtgtgctgtgcgggcgtgatgccgggaagggccgaggcgatgatgccgacggtcggcatgccgaaagcgagcgccgcacggtgacaggccgtatcgatgccgaaggctaggccgctcacgatcaccgtatccgccacccggtctgccagttcgccgatcagccggtcggccatctgttgcccgtacggagtcatccgacgcgtgccgaccatcgtaagcgtcgtcttgccgagcgcttccggggaacccagaacatacagcacatgcgggtagtcggcggtttcgcgcagcagggccgggtattgtgcgtcggtggaggcgatgatctcgatcccgtgtttgcggcaatgtttgacttcgcgctctgcgtctgcgaacgctttcttttggaggatcgcccgcgcgagttccggtcggagtcgggctttttcgatgagttcgtcggccgaagcggagaaaaccgcctctgccgaaccgaatacgtcgagcagatggaccgcccctttcgggcctattcccggcgtgagggtaagggctatgtctggaatttcgcgcttcattttccgtatccggcaatccccgaatgagttcggctccgcctcttttgggcgaaaccgtaggttccggacccgcttcggggcttcggttagcggttgtaaagataggtttttgccgataaaaatgcaaagttgcccggaagttttgcagaaaagagaaatcttcgtatatttgcaaacccgatccagggaatcagggtctgatggccgagtggctaggcaaaggtctgcaaaaccttgtacagcggttcgaatccgcttcagacctcacagaaaccgcgttgcagatagctgcaatgcggttttcgtttggtataaatataatatgtatttttttcgaggaatggttgccggtcgttttcgattagccggttatgaggttatggatgaaaattatgatttcccattgattcctccgtatccattctactactctctctttgttgcagtttattttttaccgggcagcataggctgagcaggaccgttttgtcggttagtcccatatgcagcgatccgactttcatacaaggatatatgattttcagacggttattttgcggttgtatgcaccggtattcggaggaaacagctatgaaaacgacaaatttttgtcgtttttgtgtatattctttatacatttggaaccgattttagacacaattatttcgattgtgacaaaaaagtgactatttgtacgaaatttgtgttcttcagacgtattaaagtgttgaaaatatggacaagcaaaagatattcgttgtcgatgacaaggacatgatcggcaaaatcatcatggcctgcctggggcgggactacgactgtcgctatttcgacagtccgaagcctgtactcgagcagatggaggccggagatttgcccgatctgattatttcggatatccgtatgcccgacatgcggggagatgaatttctccatgccgtcaagagtgacgagcggttccggcatatccggatggttatgttatcgagcgaagacagtacttcggagcgtattcagttgttgcaggacggagctgaagactatatcgtcaaacccttcaacccgatggaactgaaggtccgcatcgaaaagttcttgaagtgaatcgcctccgaatcgggtgcagatcgtccgtgtaaattcggttccgcgtcgggatacgcgctgtttttcggccatagtcggctgtcgttccttgccttcgatacggttgccgtttcggaaaatttcttcgtactccgatgaaatctgttagcggttatctacctcgcttgtgtgtcacaaggtctgttttatggaaaatctctcggtcaatcctgaaaattataagattcttgtcgtcgatgatattgcgaccaacgtcctgttgctgaaaaccatacttggaaaggcgggatacaggatcgtgactgcgacaggtggccgcgaagcgctcgagaaggtcgaaagcgaatctccggatctgattctgctggatatcatgatgccggacatgaacggttatgaggtgatcgagcggctcaaggccgacgagcgattctgccggattcccgtgatttttctctcggcgctccacgattcggaaaacattgtcaaagggttcaagatgggggccagcgattacgtgtcgaagcctttcaatcacgaggagctgattacgcgggtggcgcatcatatgtttattgcagaggcgcagcgcgtcatcgtgcggcagaacgaggagctgcaggagaccctggccagccgcgacaagatgtattcggtgatcgcccacgacctgcgctctccgatcggaagcctcaagatgctgttcaacaccctgctcgacagcctggatgcggagcgggtcggagccgggaacctcgatatgcttcgcatgggcaacgacattgccgaagacaccttttcgctgctcgacaacctgctcaagtggacgaagtgtcagaccgggaggatgcatacggtgtatcaggatgtcgatctggccgaagtcgtactcttttcctcgaaaatttcggagtcggtggcccggaccaaaggaattgtcgtcgaatacgacattcccgcgccgattcacgtgcggtgcgatgtcgatatggtcaagacgatcgtccgcaacttgttgagcaatgcgatcaaatacagcccggaaggaggagggaagattatcgtttccacggccgaaaccccgacccacgccgttgtccgggtgcgtgatttcggagtcggcatcaagcccgaagacctgaataaagtgctcgatcctgcgatgtatttcaccacttacgggaccggaaaagaggaggggtcgggactggggttgcagctttgcctggacctggtgcatcgcaacggcggcgagatgaccgtggagtcggtctatggcgaaggggcgaccttcagcttcacgatcgccaaatctcctgcggacgaacgacccgcctcggccggggagccggtttgatgtttaatctctgttttttcgcttcggggtccggttcggcccttttttgttgcgggcgggttgtcgctggccgaaccactcttcgaaccagttttcggggagttcggaagctctcttcgcagcggttttctccggtgtgtacgttttgctgctcgctttgacggttgttgcgggtttcttcccggctttcgtgccggacgtttttgggctgcggacggatttccgatgtccgttccgatcgtcgggcgcaccgaaagcctcctgcacggaggagtcttggcgataggattcccggctttcgggtttccggccggttttgcgtccggatcgggtgtcggactccctgcggcggtgggattgtcttccgccggatgtgcgggccgaagggctgtctttcgatatttccgcgatgggacgtccgtgcgagagcttattcaaagtcctgacgactttttcggcttggtcgaagggaaccgttgcgaacgagaagtcctccatgacccgtacgtcgtcgatgtcgtggtcggagagtccgcactcctgtttgaggagccggaccgttttgcgggtgtcgtagccgtcgcgggcaccgaaggcgaggaaaatccgggccttgcccttgcgatcgacgtcgatcgagcggatttcggggtagctgctctcgctcagctcgttcttgaaggccaggcgcagcagggcgctcaaggccacttcgggcggataactctccagtagttcggcggccatccccgtacattcgccgtaactttcgctctcgacgatggcgtccagatcttccttgatcttgttgcgcttggtggcgatgatgtcggccggcgtggggagctgttccagcttgatgtcggccttgatcgtccgcttcaggaacccgaatttgcgcatctcggagggcgagatgaaggtgatggccgttccctggttaccggcgcggcccgtgcgtccgatgcggtggacatagctgtcggaatcctgcggcagcgagtagttgattacgtgcgtgaggttgcttacgtcgatgccccgggccgccacgtccgtagccaccaggatattgacctgttttttcttgaatttgcccaggatcttctcgcgctgggcctgcgaaatgtcgccgtgaaggacttcggccgcatagccgcgttccaggagtttggccacgatatcgtccgcgcccgttcgggtgcgggagaagacgatgccgtagaactcaggttcgacgtcgatgatgcgggtcagggcgtcgaatttgtcgccttcgcgcacctcgaaatagatctggttcgtcaggtcggtcgtgacgtgctgcgattcgaccttcaggaggtcgggttcgtgcatgtagttgcgggccagcgccgcgatgcggtcgggcatcgtggccgagaagagtagcacccgtttggggccggtcatggcgtgcatgatctcttcgatatcctcgatgaaacccatgttgagcatttcgtccgcctcgtcgagcaccaggtaggcgatcgccgagaggtcgagcgtgccccggcggatgtggtcgaggatgcggcccggcgtgccgacgacgatgtcgatgccttttttcaagcgccgcagctgttcggtcatcgaggcgccgccgtagatcggggcgatcgaaaggtcgtgggtattgaacgaaatgagttcctgcgtcacctgcagggccagttcgcgggtcggaacgaggacgatggcctgcggaatattccgtcgggaagtcagcatctggataatcggcaggccgaaagcggcggttttacccgtgccggtctgtgcttgtgcgatgatgtctttgtcggtggtgagcaggtggggaatggtgaggctctgaatggccgagggggtttcgaacccttttttggcaatggcagtaagtatatcgtcggacagtcctaaagccttaaattcttctaattgattcatttatgatgatttgtcgggcaaaggtacgccaaattatccggtttgacgacttttccgcgaaatcttttgtgacggggtacgtgttttttcgggttcgagcatagcccctgttggcttgcagatgtcggggaggggtttccggtgcattttatggcgggaaaaatgcctgttttcgatcatccaggctctgcggatcgttgcgggggccttcgttcggactggtggaaccgattgtcggcgaggcggcttttgttccggagggaacgaaccgggcctgtatttctgtgcaggcccggtctcttttatttaacgtaataccgcgtcgtcagatctctttttcgagggcctggatttcgtcgaggatacctttgacatcggtcaccttgagccgtccatagacccgggggccgatcatcacgaccggagcgagtccgcaggcacccacgcaccgcagcgaatcgagcgagaagagcccgtcgggggtcgtgccgccgacttcgatgccgagctggcgtctgaattcgtcgagcaccttctcgccgccccggacatagcaggccgtgcccatgcagaccgaaatcgggtatttgcctttgggcttcatcgtgaagaacgaatagaacgacaccacgccgtaaacccgtgcggccgagatgcccaactccagggcgatgagctcctgtacctctttgggcagatagcccagcgtgtcctgcacgccgtgcaggatgttgatcagttcgcccgggtcgttgccgtactttcggcagacgttctttatctcgtcgattctccgttgggagaggcatattttttccataacgtcttatttcttgggttccacgaccggtttgcggtcgtaataacgggtgtggagcagttcgtgcgaaagcggtccgcagggttcgccgaggaactcttcgtagagtgcctgaatgtcgggattctcgtgcgacttgcgcagcggtttggcggcgtcttcggcgtagagggcctcggcacgccgtttcagaagctcttcgttgccccggtgatagggttgcccgccgccgttgatgcagccgccgggacaggccatgatttcgatggcgtggtagggcgatcggccggcgcggatctcttcgaccagcctgcgggcgttacccagcccgtgtgcgatgccgattttgacgggtacgccgtcgaagtcgatcgtcgccgaacggattcccgccagtccgcgcagttcggtgaagtcgagtttcggaagcgtttttttcgtttgtatttcgtatgccgtacgcacggctgcctcgatcacgccgcctgtggtgccgaagatgacgcctgcaccggtcgattcgcccagcggacggtcgaaatcgctctcctccagttcgtcgaagttcatgttggcgaagcggatcatgtgggccagttcgcgcgtggtgatcgaaatgttcacgtccggatcgccgtctttgccgaattcggggcgtgcggcttccgatttcttcgccacgcagggcatgaccgatacgacgatgaaattccggcggtcgatgcccagcttgggcgccaggtagtttttggcgatcgcgccgaacatctgttgcggcgacttggccgtcgagaggttctcgcccagttcggggaaatgcttctccatgaacgacacccagcccggacagcaggaggtcatcagggggattttgaccgtccggtcgcccgcgagatacttgttcaggcgctggagcagttcggtgccctcctccatgatcgtcaggtcggcggcgaagtcggtgtcgaaaacgtagtcgaagcccaaccgacgcagcgctgtggtcatcttgcccgtgacgctccggccttccagtccgaaatcctggccgagggccacgcgcacggcgggggcggtctgcaccacgaccgtcttgccgggatcggcgagcgcctgcatcacctcccggatgttgctgttctccgagagggcgctggtcggacagacggctacgcattggccgcaattgacgcagttggtcgttaggatcggatcgttgaaggccgtgcagaggaccgaagtgaatccccggcctacgaccgacagggcgccgacggtctggacttggttgcagaccgtttcgcagcggcggcagaggatgcacttttccatgttgcgcaccaccgacggcgagaggtccatcatcggcttggtggtttctcccttgtacttggcctcgcggatgccgaggtctttggccatggtttgcaggctgcaatagccgttcttcgagcaggtgaggcattcgttggggtggtccgagaggatcagctccagaatggtctgccgggcgttgatgacgcggggtgtgtgggtgcggacgaccatcccctccgtgcagacggttttgcaggccggagccaggtttttgcgtccttcgacctctacgacgcagatgcggcagacaccggggtcgttcttgcagcccagctcgtgcaggttgaggtagcagagcgtcggaattttgatgccgatcgaagcggccgcttcgaccaggttggtgcccggggcgacctctgcggttcggttgtcgatggttagttttatcgtttccatgcggatttgtcttggaggagtggttagcggatgctgattgcgccgaacttgcatttttcgaggcaggtgccgcacttgatgcagcgggcctggtcgatggcgtagggttgtttggggatgccgctgatggctcccggcggacacatgcgagcgcagagggagcaacctttgcaaaccttggggtcgatcacgaaactcatcaggtcgcggcagcggtgggccgtacagtggtggtcccgcacgtgggccacgtattcgtcccagaagttttccagggtcgaaagcactggattgggggccgtctgccccagggcgcagagcgacgagtcgcggattacgcgggcgaggttctgcaattcgtcgaggtcttcgtccctgcccagtcccctggtgatccggtcgagaatctccagcaggcgtttgtttccgatgcggcagggcgtgcacttgccgcacgactcatcgacggtgaattcgaggtagaatttggccaccgacaccatgcagtcgtcttcgtccatgacgatcatgccgcccgaacccatcatcgatccgcttgccagcaggttgtcgtagtcgatcggggtgtcgaggtgcttctccgtgaggcagccgcccgacgggccgcccgtctgcacggccttgaacttcttgccgttcttgatgccgccgccgatttcgaagatcacttcgcgcagcgtggtgcccatcggcacctcgatcaggccgacgttattgaccttgcccgccagggcgaagactttggtgcccttgctcttttcggtgccgatcgaggagaaccattcggcgccccgcaggatgatgggcggaatattggcgtaggtttcgacgttgttcacattggtcgggtagcccttgtagcccgattcgctcgggtacgggggtttcacggtcggttcgccgcgtctgccttccatcgaatgaatcagcgccgtctcctcgccgcagacgaaggcgcccgcgccgtagcgcagctcgatgtcgaacgagaagcccgagcccaggatgtcgttgcccagcagcccgtattcccgcgcctgttcgatggctcgcctgagccgttcgatggccagcgggtattcggcgcggatgtagatcagtccgtgcgaggcgcccgtgcagtagccgttgatggccatcgcttcgaggatcgagtggggatcgccttcgaggatcgaacggtccatgaatgcgcccggatccccttcgtcggcgttgcagaccacgtatttgcggtcggctttcgcatcgcgcgtgatcttccacttcaggccggtggggaaaccgcctccgccgcgcccccgcaggccggagtcgatgatctcctgcaacacgtggtcgggctgcatgccgagcactttggccagggctgcgtagccgtcgcgggcgatgtattcgccgatgttctcggggtcgatgaacccgcagttccgcagggcgatgcgcagctgcggcttgtagaacttcatgtgcttgctgtcgggtacgtgctgccccgtgtcgggggccgtgtagagcagccgctctaccttgcggcctttgacgacatgctcccggacgatctcttcggcgtcttcgggtttgaccgagacgtagaaggtgttgtcggggatcatcttgacgatcggcccctgctcgcagaagccgaagcagccggtgcggatcacccgtgtgcgctcggactctcccgttcggtcgagcgcccggcgcagggccgcgatgatctcctcgctccgcgatgcccggcatcccgtgccgccgcataccaggatgtagttattgatttttgccatcgggttggatgcttgttaaagattcggatcgttttccttcgtttcagatgcccggctcgacggtcggacctgtcgcctctttccgaaaattctcggattgccggacgcagtttatgcttcgatcaggccttcggccgtttcgccccggacgatttgccgctcgacgagctccgcgacgcgctcggcagtgacatggccgtaaagaaccggcctgcggcccggcagcgtgatttcgacggtgggttcgtccttgcagtgtccggcgcagccggtctgggttacgatgccccggatgcgacgggcggccagttcttcgacgaatgttgcgaggaccgctttggctccggcggcgatgccgcattcgtccatcgaaacccggatctggggcagctcatcgggtgtgttgctgttttcccggatctcgaggtcggcacgcagtttttcgcgcatgaggcgcaattcctccggagtgtttatttttgccatgttttccggtcgtttagagtttgatttttcaggtttgttcgctcctgcctgccgaaaaatatcccggaaacggagcttctttcgggatcgggtggttaaatataatcatttgttatcaaaataacaataaaaacggccggaaaaaaggggcggaataaaaaagcggtcccagagaaccgctggagcggggtgcggggtgtcccggaaacagccgggtggtcgatgaaggtcgctgccgggaaaaagtatagcgttatggcttgtccggtccgcaatgccgccgtccctgtttctgatgggcgttccggggttccgggatttgtaccggctcggccccggttgcggcagcagtcgagtgcccggccgcgcatcgtcgggccgttgcggtgaaagccgagtgcgcccccggacgagtatggcggcttgcgtatcttttttatcgtggaggattgtcgcgggagagtgattgcgaaaaaggctgcccattgacgggcagcctttcgattttgcaggccctgtaagccgggttctgtgctccggttgcccggagtccccatcatttatctaggacgccggtctcccggcgcctcaagcaacctaccccccggcattggacgagcaacccttgattgccggtatacatggtcttgcaacccacgagatgtactgtccgaagcgtatcgctaccttcgcggtgggctcttaccccgccttttcacccttacccctgcggggcggttattttctgttacacttgctataccctcacggatatcaagccgttagcttgcgtggcgctctgcgttgcccggactttcctccccctgttgccaggcggcgatggagcggacctgcggggcaaaggtatgaataagtcggggataaaagtaaatttattcatgttttatcacgcgaaaatattcgggacgcagtcgggacaagggaaaattttgcagggaatacgtctgccgcttttgatcggctgccggcgacaaggctatccgatttggtgcaggttgcggcttgtcgtgcgggaaagaggttttccttcagattgtaattattttataataaaaaataatgtatttattgtttgtttatgtgaaaattattataattgtattgggttattttgtataaatcaagtagattggaagatgataaggaatatattagttgtatttttattgctttttgttggtttttcatgtgatttgaaaaatagaaaaacaaaaaatttaagagatatttatggccaaaatcttattttacctggtcatgcgacatggaaaatagaaggtcgtgatacggtaataaacatagaaaatttagcacctaaacttgttgtatattatagtagtggaacatgtgcgccatgttcattaaaaggcttgcatcattgggggaaaataatagatagtgtagaattagtgggaccctcacttgaaatagtctttattattaaggcgaatagatacgactctttgttttttcatagtttaaattcagagcattttatatttcctgtattatgcgataaggagggggagtttgaagaaaataatcttttacctataaataaggaatataatgcctttttgttggattcaaataacgaggttgtatatgtcgggtcaccgctattaggacgaaaaatgcgaagtttatttataagtatagtaaaagttctgaataatgattatcgtaacggtgtcaatagtgacttgccatcatctgataccatagataatataagtagttaatcaagcggtgaatggcataaaataataggatttatacatattcatttaatatgttttatcactactgtcccgtaaaagtggataaatagtt

SEQ ID NO: 10425 - DNA, 38353 bp, Unknown
  gut microbiota DNA sequence
ctgtctagcatcaataactacttactaaaaacaaaatgacaaaagctgctggccaaaagaaaaagagatgagcattcttgctaccgatgtccgccatttcgacgttgtgaagaaagtttagtttagaacttgaatagatatacaacaaaccagactaaactcctatgattgaccttttgcgcggattacatttatctttcatatctttgggaaacataacctccgatatggggtaaaaagcgattttgtatttgatctttttttcttttggccagcaaaattccgtccccagaatgtccccgacacacttcatatcacgcacaattatctggacatcaataatataagctattttaatattttctgcatcggcaaataatttgcctaagtatcacatatcaaacaagtaaatctaacatatcacaaatatcaaactttcaactacattttttaattaaactattcttaatttaagaatttcaaatacggaacgggccacaaatagatctaattttcaacattttatacaaacagggattctcgagaaaaaatcttatatttacaaatattgcattttcagactgaataatggcattgtaaaatatttttctctcgacagcaccatttcacgaaaaataactatatttacgacatcaatacgataacaaacccgtattttacccgcatgaaaaacggcattacatccaataattcttactcgctgatcgtcggactttcggtttcgatgatgggtatgatgatgtcgatgcgcaggtgtaaatgccgggtgtaagattcgtcgtacgtgtatctcttaaatccggctggttcagccggatttttttgtttgtaacaatcccgaaaacataaatcaactttcaaaaccatgaaaaaacagaatctccgtttcgaaaccctgcaagtacatgcaggccaacaggccgatcccgcgaccggatcgtgcgccgtccccatccaccagacggtggcctacaccttcgaaagtgcggaaaagagcgccgccgttttcgccctcacggaaccggggtacatctacacccgcctgaacaaccccacgaccgccgttttcgaagagcgcatcgccgccctcgaaggaggtaccggagccgttgcgacggcatcgggcatggccgcccaaatgctcgccatcacgaacatcgcccaggcaggcgataatatcgtaagcacctcctacctctacggcggaacgaccaaccagttcaaatacacgctccgccgactcggcatcgaggtccgtttcgcacaaggggacgacccgaagagcatctcgacactcatcgacgaccgtacgcgggccatctacatcgaaacgatcggcaacccggccttcaatatccccgatttcgaggcgatcgccgaaatcggccgcaaacacggcatcgcggtaatcgccgacaatacgttcggagccggcggctacctttgccagccgatcaaatggggcgccaatgtcgtgctgcacgcagcgaccaaatggatcggaggtcacggcaacagcatgggcggcgtggctatcgacggcggcaacttcgattggggcaacggccgctaccccttgatcagcgaaccctcggaagggtatcacggattcaacttctgggaaaactgcggcgaccaggctttcgccgtacgggcacggtgcgaagtgctgcgcgacacgggcgcctgccagagtccgttcaactccttcctgctgctgcaaggactcgaaaccctctcgctgcgcgtacagcgatcggtggacaatgcgctcgaaatggcccaatggctcgagaagcaccccaagatcgagagcgtaaactatcccggtttgaagagcagtcctttccacgatttggccaagaagtacctgaccaacggtttcggcggcgtactgaccttccgcgtcaaagggtcggccgagcaagcttcctcgctgctcaaccacctggagatcatcagccacctggccaacgtgggcgacacccggagtctcttggtacaccccgcttcgacgacgcactcccagctcaacgaacgcgaactggtcgcttcgggcgtttatcccaacatgctgcgcttctcgctgggcatcgaacacatcgacgacctgaaagaagagatcggcaacgcattaaaacgactgtaaacacaatgaatatataccgtcataaccaacctttcgaattggagcggggaggcattctgcccgaactgacgatcgcattcagcacctacgggaaactgaatgcggcccacgacaatgtcatctgggtctgccacgccctgaccgccgattcggacgtggcctcgtggtggccgcacacggtcgaggcgggcaaattcctcgaccccgccgagcatttcatcatctgcgccaacatcctcggctcgcactacggcacgaccgggccgctgcacgtcaatccggcgaccggacgcccctattacaaggatttccccgaactgacgatccgcgacatggtacgggcccaccggctgttggccgacattctgggcattcaccgcatccacaccttggtcggcagctccgtcggcggctttcaggcggtcgaatgggccgtccaggagcccgagcggatcggcaagctggtcctgatcgccacggctgccaaagcgtcgccctggagcatcgccatcgacgaaacgcagcgcatggccatcgaagccgactcgaccttcggggaaccttacgccaccgccggcatgaagggactcgcggcggcgagggctatcgggctgctctcttaccgggggccggaaggctacgacctctcgcagcaggacgagagcgacgacttctcctctcaccgggcctgcacctaccagcagtaccaaggagaaaagctctgccggcgttataatgcctactcctattacaagatcctcaacgctttcgacacgcacgacgtcggctaccagcgcggaggcgtggcagcggcgctgcaacgaatcacggccgaatgtctggtcgtcggcatttcgaccgatatcatcttcaccgtgcccgaaatgcaggcgctgcaccggatgctgccgcgcagcacctaccatcagatcgactccccgttcggacacgacgggtttctggtcgagcacgaacaactgaaccgaatcctcaaccctttcatccatccaacccatgaataagatcaaaatcggccttttcggcttcggcgtagtcggacaaggcatcttccaggtactcagcaaatcccgcaacgcccatgcggaaatcgtcaagatctgcgtgcggtcgaacaaaccccgcagcatcgacgcgtcctatttcacgaccgatccggaagtgatcctctccaatccggagatcgacctgatcgtggaggtgatcgacgatgcggcggcctcctacaaaatcgtcaaggcggccctccagaaaggcatccccgtcgtttcgggcaacaaggccatgctcgcccgccacctgccggagctgatcgacctgcaaaagaaacacaatgtggcactgctgtacgacgcctcgtcgtgcggctcgatccccgtgatccgcaacctcgaggagtactacgacaacgacctgctgctcgaagtcaaaggcatcctgaacggttcgtccaactacatcctttcgcgggtgttcgaccaccaggagtcctacgacgcggcgctggcccaggcccaggcattgggattcgccgagagcgatccttcgttcgacatcgaaggctacgactcgctcttcaaattagtcatcattaccgttcacgcgctcggagtgtatgtccatcccgaccggatcttcacctacggcatctcgactatccacgactcggacatccggtacgcccgcgaaaaaggggtcaagatcaaactggtcgcccaagtggtcaaggtcagcgaccggaagttcacgatgttcgtcatgcccgaattcgtcacccccggcaaatacatctacagcgtcgatgacgaatacaacggcgtggtgatccggggcgaatgctacgaccgccagttcatgttcggcaagggcgccggcagcctgcctaccgcctcgtcgatcctgagcgacatcatggcccgtcagcacgactaccggtacgaatacaagaaacagcactacctcgaccgtccggagtacacgaccgacgtggagctgaaagtttatgtgcgatacacggaaaccgacgtactgaaaatcctccacttcgaccgcatcaccgagcaatatcggggcgaggacggcaattacgtgatcggctacatccgcctttcggagctgctcgccaagcgggaagtactgcggggcaaggacgttttcatggccgatttccagagcttcttccaagagctggatcgttagagccaaaagacaggccgccatcgaacgaacgcctcccgaatttcagattcgggaggcgttcgtttttcagagccacaaactatttactcgaacgggaccatcgcctccgccgcatcgtaatcggcattggtgaagacataagtccaacgctctttaggttgacgaccgttacccctcaaatcctcgaatacataattatcatcgatcgaagggtcgtaatgtgcgtcgtaattcggagggtacgaccgaccgtcgtcctggtaataacggacaccataagtgaatccaagcctcccatcgtcgaaaataatcgtcattttccaaatgtaacttgaaggaacggggcaaacacccataccattatccatcgcagtaaaactttctccaggcagtatcacttcatttttgaactcacaccctaaatcggattctacgaaaagagtgatcttatgatcgctgtcgttgacccacacaaaataactgattgcattgtaatcggtattgcaacctgccggagtccctgcggtaaatatcgccgacaacgcaaaaaataagaatttcctcataaacccatttttatatataaccgttacgttgaagccagctacgctcgtaaaaaagaaattcatttatttgattttctgtaaaatatgaccctgtatacttacgaagtgcactttcaaaatcattccaggttctataggctccaaacaaattcaccacgaattgaggcatcttaatttgatcgtagcagcgagaaggatagccaacaccctggttgtaatcatccaccaaatcgacaaacaaaggagtataataattattggttgtattttgataatcccattcttgccttgcttgacctgttatatccgagtttagagatgtttttttccaaccctgatttaaataatatgcttctcccatatgccatccggcataagaagcataactttcgagcaatatattccaagtaccatcgtacgcactgaatgtgccgccacgcaaatgaaattgacaataatgtcccaattcatgcaaagtggttcctattagtctcggatgattattcctgttacaattgccaacttgtataaaaggcattctccccacagaagtcggccaataattaaatcggccttgccacccaccaggatcaacggctaatgcaactattgatattctgttattaacaaaagtagaaattataaaatcgtgttcgccataatgataaaaattgactgcacgatgaatttcgtagcggggatccggagccgaagaagagttaatattaaagttcaaatctttaccacttcttaattctccataaattccctttatttcctctatccgtcctccttcctcagaacccttgacaatcgtccatttttcgtgctgaaaaacaaaacttaccgttgcctggttgtcgatcaatttattgttgatagcataatatccagttttgtctgtataaacctcctcaatattcgaacccagtgtaaaacggatttttagattctctagcggtacataacgctttaaatgagtatcgtaacatagtacttttccgcgcgggaatccacctggtaaatgtctctcttcatctaaagccaaagcaatggcttcttgctccaaaatttgtattgcctccgcactcaatccattctcaccaagagtaatatatttagggaggaaaacttcataaaggatttcaaaatccatttcaacagggaacgttttttcgacaggccaaacggcatataatacaggcaatataattgtcacaggctccactggtccatccttaatcataccgccctcgtaagtcacagaataacgcctctcctcatcttcctcgcaaaactgtgtccgggatttcgaaaacacaagactctgggtcgcctcatcaggtaatgacgtataattgaaaggcgtatacgcgatcttgatctgctcgtccagttcaaggcttcgttgttcctcttccgtttttggaaaaattttcaaggcatagtgggtagctttcagtttcaactgcgttttggcagttgctgagaattcttttcgcacactccgcgcgcttgctgcaaactcatcagatgccctgacaattttcgattcacccgatactatattgtcgtacgcctgctgaaagttctcaagcctgtacggatcattctgcggccggatccaagactgtgtctctatgatacaccgcatccgccaactcaatttcggtcgtaacagtagctaacatttgtttcggcgaaatttcgtccaacaaatcttcttcataattagcacaaccataagtgccgattaacaagataccaccaattaaaatatatagtaataattttttcataagcataatatttaggattagatggtcaaaacataaatgccgttcatgtgtattgcaatatattatataaaatttgaaaatcaaaattatccgaaaataatatttactctcttttttatacttatttgtttgtgaacatacgggtaataacctatctttgcgacggaaatttcgtttaacattctattattccgacatgcctcttaccaataacgtaatgattgtcagacacaagttgctgaccaatctcatcaaattgtggaaagacaaccagctcgtcgagcgaatcgaccgcttgccgatcgaattgagtccccgtacctcacgggttttgggtcgctgctgcgtacacaaggagcgcgccgtgtggaaatacaaatctttcccgctgatgggtttcgacatgtccgacgaaaccgacgaactcaccccgctgtccgaatatgcccgcaaagccctggagcgcaaagggcagcagcagaaagacaatattctctgcgtaatcgacgaagcctgctcgtcgtgcgtgcagaccaactacgagatcaccaacctctgcaaaggttgcgtggcccgggcctgtgccaccaactgcccgaaaaacgccatcgaattcaatcgtgccggcaaagcggtcatcaaccacgatctctgcatcagttgcggcatctgccacagcaactgcccctaccatgccatcgtctatatgcccgtaccgtgcgaagaggcctgccccgtaaaggcgattaccaaggacgaacgcggcgtggagcatatcgatgagagcaaatgcatctactgcggcaagtgcatcaacagttgtccgttcggagcgatcttcgaaatttcgcaggtgttcgacgtgctgcagcgtctgcgcgaaggagaaaagatggtcgccgtcgtcgctccggccattctcggacaatacaacgcccccacggaaaaagtatatggcgcgattaaggccatcggtttcgaggacgtgatcgaagtagcgcagggcgccatggaaaccatccgcaatgaaggtgcggaactcgaagagaaaattgaggagggacaggcgttcatgaccacctcctgctgtccttcgtgggtcgaactggccaacaagcatatccccgagatgaagcccttcatttcgagcaccggatcgccgatgtattacgccgcgcggatcgccaaggagaaacaccccgacgcgcaagtggtcttcatcggcccgtgcgtagccaaacgcaaggaggcacgccgcgacgaatgcgtcgatttcgtgatgaccttcgaggagatcaactccattttcgacggtctgggtatcgaagtcgaaaccaccgatccgttccccattccgttcgtttcgacccgggccgcccacggcttcgcacaggccggaggcgtgatgggcgccgtacagctcttcctggcggacaacaaccggccgcaggtcgaaggcatccaggtctccaacctgaacaagaaaaacgtatccctgctccgcgcctatgccaaatcgggcaaagccccggccaagttcatcgaggtcatggcctgcgaaggcggatgtatcacgggtcccagcacccacaacctgcacgatgccggtaaacggcaattcgcgaaggagctggctaaacgctaaatccgacggggctatgaaagagctcgtcgatcagttgaaacgcaaccgcaccctttccccggaagagttgcgccttctgctgaccgatgcgtcccccgaagagagagaatacctgcacagggcggcccgcgaggtcgcccgtgtgcatttcggaaacggagttttcgttcgggggctgatcgaaatcagcaattactgccgcaacgactgccgctactgcggcattcgacgcagcaatcgtctggcagaacgctaccgtctgaccccggaaaccgtactggcctgctgcgaagagggctaccggctgggattccggacattcgtacttcagagcggagaagacccggctctgaacgacgaactgctgaccggattgatccgggagatgcgtcgccgctggcccgactgcgccatcaccctctcgctgggggaacggacagaagcctcctaccgggcgttgttcgaagcgggcgcgaaccgttacctgctgcggcatgaaacgatcactcccgatcactatcgttggctccatcccgtccggatgtccctcgatcaccgcatcgaatgcctgcacaccctcaaaaagatcggctaccagaccggtacgggcatcatggtcggcagcccgggacaaacggtggacgatctggtccgggatctgcttttcatccgggagttcgaaccccagatgatcggtatcggacctttcatcccgcaccgcgacacccccttcggccacgaaccggccggaagcgtcgaacgaacgctcaccctgctgtcgattctgcggctgatgtgtcctgcggcactgatcccttcgaccacagcgctcgccaccctctcgggcgacggccggatgcggggtattttggccggtgccaacgtggtgatgcccaacctttcgccgccggacgaacggtcgaaatacaacctctacgacggcaaggccgctttcggtgccgaagctgccgaaggattggccgctctggagcgggaactcaacgaaatcggccgccacatctcgtggggccggggagattatcaagaatagcttataaaaatacaaagatatgtaccaagtcgcatcctccaaggcggaggagttcatccatgacggagaaatcgtcgaaacgctggcttacgcccgcgaaaatcgtgcgaaccgccccctgatcgaggcgatcctgcaaaaagcggccgaaggcaaaggggtcacgcaccgcgaagcggccgtgctgctcgagtgcgaactcgaagacctgaaccaacgcatgttcacgctggccaaacagatcaaggagaagctctacggcaaccgcatcgtaatgttcgcgccgctctatctatcgaactactgcatcaacggctgcgtatattgcccgtaccaccagaaaaacaaaaccattccgcgccgcaagctcacccaggaggaaatccgccgcgaggtaatcgccctgcaggatatgggtcacaagcgtttagcgctggaggcgggcgaagatccgcgcaacaatccgatcgagtacattctcgaatcgatcaagaccatctactccgtacatcacaagaacggagcgattcgccgcgtgaacgtgaatatcgcggctacgacggtcgagaactaccgtaagctgcgcgatgcaggcatcggcacctacattctctttcaggagacctacaacaaaaccgcttacgaagcgctccaccccaccggtccgaagagcgactacgcctaccacaccgaagcgatggaccgcgcgatggaaggcggcatcgacgacgtaggcatcggtgtactgttcggtctgaacacctaccggtacgatttcacgggactgctcatgcacgccgagcacctcgaagcccgcttcggcgtcggcccccacaccatcagcgtaccccgcatctgcccggcggacgacatcgacaccaaggactttccggatgccatttcggacgagatcttccgcaagatcgtagccgtgatccgcatcgccgtcccctatactggcatgattatctcgacccgcgaatcgcagcgctcgcgcgaacaggtgctggaaatcggcatttcacagatcagcggcggctcgcgcaccagcgtcggcggctacgccgaaacgacgcatgccgagcaagattccgcacaattcgacgtgagcgaccaccgtacgctggacgaagtggtgcgctggctgctggaactgggctacgtgccgagcttctgcacggcctgctaccgcgaaggccgcacgggcgaccgcttcatgtcgctggtgaaaaccggaaagatcgccgactgctgcacgcccaacgccctgatgaccctcaaggagtacctcgaagactacgcatcgcccgaaacccgggccttgggtgaaaagatgatttcgaaagaggttccgatgctcctcaacgaacgtgtgcgccgcatcacggagaagaatctcgcagcgatcgccgagggtaaacgggacttccgtttctaaaaattttcgcacgatgaacgagcaaactccccgcgccgaacggctgcatatcgttttctacgggcggcgcaacagcggcaagtcgtcgctgatcaacgccctcacgggccaacagagcgccgtcgtttccgcgacgccgggcacgacgaccgaccccgtactcaagacgatggagatacacgggctgggaccttgcgtactgatcgacacgccggggttcgacgacgaaggcgatctcggagcgctgcgtgtgcagcaaagccgcaagatgctggacaagaccgacctggccgtcttgctcctctccgaagccgtgccgcagaacgacgaaatcgaatggttccggctcctcgaagcccgtcatattccgatcgtagtcgtccgcagcaaggccgacttggttgccggtatgcccgatgcggaggctgaagcactcttcgggcaacggccgctccgggtcagcgcctcggatagaacgggactcgacgccctgcgcgaagccctgatccgcaacctgcccgaagactacaaccagcccgaaatcacgggcagcctcgcctcgacaggcgacgtggtgatgctcgttatgccgcaggatatccaggcccccaagggacgcctcatcctgccgcaggtccagacgatccgcgagctgctcgataagaagtgccgcgtggtctgctgtaccaccgaccagatcgaaggcacgctctcgtcgctggccgcaccgccgaaactgattatcaccgactcgcaggttttctcgactgtctatgcgcagaagcccgccgcaagcctgctgacttcgttctcggtgctcttcgcccgttacaagggcgacatcgactacttcgtggagagcgcggcagccatcgggcagctccgcgaagactcccgcgtgctgatcgccgaagcctgcacgcacgctccggtgggcgaagacatcggccgggtcaaaattccggcgatgctccgcaaacggatcggacccgcactgcgggtcgatgtggttgccggcacagactttccctcggacctcacgccttacgatctggtgatccactgcggcgcctgtatgttcaaccggcgccacgtattgagccgcatcgcccaggcccgcacccagcgcgtcccgatgaccaactacggcgtggcgatcgcctacctgcaagggattctcgacaagatcgaatattaaccccaaacacatatctaaaagagagggccgcccagcaactggacggccctctctttatcaaaaacgaaactattccggcaaatactatttcgcctccgaggggaaatacttcatatactgtacgcgctggaacatggctgaagtgtcgttcttaaaattcagacgcccccggaactcatcgagcgaaccgaaaccctgccgctcggcccagcggtcgatgtactcgttcatttcggcaatgacttcgaatcccttctggtggatcgccgtgcagacctgcactgcctcggctccgcacaaaagcgctttgaccgcagcttcgccgtcgtgcacgcccgtcgaaacagaaagatccaactgcggcaacacggccgaacagatcgccaccatacgcaggacgttgcgtaattccgtcggctcgctgtaaggcgaactctctacgaaagtcatccgctcgacatccacgtccggctcgaagaaacggttgaaaaagactacgccccgggccccgtgaccgagcaaagcgctcgacaaggcgaagacattggtcaggcgcatgggcagcttcaccgaaacgggaatcttcaccgcaccggccacccggccgacgatctccgcatagttcaactccagttcgcgggcctgggcgtgaatgtccgtaggttggatgaaaatattaagctccagcgcggaagctccggcatcggccatcgctgtagcgtattcgatccaatcgcctttatcggccacgcaattgatgctggcgattaccggaagatccgtcttcgaccgagcctcctgtaccaaccggagaaatccggccttgtaatcctcgcccagatagcgctgcaaataaacctccgcatcgccgtaagccgaatcggatacggcgtccagcgccgccgcatgatgcaggatctgctcctcgaatatggatttgagcactacggcaccggcaccgctcgcagcgcactgctcgacgctcttgacattggaggtatagggagaactgctgacaatgatcggactcggaagatccagccccaggtattttgctcgcatcgtttctatggatttttatggtttatttttcgaaaaatacgtaaaattatgattttgtgcaaaaagttacccaatcaatttgaaatagcgactctatcggggtaatccatacaggcggtagtttcttctcaaaatactaacagacagggcttcccggaatcccaacgttcgaacacctgcttttcgccctacgcagcgcgtaacatcaatgcgaatttaccgtttgaatacttcaagcctgtaaaacaacgacttcaactgttgcactcatggctcgcacggccagcctacacttgcataaaaccgcaaagaaaaaacaaaaaggagtcgcacaaactgtgcaactccctgactttcaagtggacccagaggggcatgatcccacgaccttcggattatgagtccgctgctctaaccgactgagctatgggtccttttgcatccgggaaaatccgaatacggacacaaaaataggaatttcgaccggattcacaaaataaaaacccattttttcatttcgagacgccagcacaaacccgtttcgctcaaatcgattccctgttttacgcccctgcatcgcaagaaaaacagccgcaccggaattttccgcaacaactaaccgacccgatcgcaagatttttcttcggaaaattagctaactggaaaaaatttactacctttgctccgcttaagcatctaattacaaacaaaacaaacgaaatgaaaaaaggtattcatcccgaaaattatcgtttagtggcattcaaagacatgtcgaatgaccacgtgtttttgtgcaggtccgccgtttcgacaaaagaaaccatcgaagtgaacggcgaaacctatcccgtgtataagatggaaatttccaacacctctcacccgttctacaccggtaagatgaagttggtggataccgctggtcgcgtcgataagtttatgagccgttacgcaaaacgctacgataagaaagccgccaaatagttcgaaggaccgtttgacgcttcaaaataaaaaaggattcgcctggggcgaatccttttttattctccttcggcgcccgattctcaccggtccgcattcgccggatgccgcacactccgaccgtcgtcaaaaagcgcaggggacatccgctttatccgtcccgaagctgccgaccggaatcggcagcatacgcaagatggtacacgaccaatcatccggtccggcccgaaacaggacaaaagaacttttacggaaaaaatttgggggtttgcggcacaaacattacttttgtaatctactaaaattactgtttttatggaattcgaaggtgtcgtatataaaatcctgcccctgacacaaggtacgtccgcccggggagaatggcagcgtcaggacgtggttttcgagctgccctcggaattttcacgcaaaatctgcgtcacgttcttcaacaagccgagcgacgtggccaaactccgcgaaggggctacctatacggtttcggtaaacgtcgaatcccgcgaatataacggccgctggtataccgatgtgcgggcatggcgcctgcaacccaaagaaaccgctcaaaacgccgggatcccgccgatgcccgacgcggccccgctcgaagagccatcgtacagtactcccgcagcagaagtagacgacctgcccttttaatttttcacgcacgaaggcagaagccatccgctctctaaaacaacaaaatagccgaccctacaaaggtcggctatttttcggtccccgggaggcgactacttcttcaccggaagagcagagttcgctgcctgagtcgtcgcagccgcagcttcatccgttgttgccggggtcgtttcctcaacgaaaggaatcacatcctccaactctacctcgaatttaagagccgaattaggcaagatatacttaccgcgcgcctgccgaccataagccagttccgcaggaatccaaagcgttatcttaccgcctttgccgatcagtttcaaaccttcggtccagccgggaatcacctgtcccaattcgaactcgacagcttcgtccttgtcataaccttccggatctatctgcttgaggtactccttcatctcttcgggcttgttctcgaaataggagctgtcgaaaacctgccccttataattggttcccgtataataaacttttacccggtcgcgggagtccgtcggcatcagggtctcatcgcccttcttttcgatcttataaagtaatcccgattcggttttctgaacgccggatttcttctcgatcgaagcgatccactcttcattggctttcttgttctcggcaggacgaaccaccgaataccagttccgcaagaatttgactgcttcctgctcggtcatgcgggcttcttcaccgttgccggtaatgtctttcaaaccctgaccgaaccaaaccaactgaatcggaaggtctgctcccagcatattgttacccagatcgataccgaaagcatacgaaatgaaccgacgctcctcctcgctctcgaacatcgcgggatcggccaacgactcttcgggtgtcttcagcgaatcgggagtcatcgcgttcttcttggcaatagcctgagcgcgttccggacgcgtaaccataaagaacgtgcgcaatgtatcgagtgcctctggatgcgtcatttttgccgttccgagggcaccttcggtcacaccttcggtcatcgcgtcgaaatcgaagggaatatccgacatcatccggttgagtcccgctccgacgttattacccaaagcgtacgacaaagagtcgaactgcgacttgctgcccatcgtgatcgaaccgttgctgcggctgcacgaggcgaaaattacggcaccagctaacagtgccatgaaacacaatgttcttttcatcttgttgatataattatgtattaaattgttatttccgtttcgataactgcacaaatatataaaatattttacgggcagccgattttatttttcagccccctcttgaaaaagaagtcagcggacatcgacgagttcgatctcgtagaacaacgtcgcgttcgggaccacgcccaatttcttgtcgccttcggccccgtaagccaggcgggagggtatccatacattcattcgaccgccttccccgacgagccgcacgctctgccgcaacccgggcatcagatcgcccacggccgtgcgcgtggtgtctcctcgttcgtacgaagactcgacgacctttccatcgaccgtcttggccacaaaacggatcgccaccgtatcccggtcgcttcggggcgtcttggactcatcaccgatctccagcacctcgtacgtcagccccgtatcggtcttggcataggagcgattgctcttgcggaaatcctccagaaactgttcttcataggcccgaatctgttcgggctgcgaaacattcacgtaacgcagataaaccgcacgggcctcgtcgggcgtcatccgggccgtccgggcatatacgtcccgcacggcctggcacacggcttcgacgttgagggtcgaatccatccgctgcaaattatatcccacattcagaccgatcacataagcgaccgaatccgtttcgttacgcaactccatgctccccgttccccgggaacaggcacccagcaggaacagtcccgctgcggcgatcaaccgatatttcttcatatacgtgtcttttttttggaaaagaggaaaatcagcaccgtacccaatacggccgacgcgaacgatcccatcagaatggcgatcttgccccggctgacgatctcggcatcggcaaaggccagcgtatcgacgaaaatcgacatggtgaacccgataccgcccaggcaagccaccgcgaaaagcatcttccagccggctccctcgggcatttcggccagcttcgtcttcacggcgagccaactggccaggaaaataccgagcggcttgcccacgagcaatccgaagaagatgcccgtgccgaccgcaccggcctgcggcgtaacgtggaagattcggaagtactccagcgaatcgatcgagacacccgcattggcgaatgcgaaaataggcataatcaaaaatgttacgtacggagccagcagatgttcgagacggaagctcatccctaccgaatcggtcgccagcgaggacatcatccgcaggtagtacctgtgctcctcgttcggaaaatcgtcggcccggcactcggctttcagcagcgcatcggacaaaccgctcatcttccgcgcgaaatactccttgctataacggggtttcatcgggatgaacatggcgatcaccacgcccgacagcgtggaatggattcccgaataataaaacagggcccagacgacgaaagccggtaccagatagaacataatgcgggtttcgcccactttattcaggaaatagatgcctacgaggatcaggatcgcaatcgcaagcagcaacagattgacctcctcgccgtaaaacagcgcgatcaccagaatcgcccccaagtcgtccgccacggccagggccgtcaggaaaattttgagcgaaataggcacccgatcgctgaatatcgaaaggatgccgatggcgaaagcaatgtccgtcgccgtagggattccccagccgggtgccgcgacggttcccgcgttgaacgaaaaatagatcaatgcaggcaccaccataccgcccaaagccgccaacacgggcagaatcgccttcctgacggaagagagctgtccgatgacgatttcgcgtttgatctcgagaccgatcaaaaagaagaacaccaccatcaacccgtcattgacgaaggtctggagggtcaggccccggggaaacatccagtcgatcagactgccgggaccacgcaccaccaaagcgatgtcgatgttgagcacccgctggtaatactccgccgtccagggaagattggccagcagcatcgcaacggcgacactgaagagcaacaccagtccgcccgaccagggagcctccagaaaacgacgcccccgcaactgaaactgataatgttgccggacccagcggtacatggaaaaaagcctcattgtctattcatatttatattcgtaatccaaaataaaccgtcttccccggcagaattcacgccctgtcggaatcaacctcttcctgccgacgaagtccgcaaggccaggccgcacaatttgtagagcacgcgggctcctacgaccgcgtcgatcttatcttccgggcagggaacgacctccaccaggtcgaacccggcgatgcggcggcccgaatcggccacgcactccatcaggtaaaccacctgttcaaaagtgatgccgcccggaacgggagtgcccgtatgaggacaatgttcgatggtgagtccgtcgatgtcgaaactgatataaaccacctcgggcagctcgtccacgatgcggcggcagctttcggcccaggtcgttcccgcgaatccggcgcgagcgagcgagcgcgaatcgaacatagcgatccgcccgtccgaagcggccctttcggcctcggcatcgcaataatcccgcacgccgacctgcacgagcttgctcacctgcggcaggtcgcgcagtacgttgaacatgatcgaagcgtgcgaaaattcgaatccctcgtacgcctcacgcaggtcgcaatgggcatcaatatggagaattcccagcgaaccttccttctcggcaacggcacggatcaaaccgtacggcgtcgaatggtcgcctccgaccagccctacgaccttaccttgcgagagccactggcgggcctgacggtaaatattgtcgttcatggctgcacagccttcgttgatacggcgcagacggcgctcgatacgttcgtcgtccggcgctccgccctcttcgagatgttcgatcacccgttcggcatcggcccgcagcttgcgggactcctcctgcagcgaatagtcgatgtcggccgtagcgatgcctccgagccaggctcccggcgccgaagcatcgtaaagatcgagctgtgtggaggcttcgatcagggcatccggcgccaaagccgttccggcaccgtaggatacggtcacgtcccagggtgcggaaacaagcaccagcgcagcctcctcgggcgtgaacggcaaaccgtaataagcgccgttgtccacccccaccccgttgggattgaatgttttcagatccatagtctttccttgtaagaattacaaagatagtaaatttttgattttccgccatcgttatcaccgataaaccccgtttttaacggggtgccgaccggccgacccggacgacgcccgaagcgggagccgtatgcaccggcgcacggttcccgtaaaaaggagctcaaataaatttggcgccgccctcgccctgcactatctttgctccgcaattaaccaattcgaataccgtcgtgaaaatcgtcgccgacaatgccataccttttttgaaaggagtactcgaaccttatgcccgggtggaatacctccccgggaaaaccatcgcaacggccgatgtccgggatgccgacgccctgatcgtccgtacccgcacccggtgcgacgccgccctactcgaaggatcgtccgtcaaactgatcgcaacggcgaccatcggcttcgaccacatcgacacggagtattgtcggcgacacggcatcgaagtagcgaccgccgcaggatgcaatgcacggggcgtactgcaatacgtcgctgcagcactggtccgcctctcacgagtacaggcctgggaacctgcagacaaaaccctcggaatcgtcggtgtaggacacgtcgggtcgctcgtcgaggcctacgcccggacgtggggattccgcgtcgtggcatgcgatcccccccgcgaagagcgcgagcacggcggattcctgccgctcgaagaggtggcgtgccaggccgacatcctcaccttccacactccgctggacgatacgacccggcacatggccggggcgaagctcttcgagcgaatgaagcccggcagcatcctcatcaacacttcgcgcggcgaggtagtcgatgggcaggcgctccgcgaaagcggtttgcaatacgtcctcgacgtctgggaacacgagcccgatctcgacccgctactgctgcgggacgcattgctcgccacccctcatatcgccggttattccgcccagggcaaggccaatgcaacggccctgtccgtccggacgatcggccggtacttcggactgtcgctcggggagtggtatccgtcaaacatcgccccgtcccgtccccgggcgatctcctggcaggagctttgcgacacgatagacgaccgcttcgacatcgccgccgaaagcagacggctgaaagagaaccccgaaaaattcgaaacgatacgcaacgaataccgctaccgggaagaatatttttaacaatttagatgcttttttcttaactttgcggccgaaatcgaccgcaccgcccattatgtatcgtaaactgatcaaacccatcctgttcgccatgaacatcgagcgtgcccacagcacggtcctgttcctgttgcgcatgatcgggaaaatcccgggcggacgagcgctgctgcgtgccatgtaccgcaccgagcacccttcgctcgaacgggaggtattcggacttcggtttcccaacccgatcggtctggcggcgggtttcgaccgcaacggagaagcgttccgcgaactttcggccctgggcttcggattcgtcgagatcggtacggtcacgccccaaccccaggccggcaatccccgaccccgcatcttccggctgcccgcagaccgggcgatcatcaaccgttcgggcctcaacaacaaggggttgtacaaggccatcgcccagctccgccaccggcacgaccggctcatcatcggaggcaacatcggcaaaaacacgctgacacaaccttcgcaggtcgcggccgactacctcaaaatgttccgcaacctctaccaatacgtcgattatttttcgatcaacgtctgctgcgacaactgtgcggacggcagcgtatcgcacaacaaagcccacctgatgaatattctgcagccgctcttcgattttcgccgcggccagaaccagtaccggccgatcctgctgaaaatatcgcccgacctgccggacccgcttatcgacgaagtgaccgacctgatgctttctacgccgctggacggcatcgtggccgtgaacggtactttctcgcgcaaaggtctcgaaaccgatgaggagacgctcgacgaaatcggcagcggccgattgagcggagctccccttacgcagcgggccatcgaggtagtgcgccgcatccaccgacgttcgcacggagcctatccgatcatcggcgtcggaggcctgatgaatgcccgggatgtgaaagccatgctcgccgccggcgcgagcctcgtccagctatacacgggatatatctacgaagggccctccctggtcaaggagatctgccgggccctgatcgacgacgcagcgtccgaagcctccgcttcgcccgcgccgggaaaataattcaatcttaccaccatgaaagcatctattcttacgatcggcgacgaaatcctgatcgggcagatcgtggataccaattcggcgtcgatcgcccgtcacctgaacaatgcgggcatcgtcgtctgggagcgcacatcggtcggcgaccagcgcgagcagattaccgaggccgtaaaacgggccatgaaccagagcgacgtagtcatcctgaccggcggcctcggccccaccaaggacgacatcacgaaaaagaccctcgccgagctcttcggctcccggctcgtatgcgatcaaaccgtcgccgaccacgtgcggcgcatgctcgaagcgcgcggaatcgaatacaaccgcctgaaccgcgatcaggcgctcgtcccggcgtgctgcaccgtgcttttcaacgcccacggcacggcccccggcatgtggttcgaacagaacggcaaagtcgtggtttcgctgccgggcgtccccttcgaaatggagcacctgatgaccgacgaggtaatgcctcgtctgaaagcccgtttctccctgcggcagatcgtacaccgcacgctgatcacggcaggtctggccgaatcgatgctggccgaaaagatcgctgactgggaaaatgccctgcccccgtacctccacctggcatatctgcccgcacccggcgtggtgcggctgcgcctgtcggcctacgaagtcgaaggcgagagcgtatcgcacgaaatcgaccggcaattcgccgccctgcaacgcatcattccccgctacgtcctcggattcgagcgggcgaccatgcaggagatcgtccacaacctgctgacgcagcgtcggcagactctcgccacggccgagagctgcacaggcggcagcatcgcagcccgcttcacggcaatgcccggagcctcggcctatttcctgtgcggagtggtggcttacagcaacgaatccaaaaacaacctgttgggtgtcgatcccgaaacgatcgccagccggggcgccgtcagcgaggaggtcgcacggcagatggccgaaggagcacgccgcatcaccggagccgactatgccgtcgcaaccaccggcatcgcaggtcctgcgggcggtacggaacagaaacccgtcggcacggtctggatggccgtagccggcccgcaccgtaccgtaaccctgctcaaacaatgcggcaccgaccggggacaggttatcgaccgggcgagcgccttcgcactcgcgctcctgcgcgacgaaatcgaacgggatgccgccggagaataacccggtttcgacacttcccaaagccccctgacttccggagcctcgaaaggttccggaagtcttcatatccccgtctctggaacaagccccgttcctcccggaacgcatccaaccctttccgatacgctgtccggccggacgcccccgaaaatcgcgaaacaaaagcccgatacgatcactagcaccgtccgatgaaattcaaaggcggatcattgaacacaccccgtcgaaaagagttaattctccgaccgtaattacgggcacctcataccgctatatatcaaacattcgccttccaaaaccgaaattcgaagctattcccgaacagattcttcctcccggtcagcgacaaaatcacccagttattcccaccgcccctctatccgcacgattttcggaaacacgggaacggccttgaaaacgggatctttcgacaaatatactttttgagaaatgatataaacgaaatgagagagcaatatacgcctgctcccttcatctttgctgcaacaaaatagcatccgtattcccgaccgtcaaaagccccgaacgaaagtcctcccggcaaacagatttcgaggccgatcgaacgacaccggaaagccgatcgatacggaccggcgcacaccgccccgaaatgatccgagcacatgatatacatcggttattcccgaaaagaaaaaccgacaagtctaaccatcaaaaaacaaaacccatgaaaagattcttacatttgctcacagggatttgcaccctcgccctggctcttcaggcctgtaccaagtctccggccgaaaacccgggaagaacggacgatcccggaaacgacgaacaaaacagcaaggtaacccttactctctcgacgccccgcacccgcacgacgctcgtcagcgaaacctacgtccactggagcgaagaggatattgtacaaatcaacggcacgaatttgcccgtaatccccgatccgaatgatccgacacgcgcaacgatctccaatgtggacaccgccgaagagtacgtggctctctactctccggacaacggcggatatatcccggagcgagaggtcgtcgaagcctacttccgccccgaagtgccccatactcccgactcgttttacacgacaggaggcaatccgatggtggcatacagcacatccacctcgctggaattcaaaaatatcggcggattactccgcataggagtgaccggcgatgcgtcgatcgcgtcggttatgctgtcgggcaatgcgggagaacccattgccagacacttcgaaatctcgaaaagcgatctggcttccggcagcctcgatttcgctcccggcgaaggttccgcacaattcgtcagcacctccgtcacgatgacctgcacggagaatgtacgactcgatgcgaactctccgacctatttctacttcgcgctgccggcagccgaatacacggaaggattcaccgtaacgcttaccgacagcgaaggcaacacctgcctccggcaaacgcataactccgtctcgatcgagcgtgcgaccctcaagtcgatggaaccgattgcgttcgaaaaggacaaagcgcttacggtcactttaggagaaatcgcggcgaactccgttacctggaatatcgaaggtaatccctcgaccgacctgcggaccctgctcgtcaccaaagcgatgtgggatcatttcatcgcacaggaatattacctcgacaatccgcaaaaactcacgtccgaaatcctcgcggcctattccgccaccattccgaccgacgacaacggccgttacgaagagactgcaacccaggcaagagccgtaaactcgatgcagcccgtacaggaagacaacgactacctcgtcttggccgcctatttctccggcacccaatccgtcggcgtaatccccgccccggttcccgttcacactccggccgccacaggcccggctcccgaagtgaatgtcaccgtctcttcggccggcagcactacgatcgatgtacttaccaccaccagcaacgcatccggcatccttaccgcactcttcttcaaaagcgattacgacaatgtattcagccgggagggaatagacgaagagttgatcgcaaagtacggcaatgcatggacggcagagcaggtagagcaggccaacaacggaggatatacactccaatacatttcgcttccgccggaaacggaattcgttatgctaatttcggtctccagcgcagcaggcaaagctacgctcaagaaagaaataattgcgaccgaaccgtacgtcgatccttctgccgaatggatcaccgtttcctccgaagccacgttcgtttgcggcttcttcttcaaccaaagcatcccctccttgtcgaacgtgatcaatattacgaaccttaaagtcgaaaaactcgccgatcgcgacctcttccgtctgaccgacgccttctccgtctcccggatccccgaacttgcggccagcggcatatacagcgatctgtccggcagtccgtattatttctatatggatgcgaccgacccgaacaatgtaaaagtcgtcaatgaagtgtgccaactcggcatcgttcacaacgaatacggagcaatgagcgtcggcaacgacttcaacatccaaggcggcgaagagtaccagcacggtacgtacaaccgagcggaaggcacgatccgaatcggcgtgctcatttgctatgccgacagccaacaactcttcgtcacgccattcaacagtacgctatatctgaatcccgaaacgcccggaaacagtgtttcgaccgaaaatttcaagaaagaccctgtcgcaattccctggtaagtcaggacccccgaaaacagagacaccggccctttttcaggccggtgttttgttatttggccaaaagattgtatatttgcactccccgaaatgggattacaattaaattttaaccaaaatgaaagtttgcgaaattacaggcaaggtagcggtgatcggcaacaatgtttcccactcgcaccacaagaccaaacgcaagttcagccccaatctgaagaacaagcgcttctggtctgaagaggaaggccgctggatcaccctcaaggtatctgccgccggaatcaaaacaatcaacaagaagggcctcgcagtagcgctccgcgaagctgccgcacccaaaaaggtttactaaaactcaagtgacaaatggcaaagaaaggcaacagagtgcaggtgattctcgaatgcacggaacagaaagctagcggtgttccgggaatgtcccgctacatcacgaccaagaacaagaaaaacacccccgaccgtctggagcgcaagaaatacaacccgttcctgaagaaggtgaccattcatcgtgaaatcaaataattttagtgctatatggcaaagaaagtagtcgcaacgctgaaaaccggtacgggcaaacagttcaccaaatgtatcaaaatggtgaaatccgacaaaaccggtgcatacatcttcaaagagggcatcatcgccaacgaccaggtgaaagactttttcgccgagaagaaataaatgcaatgcattaggcgaaacgaatgttttcggatcgcaaggccggaaagaatcatccgccggaccggattcggaaaacaacctaaaaattcgattccgcttaatacaaagggcatcctcaacggatgccctttgtattttcaccgacccgcaacccggcagaacagcaccgatcatcgaggaatcattcgtaccttcgttcctcttgcggttcttcgcctcgacaaaacgggaataaattcgctttgcaccacccgatttatccgtatctctaactttgcctaaatactccaacgcggcaacgctcaaaaaaatttggctccgccggctggttgtactatctttgcagaagacaggaagcgattcggcaatctttgcgtgcaagcccacacgattgcttttatctttcactatctttgacgtagtcttaaaatgttctcggaaaactggcaacaagttcccgttttctctgggcttttcgtatttttgcaacattactaatataacaatattttatgggattcttcgatcttttcaagaaaaaacagaatacacagccgacgactccggcggaacgatctcaaccgacttctccggaaaaccaccggccggctgcggtcgaaaatacgacgaagcaggaaaatacctctccccagccggctgcccgaaccgctgaccgggagcaggcggaactcaactccggtctggagaagaccaaaacgggcctcttctcgaaactggcgcgggccgttgccggtcgatcgaccatcgatacacaggtgctcgacgatctggaggaggtgctcatcacctccgacgtaggcgtggaaaccaccgtgaagatcatcgaacgcatcgaagcccgcgtcgcacgggacaagtatatgaacacctcggagttgcaatcgatcctgcgcgacgagatcgcccaactgatggaggagtcgcaccgctcgaccgaaaacttcggactcgacgtcgaggaaggcgtcccctacgtcatcatggtcgtcggcgtgaacggcgccggcaagaccacgacgatcggcaaactcgcggcccagctcacccgggccggcctcaacgtctatatcggcgctgcggatacgttccgtgcggccgccatcgaccagttggccgtatgggccgaacgggccggcgccacgatgatccgtcaggagatgggctccgatccggcgtcggtggccttcgacaccttgaaatcggccgtggcgaacaaggccgacgtcgtactgatcgacacggcgggccgcctgcacaacaaggtcggcctgatgaacgagctgaccaagatccgcaacgtgatgggcaaggttatccccaacgccccgcaggaggtgatgctggtgctggacggttcgaccggacagaacgccttcgaacaggcccggcaattcacccaggccacgcaggtcacgtcgctcaccatcaccaagctcgacggcacggccaagggcggcgtggtgatcggcatcagcgaccagttccgcattcccgtccgctacatcggcatcggcgaaggcatcgaccagctcaagatgttcgaccgcaaggagttcgtgaacgcccttttcggcagcgaagcaaaataaaatctcccgtgaatgaagaaaattaacgtcatcaccctcgggtgctcgaaaaacacggtcgattcggagcacctgatggcccagctcgcagccgcaggctatacggtcacgcacgacagcgaccgcaccgatgccaaagtcgtggtcatcaacacctgcggcttcatcggcgacgccaaacaggagtcgatcgacatgatcctccgggccgccgccgccaaacagacgggtaaaatcgaacggctgttcgtcgtgggctgcctgagcgagcgttatgcggaggagctgcgtgccgagctgcccgaggtcgatgagttcttcggcgtgaaggattgggacgacatcgttcgggcgctggaggcgactccccggccagcgcttgcgaccgaacgccggctcaccaccccgaaacattacgcttacctgaaaatttccgaaggctgcaactggaagtgcggttattgcgccattcccctgattcgggggccccacgcttcggtgccgatggaaaccctgctggaagaggcccggaagctggccgcaggcggtgtgcgcgaactgatcgtaatcgcacaggacacgacctactacggcctggacctttacggcaaacgacgcctggccgaactgctcgaagccttgtgccgcatcgacggcatccgctggatccggctccactacgcctaccccacggctttccccgacgaggtgatcgaagtgatggcccgcgaacccaaaatctgcaaatacctcgacattcccttccagcatatctccgacgaccagctcgcggccatgcaccgacgccataccaaggcccaggcttacgaactgatcgacaaactgaggcaggccattcccgacctcgcgctgcgcacgaccctgctggtcggatatccgggcgaaaccgaagccgacttcgaagagcttctggaattcgtgcgcacggtacggttcgaacgactgggcgtattcccctattccgaagaggagggaacctattcggcccggaatctgccggacgatgttccggaagaggtcaaacaaagtcgtgtagaacgagtaatggcgcttcagaatgagatctcgctcgaaaacaaccgggcacgtatcggtcagttggagcgggtcatcatcgactcccggcagggggatttctacgtaggacggtcgcaatacgactcgcccgaagtggatcaggagatcctgattccggccgcaggccgcaggctgatccgcggttgcttctatcaggtgcggatcaccgcagccgaagactacgacctctacggcgaactcgaaacgaaataaaagacaatcatcacatctttcaatgtagcgttatccgacagtcgcaggatcgaatccgacggtcgctaactcacggcctccggtcgtgtccgcaattcacccctaattcccttcccgggaggggaattgggccgctacgcttcccataacgggggacacgaaaggatatgatcatgaaataaaattttgtcgtttgacgttttttatatacctttgggaaggcggaaaatatttccggcgacagataaatggcagagaaaaaggtcataagcgatttcgaggcgcagattcggcagctcattgccgaccatcgtcggcttacggccctttgcaaggaaacagcggcggagcgcgacgtcttgcgtaaagaaaaccgcgatttgcaaatgcaggtaaaagagctcggcaaggagctcgcccgcgtacagctcagccagggactcgcaggaaatgcacccgaccaaagcaaagcgatcgcacgcgtcaaccgtttaatgcgggaggtggacaagtgcatcaccctactcaacaaacccgaccgaatcggcgaagagctgtcgggcaagtaggcaagacatacgataacgaccgaagatatttcatttaacgggaagcaagcgacatggcccagcaacaggcaataaagctcaaaatagccggtaaaagttactcgtttacgctcaagcacgaagcgaacgaggaacagtcgctggcggagaaagaggagctctaccgcctggccgaacgcgaggtgaatgcctatgtcacccggttcgaaaaagccaaatacgaaggattctcgacacaggactgcctggcgatggccgcattgcagttggcgatttcgagcgtttcgctggcccgcagccgagaagtgggcagcgaagatctccgcaggctggaagcgctgcgcgacgagatcgacgaatacctgaaccgaatcgaaaccgaaaagaaataacagggaaggatacgaggggggaccgtatagaaaagtccgcaagtatcatcgttctttaccatacgtttaagaaaaatctacccgcatagattccttaaagctttgcgaaactgaacaatttttacattggggcaactcaccactttcaaaatcaggcttcaacccctcggggtgcaggctgcggcctgccggtagaaggttgcgattttcgggagcccccacacttgactgatcttgcagattcgtcaaacaagttaaggaatactatgcggtttttttatgcacaaaccctaataactaacaaataataactctctaaaacaatgatgacaatcgtactatcgagcgtcctgtccgccgtagtctgcctgggtatttacatcctggtaaccaaatacgttaccaagaagaccatcaaggcactgcgtgaagccgcccggaaagaggcggaagcggaaggcgaaatgataaagaaagagaagattctccaggccaaggagaagttcatccagctcaagagcgagcacgaccgccaggtcaatgaacgcaaccagaagatcgcccaaagcgaacagcgggccaagcagatcgaaaacaacctgcaaaaccaacagcgcgaactggaaggcaaggtcaaggagaacgcccgcctcaaagagcagatggaagcgcagcttcaggtgctcgaacacaagaaggaggagatcgaccgtctgatgcacgagcagaacacgcgcctcgagcagatttcgggcctgagctccgaagatgccaagagcatcctgatcgaaaatatgaaagcggaagccaaagccgacgctgcagcctacatcaacgaaacgatcgaggaggccaaaatgaccgccacgaaggaggccaagcgaatcatcgtggcttcgatccagcgtgtggcgaccgaaacggccatcgaaaacgccgttacggtgttcaacatcgaaagcgacgaagtcaaaggccgcatcatcggccgcgaaggtcgtaacatccgggcgctggaagctgccacaggcatcgaaatcatcgtggacgacacgcccgaagcgatcatcctgagcgggttcgatcccgtgcgccgcgaaatcgcccgcctggccctgcaccagctcgtaaccgacggacgtatccacccggcccgaatcgaggaggtggtcgccaaggtacagaagcagatcgaagaggagatcgtcgaagtcggcaaacgtaccgcgatcgacctgggtattcacggcctgcatccggagctgatccgtatgatcggcaagatgaaataccgctcctcctacggacagaacctattgcagcacgcccgcgaaacggccaacctggccggcatcatggctgccgagctggggctcaaccccaaaacggcccgccgcgccggtctgttgcacgacatcggcaaggtgcccgacgacgaacccgaattgccgcacgcaattatcggtatgaaactcgccgagaaatacaaggagaagcccgaggtttgcaacgcgatcggcgcccaccacgacgaaatcgagatgtcgtcgcttatcgccccgatcatccaggtctgcgatgccatttcgggagcccgtccgggagcccgtcgtgaggtggtcgagagctatatcaagcgtctgaaggagatggaggacatcgcgctctcctaccccggcgtagtgaagacctatacgatccaggcaggccgcgagctgcgtgtaatcgtcggtgcggagaagctctccgacatggagtccgaaagcctgtcgcacgacatcgccaagaagatccaggacgaaatgacctacccggggcaggtaaaaatcaccgtcatccgcgaaacccgatccgtggcatacgcaaaataggatatttatccagataccaccatccggtttctacaaccaaagtccctttcccctaccatggaagggactttttttacgaaacacatgaataaagagttgcaagcctacgtcgaacaggcgatcctcccccgttacgaacatttcgaccgtgcccacggacccgaacacgcccggacagtcatcgaacagagtctggcactggcccggcattaccaggtcgatcggcagatggtttacgcaattgcggcctaccacgacgtgggactggagaaaggacgggagatgcaccatatccattcgggggaaatcctcgctgcggatacaaaactgcggcagtggttctcgccgcagcagatcgccgtcatgcgtgaggcggtggaagaccaccgcgcctcgtcggaccacgaaccccgcacgatttacggacgcatcgttgccgaagccgaccgttgtatcgacccgccgaccatcgtccgccgcacgatacaatacgggctggcgaactatccggagctggaccgcgaggatcaatatcgccgctgtgtcgatcacctgacacataaatacgcggaaggaggctatctccgactctggatcccggaatcggacaatgccctgcgcctcgcacgactgcgcgagctgatccgcaaccgccaagagctccggcggcttttcgacgaaatattcgaccgggagatggctgcgaacggctgaaaaaccggaccctatttaccgatgcctttcacggccttataaaatcggaattgcttctcagtataacccgttaccggctccgaccggacgcgcagatctgatgtcggatgcaaaaatcacggatacgacaaaaaaggggcggctcttttgcagagccgccccgaatcatccgatcggacggaaactatttttgctgaatgaacggaagtttcacgacctcggccttcatcagcttctcgcggatcacgatggcgatctgcgtgccgaccttggcgaactccttcttcacgtaacccataccaatcccctgtttcagacagggcgacatcgtacccgaagtcacctggccgatgatatcgccctcaggagaggcgatctggtaaccatgacgcggaataccgcgatcgatcatcttgaaaccgaccagtttgcgggtcagaccgccggccttctgctcttccatcagtttgcggtcgatgaactccttgccatcgacgaacttggtcagccagttcaggcccgcctcgataggcgaagtcgtatcgtcgatatcattaccgtagaggcagaaacccatctccagacgcaacgtgtcgcgggcaccgaggccgatatttttcagcccctccttcgaaccctcctgccagagagccttccagagtttctcgccgtcttcgttggccacatagatctcgcagccgcccgcaccggtgtatcccgtaatcgaaagaatcgcatccacaccggcaaccttcagcttcttgaacgtatagtattccatatcctcaaccggctcggtgcacaacttctgcacgatcttcatcgcattgggaccctggatcgccagttggcagatctcgtccgaagcgttgtagagctgcttgccatgaccggcctccaagccgaatttcttgccctcttcgacgatatggttccaatccttgtcgatattggccgcattgattacgagcagataagtttcggcatcgatccggtaaaccagcaggtcgtccacgatacctcccttgccgttgggcatggtggtatattgcaccttcccgtcgtaaagcgccgcaacatcgttggtcgtgatatgctgcaggaacgcttcggccttgggaccttttacccagacctcgcccatgtgactcacgtcgaatacgcccgcgttgttgcgcacggccaggtgctcttcgttgatgcccgtaaattcgatcggcatgttgtaacctgcgaactcggccatcttagcgccgttcgcaatgtgatgtttggtaaaaaccgttgttttcattgtctgttatcgatttaattatcagttatttgattatcagtcttattcgcggcgcttcacgcccatccggggacagcggtgaaactccttcgtgcggtcgaacaggtagcggtaggtcgtatgcatcttgtgcttggtggcgcatacgtaactctccaccatgcgcatcatcaccggattgaaatcgccgatccacgcaagttccaacgatttgtagggtaacttcggcaccgccttctcgaaggcacgaatgattcccgcctcgatgcccttaccgtggaactcgggggtgactccgaaaatcaggccgaagatccggtcggccttatgcgcaaccttgagcgcccacatcagacgcaacttgttccaccagccgaacttgccgttgaaggaaccgatcacccggttcagatcgggcaccatgatgaaaaagccgatgggttcgtcgttatagtaagcgaaatagaccaaccgttcgtcgataatcgggcgcaacgtattcataatgcggaacgcctgttcgcggtccatcgccttcacacccgaaaacagcgcccacgccttgttataaaccaaccggaaatcctcggccacctgctcgagattctttttcgagatatgcttgaaacagtaacccggactctcctccaggcgcttcacgcgctcataaaccgaatcgctcaactgccccacctccaaccgacgcagataggtatgctggttgaaatagttctgaaatccgtaattctcgaacaactctttataataaggcggattgtacgcattctcatagaggggctggaattcgtacccgctgaccagcagcccccaccaggagtcccggggaccgaaattgatcggaccgtccatcgcctccataccccggctggaaagccacatgcgggccgcatcgaaaagctgatcggccagctcctgatcgttgatagcctcgaaaaagccgcatcctcccgtcggctgttcctccaggaaagcatgttcccgatcgtaaaaagcggcgatacgtcccaccacttctccttttttatcgcgtgcgatccagcgaatggcctcgccgtcggagagcaattcatttttcttcgggtcgaaaatagcccggatagaaggatcgaggggacatacccaattacgattccccttatagattttccgaggcagatcgaggaactcccgttccgtacgggcatcgacgacctcctgcaaaatgtacttgtctgaactcattgccttatgaaaaaggtttaatcccaacaaagataacgatatttttccaaaatccccgttcacaggccccaatccgtgcgaaaactttttccatatagtatatacgggagagtccgggctcgaaaaaaccgttcaatttcagtttttcaaacaaacaaaatcgctttgtacgaaaaagtaatcttttcgtgcaaaataaattacaatctataagaataaatattatctttgcatcaacattaaaccacaacttaatttcaatatattatgaatgttaacaatttaatggcagaattggagcgtaagcacccgggtgaaaacgaatacctgcaggccgtacgcgaagtactcgagtccatcgaggaagtttacaaccaacatcctgagttcgagaaagccaagatcgttgagcgcctcgtagagccggatcgtatcttcaccttccgcgtaacgtgggtggacgacaaaggcgaagttcagaccaacctgggctaccgcgttcagttcaacagcgcgatcggtccctacaaaggcggtctgcgtttccacaaggccgtgaacccttcgatgctgaagttcctcggtttcgagcagactttcaagaacgccctgacgacccttccgatgggtggtgcaaagggtggttcggacttcgatccgaccggcaagtcgaacgctgaaatcatgcgtttctgccaggctttcatgcttgaattgtggcacaatatcggtgtcgataccgacgttcccgccggcgacgtaggcgtaggcggccgtgagatcggcttcctgaacggtatgtatcagaaactggctcgcaagtaccacaccggcgttcttaccggcaagggcgaaacttggggcggttccatcctccgtccggaggctaccggtttcggcgcactctatttcgtacagcacatgctgcatctggccggcaagaaactggaaggcgcaaagatcgccatctcgggcttcggtaacgtggcttggggtgcatcgaagaaggctaccgaactgggcgccaaagtgatcgcaatctccggtcccgacggtgtagtaacgatccccaacggtatgaacgaggagatgatcgactacatgctcgagctccgcgcttcgaaccgcaatatcgtggctccgttcgcagagaaattcgcaggtacgaccttcactccgggcaagaaggcttggagcgtgaagtgcgacatcgcacttccctgcgcattccagaacgagctgaacggcgacgatgctgccgaactgctgaagaacggcacttggtgctgcgccgaggtttcgaacatgggttgtacgccggaagctatccacgcattccagaaggcaggcattctgttcgcaccgggcaaggcagtcaatgccggcggtgtagctacttcgggtctcgaaatgacgcagaactgcatgcacatctcctggtcgggcaaagaggtggacgagaaactccacttcatcatggcaagcatccacgacgcttgcgtgaagttcggcaagcagaaggacggtcacatcgactacgtgaagggcgccaacatcgcaggcttcatgaaagtcgctcaggcaatgctcgagcagggtgtattgtaatcctgttcctctcatgcgaaaagaggtgcggccttcggtcgcacctctttcattttatccgtttcgaagaatcgcggttccggacccgcacgagttagaaggcgatattcgccgacaggcccaaggtcagcgtattaaggtgctgacgactcccgcaagccatcggaggttgcagatagtaagtagtctgaaatcgaagatcgaggttgtaattggcccgaaacgtcatagaggtaccgactccgaaaacgggtcctccatggcctcccagcgtatatccgtccaaggaaaaagattcataatactgatatccggccaaaaccttgccaccggtccgccaacgcgcggtaatcggatatgaaaaataggccccggcacttgcggaccaactgtccagacggtccgtcgattcggcgatactcagtgtaaccggcacactcgatacggccgtacgtcctccgaacccgacataaggattcataaaccaggctccctcgattcccaggttcacgcctgcattgaattcggccacgacccccgaaacagggcggtaccgccccatcaccacctccgtacttacctccataccgaagaacgaaggtcggcaataacggtcgtaaaaaaaatcctgctcgaattccgtcaagcccttgtccttgaagatcaaatcggcgaacagataccccagttctacggagagaatgccgatccccgcacctaccagcacgtcgctgagccaatgcttgttgttcaacatacgcgaaacacccgtcaccgtagccatcgaataaccggcgatactgtaccagggactgcggcccccgtactccttatgaagcatcgtagccgccataaaagccgtagccgtatgccccgacgggaacgacttgttgttcgatccgtcgggacggggcatacggcaagtatatttcagagaattgaccgctccggccatcagagcgacggaaaaggcatccgacaccagcatccggccccacgaactgcgcccccggactcctccgattttcagccccagcatcaacgctgcgggagcgtattgcagataatcgtcgtaacgaaatcggaaggagggcacataatcgtttctcaaatgacgaaatccatgatcccgctcctgcacgacgagtcccgcaacgacgagaggaacaccgatataggttatccggtaggcacgcgaagaggttatccgctccatatcccggataaacgggctgcggcggagggggggggggg

SEQ ID NO: 10426 - DNA, 16319 bp, Unknown
  gut microbiota DNA sequence
aatacaagattccgaccgcatcggaaaaacctgttctcaccgcttaccgacagccgggacggggacggatgcggcggcggatactccgcacgacatcgcccaagatagcgatcagagaggtatagccgatcacttcgagccattgtacccacgtgagcggcgtggtacggaataccggacctccgaactccacgatcaacacctgtccgacggcaatcaacagcagcaccaggaagaacgtacggcttccccgcagatcgtgcagcaccgaatgacacgcttcgaaacctttggcattgaacatattccagaactgaaggaagacaaatacggagaagaaaacagtcagttgttcaaggttgggcgcccctgtcgtggcacgccagtagaacagcataccgagcaatacgccaacgaaaatcgttccgcaggtaaagatcgtccgggccatggccggcgtgatgataaactcgtctttgggacgcggcggttcgttcatcaccgccggattgggcggcagggaagccatcgccagcgcagcgaaagtatccataatgatattgacccacagaatctgcactaccgtaagcggcatctcggtcccgaaaatcgaacctacgaaaaccacgatgatcgccgcgaaattgatcgtcagttgaaacagaacgaagcgttggatgttgcggtagagcgagcggccccacatcacggcagcagcgatcgacgcgaacgaatcgtcgagcagcgtgatatcgctggcatccttcgccaccgacgtacccgatcccatcgagagtcccacgttggcgaagttcagcgccggggcatcgttcgtaccgtcacccgttaccgccacgatttcgcccttgcgctgcaaaagacgcacgagccgctgcttgtcgagcggtcgcgcccgggacataatcttcagagcctgcacccgttcgagcagctcctcgtcactcatcgccgcgaactccacgcccgtcatctcgttccgcgaggagtcggtttcatcgtgccataaaccgatgcggcgtgcgatctcgcgggccgtggccggagtatcgcccgtgacgatcttaatatcgatcccggccttcatacaacgggctacggcagccgggacatcatcccgtaccggatcggcgatcgccgccacggccacgaacagcaactgcggattccgcagcgcgtcttcgcatcgttcggccgtcgtttcggcatacgccaccgccagcgtacgcatcgcacgtccctggaacagcagcaactgttcgttcacctgggcatccttgccatccggcatacacatcgcccgcacgatttcgggagcacccttcacgcaaatcaaacgctttccggtagttttgctctgtataatcgtcgccatatatttgcgttcggtggtgaaggtcatacgatcgacgatcggcgcctcctcacgcaaagccgcatagtcgaatccctcttcccgcaggcggatcagcagggccccttcggtcggattgccgatgacatttgcgtcggcatcgagaaaagcggtcgaattgacggcgatgatctcggccagcaaccgttcgtcgatggacgcataatggatgatctcctcgacccgcatccggttctgggtaagcgtaccggtcttatcggtacaaatcaccgtaacggcccccatcgtttcgcaggcgtgcatcttgcgcaccaggttattcgtcttcaacatccgacgcatcgacaacgccagcgagagcgtgatactcatcggcagcccctcaggaacagccatcacgatcaaagccaccgaaaccataaaaatacgcagcagctccttggaagtctggacccaatcgcccgtcgaaagctcgccgcccaggtatgccttggcgagcatcgctacgaagatcgcaatcgacactgcaataccgatcttaccgatcatcctcgaaagacgcgtcagctgcttatacaacggcgtaggctcttcgctggctatggacgactgctcggttacccgccccgcttcggtgcggtcgcccacagcctcgacgatcatctcgccgtaaccgtccacgacggtcgtaccgcgcaacagcgcatcggaaggataggtcgcctcggcatcgaaaaagcgttcgtcggtagtcttgtccacctcaggctcgcccgtcagcgtcgattcattgatcttgagcgatacggccttcaccagcttaccgtccgccgggaccgtttcgccattctcgacatacaccaggtcgcccacgaccacatcgcgtcggggcacctcggtcatctccccgtcgcggacgaccttgaccggaatgtcgtcattcaccagattgagccgcttgaaccgccgcatggcgtccaattcgaagaaaaagccgacacaagtggccaaaacgatggcgcagataattccgatggtttccaggaactccccatcgataaaagccatcgccagcgacagcagcgccgctaccagcaatacctgaataatcggatcgcggaacttctcggcaaacagtttccaggccgaatcccccttgcggggcgtgatgagattatccccatgcagacggcggctctcctccacctgggcggaagtcaaacctctgtgttgatgttctttcataaagtcagtcggatatataaataaggttgtgaatgttatcgaaaagaatattgccgggtcgatgcatccagccggaccgcaatgaacaacatgatggtaaaagccatgagcgacgaaccaccgtagctgaccaacggcaggggaattcccatcaccggcatcagtccgatggtcatccccacattaacgagcagatgaaaaagcaggaatgccgcaacgcagtaacagtagatccgtccgaaaggctcctcctgccgttcgcccatacgcatcaaccggaatatcaacaggcaaaagagcgtcagcagaagcatagcgcccagaaatccccactcctcgccgatggtacagaaaatgaaatcggtatgtttctccggcacgaaaccgtatttgatctgggtcccttgcaggaaccctttgccgatccagccgcccgaaccgatagcgatcttggcctgattgacgttataatccgtaccgaggggatcactgaccagccccaggaaacttaaaatacggttctgctgatgctctttgaggatggaattgaaaatataatcggtagtcggaacgaaaagcattgccgtcagaaacagtccgatcgtaatgaaaatattgcgcagattggcgcggaaggcataaatcgccacaaagatgagcgacagcagcgtcaccacgagcaggcagcggtagagatccatcgctccgggagccgccaacagcatcccgaaatagagaagcagcgtgcccaatgccagcgcagccagataaaccatgcgggaccgccactgtccgttcatcatcgcctcggaaagcgtacagaccagaatcagcatcaccaacagggtcagcggcgtaaagaggaacgaaaaaataaagagtacggcgatcaggatcaccggaatacagagccacttgttcaaaccttcgcggtacaacacgaacagcagcgatacgagcacgatacccgatcctgtatcgttctgcatgacgataatcaacagcggcagacagatcaccaatcccaccttgaaaagatcccccgcccggttgatcgaaaacgagctggagctcatcacgcgggccagcgccaacgccgtagcgattttggcgaactccaccggctgaatacggaccgacccgatctcgaaccaggccttcgcaccgttcacttcacgaccgaacagcagagcggctaccagggtcagcaatcccaggacatagaacagataagcccacttgtgatagatgctcgcatcgaccagcaacacgacgaccgctacggcgaacgatattcccatccagacgagctgtttcatatagaaatgcgagaaggaaaaaatgctctccgccccctcttcgtacgaagcggagaggatagccacgaagccgaccagcacgatcagcacatagatcagcactgtccagcgatcgacgccctcgaacaatttaccgatgccgttattttccataggccgggtaataaatcgttttctgcttgaccatctccaccagccagggccgtgtgacggtgtcggtcaaatagtactcttcgagcagactggcgatgggcaaagcggccgaagccccgaacccgccgttctcgacatacaccgaaatagcgatgcggggattgtccttcggagcgaacgacaggaaggtcgaatgatccttgcctcgaggattctgcgccgtacccgtcttgccgcacacgtccagacccggcagataagccgtccgggaggttccgccctccttgtgcacgctctgccacataccctccacgattggttcgaaatatttcggatcgactttcgtataatgtttctcgtaaaaccgccggtccatcgaatcccgcccctctaccgaacggacgatgtgcgggatataatagtacccgcgattagcgacgatagccgccaggttagccatttgcagcggcgtacactccagctccccctgaccgatcgagagcgacagcaccgtcagcgcgttccacgatttccgataacgcctgtcgtaaaacttccggtcgggaacatagccgtttccctcgcccagaaaatccgaatccagcttgcggccgaagccgaaactctcgacatactccctccatacgtcgaacccctccttgacgcttccgtaccggggattttcgagaatatcgcggaatacgtaacagaaataggcgttgcacgaagtcgctatggcaaaacgcaggtccgcaggcgacgtatgggcgtgacacctcatcttgagccgtccgacctgataaccctcgtgacagggataacgcatggaaggagtcagcacaccctcctgcatcccgatcaggccctgaaccagtttgaaggtcgaaccgggcggataacggccgcttacggcacggttgaacagcggctgccgtttgttatagagcagctccatatagtgattgccccgctgccgtcccaccagttcatcgggatcgtacgtgggcgaggaaaccatcatcagaatctcgcccgtcgaaggttcgatcgccacggccgccccgactttgccggccatcagctcctcggcgaagagctgcaaccgcgcgtcgatcgtgcagacgatcgacttgccgggtacgggcagcgaatcgaaacgaccgtccatatacgaacccttgatcgctccgtgcgtatccacctcggagatcttcacccccttcttaccgcgcagctccggctcgtaggccgactccacgccgctgattccgacgtattcgcccgcctgatacgaaggataacgccgcaacatttcggaattgacctcccccacatatcccagcaggtttccccctactttacgagggtattgccgggcagtccggtaaacggtatagaagccggcgaagttacactcgtcgaaacgaagtttgtcctccttggacatatagttcatcaccatacggggcgcacgcggacgcacacgggcattggccagttccctcacaagcccttcgtgcgaaagacccgtaacctgacagaaaagcgtcgtatcgaacccctcccgatccatctcgcgatagatcaccatcaagtcataacactcgcgactctgtaccagatattcgccgttgcggtcgaacacctcgccacgggacggatactgaacttcgtagcgcaacgcattgccccgggccagctcctcatatttgctgtcgatgagctgaatataagcaagccgcgcggcgattacgccgaaaacgatcagcacgaccacctgcagcacccgcatccgggcaaccccttccccaccgtaactcatagccgaaccgtcagtttagtggtgaacagccgcgcaagcagccagatgaagcccaccgtaacagcactgctcacgaccagtcggacgagcgtatggaacaactgcgcccaagacagggactccaacatgaaaaacaggaagtggtgtaccacgaccatcgctgccaggtagcgcagaaatccgccctgccccaaccggatcgaagaaggaataccaccctcccgaatcccctccttaccgcagacagactgcagaagcggccggcgcagcatagcgaccggaagcgtagcgatcgtattgatccccgctgcccccatcgcccaatccatcgcaacggacatcgacaaagccagaaaaagcactgcaaccggcggagcgtcgatcggcagcaggacaatgaagccgatatagaccaaagggcagaggtagatactgatcgacaggttgtcgaacagaaaaatctgcaacagggccaaaataaggaataagacgatatagggaacagtccggtacatatttatcttctgttttgccgctcggcttcggcttcgagctcctgcacatcttcgatatcccggttgcgcaccaggataacatccgtcagttgcgacacatccaccgccagccggatcaccacgtcgtaagccatctgggtatcggccagcgaaaaactctccacatagccgatcagcacgtcagccggaaaatactgcgaaaaaccggaggaaaccacctcttccccctccgtaacgcgggcatatttggacaattccttcatgcggacgtggtagcgatcgtcacccgcccagtagatcgagccgaaatagtcgtcgccggcgagcttgccgctggcattgaacgacgtattgagaatcgacaccgccaccgcatgacggtcggaactggcggccacgtagccgaccatggccccttccggagagagcacgcccatccccttctcgacgccgtcgcgttcgccccggtccagcacgatgaagttacggttcttgttgatcgaattggaaatcacccgggcgacggtcagctcgtagggcttctctcccatatcgtgcagcaggtccgtacgcaccgaatcggccgccgacctccggtaaaaagccaactcctcctcgagtacggcgacacgctccagcaggcgttcgttttcgcgccccagggtaaaataggagcgaatgtctgcgaagatgccgttcaccccgccaaccacctggttcgagcgggtgagcagcttggcctgcgtataattcgaagagtgcgcataatacccgatggcgatcgcttcgaatacgacgaacaagaccgccacgtagattctgcgcaggaattcgatcagtttatacacggctcacgggaaagcttccgcagcttcgttatttcatcaggaacgagaaacggttgatattcttcagcgcgatacccgtaccgcgcgcaatagcacgcaagggatcctcggccacgtggaacggaatacccgtcttggcattcagacgcttgtccagccccttgataagcgcaccgccgccggccaggtagatgccgttcttcacgatgtcggcatacagctccggcggcatggtttcgagcaccttcatcagcgccgcatccagcttgacgagcgacttctccagtgcataggcgatttcaccgtagctgagcgacacggtctgcggcagggcggtaagcatattaggacccgttaccacgtaatcctcgggctcttcgtccagctcggtgagcgccgcaccgatcgaacacttgatcgcctcggccgtgcgttcgccgatacggatgttgtgctgctggcgcacgtaactctgaatatcgttggtaaagacatcgcccgcgacattgatcgactcggagcaaacgatgccgccgagcgaaatgcaggcgatctcggtagtaccgccgcctatgtcgatcaccatgttgccctccggtgcttcgacatccagaccggcacccagcgccgcagccatcggttcgtaaatcatatagacctcacgccccccggcatgttcggcggaatcccgcacggcacggatctcgacattggtcgagccggaaggaatgcagatcaccatgcggatcgagggagcgaagagattgcccgaagtcttgactttcttgatcatgccgcgcagcatcaactccgtagcgttgaaatcggcgatcacgccgtccttcagcggacggatcgtcttgatgttcggattggtcttctcgtgcatctggcgggcctgcgtaccgatagccaccagtttaccggtgtgtacgtccaacgccacgatggaaggctcgtccaccacgaccttcccgttgtgaataatcaaagtattggccgtacccaagtcgatagccagctcctgtgtcagtgaaaaaagtcccatagtactctgctttcctctctctatattataatctattaatttctgataatcaaaatattgactttctttcccagaagccttcgcctgcccgtgaaatccgtgtcaatacatcaggaacaaaggtaatgaaaatgaaagcagaataaaacaaattcgtttgttttttctgccgagtgcgtcttactttctacaaaggtagggaaaagaaggataattatgtgtcctttcccgttttttatttacttttgtagaaaagaaacttttattccgaaaacttatggaccacaagataggcagcggcgccagatgcgccatgatcggatacggaagctgggccacggcgctcgccaaggtattgaccgaaaacgaaccctcgataggttggtacgtccgcaatccggaggtgctcgaaagcctgcgcaacaagggtcgcaatccccgctatttgagcaacgtgcggttcgaccgcacgcgcataaacccctcggacgacctcgaccgggtggtttccgaggccgacatcgtcatcctggccagtccctcggcctacctgaaaaagacgctcgaaacgctgaccgttccgctcaaggacaaattcgtcatctcggccatcaaaggcatcgtcccggacgactacaccaccgtcgtagagtatatacacgatcattatggcctatctttcaagcaactgggcatcatcaccggcccctcccatgccgaagaggtttcgctcgaacggctctcctaccttacggtggtttgcaccgatccggaaaattcgcatacgatcggacacaaattcgccaccgaatatatcaaactctcctattcaaccgacctgtacggcatcgaatatgctaccatcttaaaaaacatctacgccgtagccgtcggcatggctgtcggattgggctacggggacaatttcctcgcggtactgatctccaacagtgcgatggaaatggcccggttcctgcgggaaagctaccccgaccagcgcgaaacccgcgcctcggcctacctgggcgacctgctggtgacctgttattcggtttacagccgcaaccgcaaactgggcctgctgatcgggcacggctgcacggttcgcgatgccctggacgagatgacccaggttgccgaaggctatttcgccgccgactgcatccgtcacatcaacgcccgccacaaggtgcagatgcccattgccgatatggtctatgaagtcctttacaaaggagttcctgttcgggaagccatgcaggagcttacggcaaaactgatttaacaccaatacagtcatgaaaactctgtcgttcgatcccattcgcgccgatgtcgcaatcaccgagaaggaaaaatccgcagccctgcacgccaacgcactgctgcacaacggccaaggtgccggcaacgatttcctgggctgggtggggcttccctccgccctcgacgaagaggagttgcaggcgatcgaaaccgaagccgcccgtctgcgcgacctggcggaagtaatcctctgcatcggtatcggcggctcctacctgggtgcacgcgccgtctatgaggcgttgagcgacccgttcaacctgctgtatgaacatccggcgaaccccattctgcttttcgtcggacagaacctgtcggaagactatctggcccgtctgctcgcagccgtcgagaaccggtcgatcgcggccatcgtgatctccaagtcgggcaccacgaccgagccggccattgccttccggctgatccgcagcgaaatcgaacgccgctacggacgtaaggaggcggcccggcgcatcgtcgccgtcacggaccgcagccggggggcgttgaaaaccctcgcggaccgcgaaggctaccgcactttcgtcattccggacgatgtgggcggacgttactcggttctgaccccagtgggtctgctgccgctcgcggcggcgggcatcgacattcgttccctactggccggtgcgtgcgaaatggaacgggcgacggccgacggagtcccgttcgacgaaaatcccgcagcccgttatgccgccgtacggaatatcctctaccggcagggattcatgatcgaaatactcgcctcctacgaaccgcaactacaatatctggccgaatggtggaaacaactcttcggcgagagcgaaggcaagcagggaaggggaatcttcccggccagcgtcaccttcacggccgacttgcactcgatggggcaatacattcaggagggagagcggacgctgttcgaaacggtcgtctccgtcgccgccccggagcaccgggtgaagatcggcagcgacccggacaacctcgacggactcaacttcctgacaggcaagcgcctttcggaaatcaaccatacggccgaactgggcgtgagcctggcccatgcagacgggggcgtccccaacctgcggatcgaaattccccgcatcgacgcccgcagcctcggcaccctgatctatttcttcgaaaaagcatgcggcatcagcggttacctgctgggagtgaaccccttcgaccaaccgggagtcgaggcttataaaaagaatatgttcgccctgctgggcaagcccggctacgaagaggaggccgaaaaactacgccggaaactgtaatcccctcggctgctgcgaccggcgaacacaagaggatccgacattcagaccgaataaaacaggagtaaaaatctttgtgatttttactcctgttttttgtaaaacgacaactatccaatcaaaagtccattgccggaaaccacctcctactcaagacatttttttagaataattccaaatgccgcaatccaaagacaaacaccgaaaaatatataccagtacggatgcggggcacacaactcttgggcccaatctccctgttttttataatatccatattgagaatagaacatcaaaaaaaacatgattccaaaaaggtacaagaaaaaatcatcgtgctgattttccgattcaaatcgcttgttataataaaataaaataaaataaggactgcattgcacagtccttattttgtcgaatatgaatcccgtatgacttacagaatccgtacgccttcggcgctgcgtaccatcacagagttgatgacctcatccggaatgatgccgtaaacgaatgtcagcttgtaagtgctgtcgtccgcagccgtcattaccatcgtttcgccgacaccgctcatctccccggtttcttgattgagctggccgaaaagccagtccacaccggatacggtatagtcgtatgcccaattctcgccgtcggaatatttaccggtaagtttcttggaagtttcgtcgaaagtataggtacccgtcatcttcacgaacccgttcgagctgacgtcctgatacatttcgaaattcttctcctcgtcgaaaacgatataaacctccttcgggaaattcgtatcgtcgccgcctacctcccatttggtcatatgccagccgtaaacatcgacaggcttgggatcaggaggggtaggaggagtagtttcctcgttgtcactgcaaccgaccagcgccactccgaaaagcgccactgccaataaactaatcaatcttttcatatttcaattatcaggttatacccgtctgaaaccggacagaatcaatttcacaacacgcaaatataatcaatcgaacgctatttccaaaattttcacgtcggaaatccgaaaaaagccggaaaggaggcccgttttcatcgaaattatcgcagcgctccgcccgacatcggacttacagcacatccaccaggccgtgtctgacggcataaaccaccaggctcgccgtatttttacatccggtcttctccagaatattggcccggtgcttgtccaccgtgcgcttcgaaatgaacagttcgtcggcgatctcctggttcgacagcccgcggcacacgcagaccagaatctcgatctcccgggtcgaaaggcgctcgtcggatccttcgtacccggacactgcggtctgcatccggctggcgagcgaccgcagcacctcctcgcagaaataggtgcctccggccgccaccgtttcgatcgcccgcaacacttcgtccatcggggaatccttcatcagaaaccccttggccccggcctgaaccatccgcgagtagtaattctcatccccgaacatcgaaagggtaatgaccttgagtccgggctccagagccaacgctttctccgtcgtttccgccccgttcataccgggcatggcgaagtccatgaagaccacgtcggcctccgtcgcgggcagcatcgccagaaattcctctccggtcgaagcctctcccacgacccgaattccgtcgtaccggtcgagcagtccccgcatcccgctgcggaacagcgagtgatcgtccaccaatataattctgcaaagttccatcgttacagtttttccgccgactcagcctgggtgctgacccggattttcgcctgcataccgacgcctttggcactcgtgatgtcgaaccgcccgttcagggagttgatacgcgaagcgatgttcgacaaccccatgccgcaatcggtcacggcggcagggttgaacccgcgtccgttgtccgtatagtcgagcgcgagcgtatcgccgctcttggagagcgaaaggttgatctccgtacaccccgaatgtttgagcgaattattcaccagttcgcaaacgacacgatagagaatcacctcgacgtcggtatcatagcgctccgagcgaaggttggtcgtgaaacggatcttcacgtcgtgcatcgccgaactctttcccacgaagttctggatgccccgcgccaggccgaaatcgttgagcacatgcggcgaaaggttgttcgaaatttcccgcagcgagcggatcgcctcgtcgatcacataagtcgtattaccgatgatctcctgctgatcggccggcagcgactcccgttgcagggccgacagcgacatacgggccgacgagagcaacggccccagcccgtcgtgcaaatccttcgcgaaacgcgaccgcgatttctcctcggtgcgcagcacggccgtcaggatgcgcttgttgagcaactgccgctggcggttgagccgggcgatgtacttgaaaagcttatgggcatacatcacgccgatcgacatactgatcgaaatgaccagtcccaaccagacgaacacctcataaggcagcgtctgaccgttggcacgcaggaactgtacgacccgttcgacggaaaggagcgtgaatccgatggtgaacaggatccagatcgaattgtacttggtcgtacggatcaaacggatggcgaacagagtcgcgatcgtctggatgacgatggccacgatgagtaaaattttaatcagcatattgagtattccgctaaaattcgaattcttccgctccgacgcaccggcccgaaccgcttcccgtcttcacgaatacaaatataggaaaagacgggagtaattgaaaatttattttcggacagccggttcaaacaccctctattcaccccgaaacgaacgaaaatcgcctcggcacatccctgcggttccggcatattccgacttcggaccgaaatccggaattacgccccgggcagcttccgtcgcaaaacaggatcgcccaatctccggcacctgcctccggtccgataaatcctatccgaatatccgctccagcggagccatctgcgcatagtcggtcatatccgtctgcacgggaaccaccgaaacatagccgttcgccaatgcccactcgtccgtatcggtcgattcgggttcgctattgacgaacgcacccgtcagccagaaatactcccggccccgaggatcgtggcgacggaaaaactcctcgcgccaataccctttgttctggcggcacacccgaatacccttcaccgcttcgggccgtcccttgggtatattgacattcagacagaacggcgtggggggattggcctcgaccaccgcacgcacgatgcgctcgctgtaaatcttcgcggcttcgaaatccgcctccaggctgtgatcgtccagcgaaagcccgatggcaggacaaccgtagaaactgctctcgatcgcaccgcccatcgtacccgaatagaggatattggccgccgaattcgagccgtgattgatccccgaaagcgccagatcgaccttgcggcccttgaggaagtagtcgaaagcgatcttcacgcaatcgaccggggttcccgaaaaagcataaacctccacgccgtcgcccttcgacacttcgcgcaggaaaagcggattgttgatcgttattgcctgactcataccgctctgcgacgtttcgggcgctatggcgaccacccggccgaacttgcgtgcgacctcgaggagcgcctgaatacctcttgaattgtaaccgtcgtcgttggtgacgaataccaacttctctttcatcatatttttctccgattttagtgacaaatatacgaaaaggcgggcgacattcgtcgaactcgttcgaaaagaatgtccgaaccgcctcccatatttcatacaacatacatacttccttccctgcacccgggaaattccccgcacgccgatcccgtcggaaaattccattgtaaacaaaaaggatcgggacggggagttgcagactaaccgcaaaccatgtgcctcaaagttcgagagccatccatacgcaccgcccgtcgaagcaatccgcaccttccgacacgattcaagatgaaacccgttcgcctcccacacccgccgcatccggcatcgccgcacaaccggtccggctgcggagtcatctattttttagacagccgattgcccgtttgggaaaaagtttctatatttgcggaccgtatcaacctcttatattgggtgcgaggccacgaccggaaacatcaatccgttgatttccggaggattgcagagcaaggtccctgcatggtaggcaaacacagcgataatgttgaacgcagaaatcatcaaaaaaattgttgcaacaatgaacaaggatgcagtaatccggctcgtcaacgagcagatgtggaccaagacggatgttccgtcgttccaggccggtgatacgatcaccgttacgtacaagatcgtcgagggtaacaaggagcgcctgcagagcttccgcggcgtagttatccagatcaagggtacgggcaagaccaagatgttcacgatccgcaagatctccaacggcatcggcgtcgagcgtatcttccccctctattcgccccacatcgagagcatcgaggtaaacaagcagggcgtggttcgtcgcgcacgcatctactacctgcgtaacctgacgggtaagaaagcccgtatcaaggagaagagagccgcttctacgaagtagatccttccgcctgcaagaaaaaagcctccgctcgaacggaggcttttttctttaacacgaatcttcacaacgccgatacccgcaccagcaaaaaaaacgctattccggccgggcaaacatctcgtccgtcaccgggtagtcgatttcgaaaccccggataataacttttcccaacttccgacagacaagacaaagatcgagttgcggcccgccttcccgcgaccgaccgaagagccacatatccctgccaatacccggccgtcggccgtccgcactacggacgatcccgaaacgctccggacaaatttgtccaccccgaaaataaaaaaggttgcaaacattcgtttgcaacccaaccgaccttccggtcatttgcggagagggagggttttgaacctataactctaaccgcttatatttcagctactttgctttcaaaatttcaaataggtaacgaaacagtaacgattttcagatgttgggcttgtccaactttgaccgctgtttgtctgcctaactttcgggttcaaagatacggctttcttttgaaactcgcaaatatctgataataaatatttttgggttagtgcaaggtgcaagctat

SEQ ID NO: 10427 - DNA, 6535 bp, Unknown
  gut microbiota DNA sequence
tagatattgctatccattatgctgcccctcgacttgcatgtgttaagcctgccgctagcgttcatcctgagccaggatcaaactctccattgtataaaatgtttttgttaaatcttagctccaatctcaaaggtattgtttgaaatcactctcgtatgagagtggataaaaacttgctgctcaatatcttcaaagaacgttgttctatatatttctatttagaacgattctgtttttcattggatcgcctctttcgagtctctccttctctcctctcatttttcagtcggaaagtgagtgcaaagataaagcacttttttcaaacttccaaatttttcgagaagaaatttttcagaaaactttttcagaacttgtcgctgtgagtcgtgtttctctctcaaagcggttgcaaagataaatgcatttgctctaattatccaaatatttttcactcttttttcacactattttcgccgaatcgtcacacttgactaaacatcaacatattacatcgacaactttttcaggtgcaaaacctgcctccactccctccaacctgaaaatagatggaaaatacacgctcgagcaaaataagaacacaaggtcgggaaagacaaatccgctcgaaaccctcgacaacaatccccggcatttcactcctcaaggaataaataagcacaaatattctggttttatcactccttcagaaatattaccgacaaagtttttcctgcttttctcacccccaatgctgttgttcctgccgttcaatataaatattatcacaaacggcagctacaaaattcggttgtttctcccaataattttcgattcattcttcccgtttgtacgcaggcacaccggttattccgccaaattcagcaaaaaaatatggacaacaaccacaaaaactcactacacaaacgaaaattaaccgaatacctccacagcaatacctgatttatatctcgacataccgcccttcaccctgaagctgcccgacatcctcctttccgaaagagatttagcttgcccaaactataagttgccgccaaaatcaacgacaaaacagtcgtgacagctaaaaatatataactgtccaacgataaataccctgaaaattactcttatctcgaaaagcaatagaagggaggagattcggtaatccttacatgcaagttggcaagttgcctcactctactccatctttcgctatcttcggaagaacaagctacggctgcatgctcaaataaatttggctcgcccccgcttttcactatctttgcagaagataggatgtgactcggcaatctttgcgtgcatgcccgcacgactgcaccctctctttttactgcctttgactgcgcgatcgcccttaacttataatgttccgatgaaaacgcttatatatattataggtatatttttcctgcagacctcctgctaccagcaggaatttcacccggaatcgggagatttgatcttccaggtcgggatcgccggcggaatgacggaagccatcgccgatgcgacaggcggggagtccgatctttcgttcacccatgtaggaatcatcacggtcgaaccggccggtatttatgtgctggaagcaaaatccgagcctggggtgacgatgactccgctgcaaaaattcctcgattcgtccgctacaatcgaaggccgtccggctgcagcgatagcccgcataactcttcccgaacgcagggagctggcgacccgggcgatcggcgaagccaaaaagtatctgggccaaccttacgacgactcctttctaccccataacggcaaaatgtattgcagcgaactggtttgggagtgttatctgaccggctccaaaaacgaacatcttttcacagcccggccgatgaatttccgcacggccgacggtcggttgccgcaattctggatcgaccatttcgcagcaatggaccaaccgataccggaaggggtcccgggcacgaatccccaagacatgtcccgggaaaaatttctgaagatcgtatatcgatattggcaataacccgaaaacccgataaaaactgagatctccgacacgtcgatctccacaaccgaattctccggactgccatcgcacgcaagccagcatcccaaaaattacagaataagaattatgaggttacggcccaatatgggtaaaatagctgaagcagaaaacgtccgtcttataacgaccgaccgctaccgcaacaaacagccctgcaaaatggactgaaatgccgatctttcctctccttaaaccaatcgttatgtatcttattcctgatgatttcagtccggaacggctgaagggaaaaaccatcgaacaggtctgttattcgatcaatcaaatcggattgttctgggaaaatggaaatattcagattatgggatcgttttcattctctcgcaacgggagaacccatgtgtacgaagagatttatcccgtcaccgaagatccgggattattatgtctgttgcagcaacaaataacagatgcgaacatttccagtgcaagagattctttgtcgttatatttcagcaaccaatcggtactggttcttcactccaatccccattttgaatcattcattatagacgatcgaatcatcgtatgaagcgggcgcagcaagtaaacaactgaaaaagaacagatggggaaaattgcatttcttcgacctgttctccggaaaagccgtgaattttcgcgctgtttcagaacagacaaaaactcattacgacagcctccttaccgaaagaattaccagcaaaatcataccccggaatcagtcgcggaatttctgcggggtggggcaattttgcgctcgaatggttccgtcgttgagaaatgcgacgtaatcgaaatcgtcgagataacgccgacccgacagaccgttataatccaagatccggcccggcacgaaagaatccagcgaacgcatcttgaaaatcgacgggctttgcaacggcagcgtttcgtagcccaggatcactttgcgcgatatcggcagccgttcgaaacgttccaaaagaccctcgtcgagctccgccgcctgcatgactacgcacagattgtcgaaatcaagacgaccgctgcgctcgagccatttttccctggcctcttcgaaagagcggtaatgcagaaaatggatctttatatcgggtagcgtgccgtttcctttcagcatgccgacgggatagcgacgcgccccctcgtacgcatagggacattcgcacagttccgcctgcgaataatagcgcaaatccgccacatagtcgataaaatccccgcaggattcgaaaaacagattgaccgtcggggaattgaaacgcagccgcaggtcgtgcgccataacaccgcccacacaatccagcgaaaggatcgacggggcgagattggtcaatcgccgcaccagccgtttgcggtaaaacgaatgcctcaccgcgattatctttttacgccaccaggttgttatacccgttaaaaacccccgagagtttcgtcccatatatatacaaaattattacgcgattctttctactattatgtccgtgttttcccgcaacagagccaacaattgattgttgtcactgccgggtttggccttgaccaccatcgtaacccggtaggttattccatcgccgcccacgacctgcggcacgacttcgtacgacacgaccatataaccgtccgtccgtatccggtccagcgtgtccgctacaccggtccggtccgatgccgaaaatacgaccaccatccggcgcgatccgagcgaacggaaaaccaaactcaacccctccagcgcgacgagcgtcaggatcgttgcggcaagagccagccacgacattccggcgcctgcggtcaaaccgataccggccgtagcccacagactcgcagccgtcgtcagtccccgcacgatctggtggttgaagatgatcgtaccggccccgatgaaaccgataccgctcaccacctgcgccgcgatacggctcggatcgagcgacacgccgtcatgcgtcaaaatctccgaaaagccgtactgcgaaacgatcatcatgagcgcactccccaacgaaacgagaaaatgggttctgaaacccgcctctttctcccggtactcccggtccagaccgattatcgttccgaatagcgcagccagtaccaggcgccagacaaaatcccatatcatcgtattttccatccccgtcatcgttcaatttcgataggcaactattcatccctgtaccacgaccgctttcctgccgatttcggcgatcggtcacaactctgcggccgtttttcaatacggccccaccacacctcacctcacaagggagttcgaagaaaagtcgaaatatcggtaggtttcgaacctgtgccgatcggtacatcaaaatatattattaaaatgcaaatatacgaaatttgaatccgcagccaagaaaaaagaccggcaaaatcctcgtcgtcaccgccaggcatacgaaaatatctgccagaatacccccctgcacacgggttctcccgccgataaaaccgggaacgaataccttccaggcggcacacgatacggaccggcatatatccgatgcccttcgccggcaaccccacagatccccgggatattcgtacggctcctccccttcttcttatgaatcccgatttttacccataacgccatacagataactttttcgccccggcagaatgacagaataaaaaacttttcgtatctttgtgggctatgtataactaaactaactattaccgacatgcctaaaatgaaaaccaatgccgctgcaaagaagcgtttttctttcaccggcacaggaaagatcaagcgcaaacacgcttatcacagtcacatcctgaccaaaaaatcgactaaacaaaagcgtaacctgtgctattcgggcaccgtttccgctgccgatgaggcaaagatcaagaatctgctggtgaaataattcatcgggccggattcgcaattttattaatcaagggacaaatcagccccgaagaacgtgagagaatcacgtcgctgacagtccgtcaaaaacttatttactatgccacgttcagtcaacgctgttgcgtcacgcgcaaggagaaaaaaagttttgaaacttgccaagggtaactttggttcaaggggaaacgtatggaccgtagccaaaaacacggtcgagaagggtttgcagtatgcttacgcacaccgccagctcaagaagagaacattccgcagcctgtggatcatgcgtatcaatgcagccgtccgcgcgcagggaatgacctattcgcaatttatcggcaaactcaacgccaagggcatcgtcctcaaccgcaaggttctggccgatctggcaatgaacgagccgaaggcattcgaagcaatagttaatgcagtaaaatagcaggcgccgtccgtcggcatcgatgccgacgttacgaaggccatgcagttgtcgaaatccgcggagcgatccgggacttctccgaccgcaaatcaggcgggtaacgatcgaaagaccgttcccgcctgaatctttatcccccttcctgctccggattcgtttccaattcggacgaccgcagcggagcgataacgatagccggaaaaataccaatgaaatcgcttcccggacataactgtcttcaccgagccccccgacagaaacgttttttcagccggagatagcaccgaccgccctaaagttttcagaccgcagcctatggtggctgcggtctgaaaatgacttatggaaaaatgggcgaaaagttacgtctaatccaccgacgatgctttcgtcttcgcctctttgggttgaaaatcgatctgatagaatttgaattcgggcttagtgatagcgcccgtcgcagcgtcgataccccagccgagaacatcgagcagatttataaccgatacggcgttaaagtttttgtttataatgatcggggaggccgtatagttcggtgattcgatctttacgactgtttcgtcgaaacctcttcgtatttttgtcgtatagggaaaagtgacattggtgtgtttaagcccatcgattgtcagagtagcctcttcggaaatctctccgtcaaaagtaactttggctttcgaaccacagaaaatagaggcacaagaactcatcaacaacccgacgcaaatcaatgtaataaacggtttcattgtttagcataaataattccgtgtcccctcggcatggtttatttacaggttgaaatagaaatataaaaaagcgtgggacagaacttattatttgcttctgaggtcttcgactacctgtacgtcaaataaatgagtaaagcccacgctggtgcgtgagcgttcacactttactcttgacgtacttttgaaattgtcgaagtttcagaagcaagaaataaagctaacgcttttatatgtatgtaccgacacttttcgtgcgtgaacggtacgggaaatcaaaaaagctattatcgttatctattcataggcaaatgatattaaaaatttca

SEQ ID NO: 10428 - DNA, 36823 bp, Unknown
  gut microbiota DNA sequence
tctgcaaagagaagcaaaagagcttaaacaagtttggcttatctcttacccttcattatctttgctccagataggatgcgcctcggaaaaactatgggcaagttctcgatttctcgcggtttttactatatttgttctattaagactaattactatggaatcactcaaggaactctataaaatcggtaccggaccctcgagcagtcatacgatgggtcccaagaaggcagccgaagcattcgtcaaacgggcttccgatgccgaccggtacaaggtaacgctgtacggatcgctggcagctaccggcaaagggcacatgaccgacgtggcgatcctctccgtgctggagcccgtggctccaaccgaaatcgtctggcgtcccgacatctccctgccgttccaccccaacggcatgcgtttcgaagccttcaaagcgggaaaacccgtggacgaatgggtgatttacagcgtcggcgggggcgctctggccaacgaggaaaccgccaagaatcctcctgccaacatctatcccatgacccatatttccgagattctggagtggtgcaaccgcgaggggcaaaccttctgggagtatgtcgaagagtgcgaaggccccggaatctgggattatctcgatgagatttggaccgccatgtgcgaaaccatcgtgcgggggctgactgccgaaggagtccttccgggcggactcaaagtttcccgcaaggccagcacctacctggtcaaggccgagagttacaccgacacgctgcgctcccgcgccaagctctatgcctacgccctcgccacggccgaagagaacgcttcgggcggcaccgtcgtcacggctccgacctgcggatcgagcgccgtcatgcctgcggtactctatcatctggtgaacacgcgcaacttctcgcgtctgcgcatcctgcgtgccctggctacgggcggactgttcggcaacgtcgccaaaaccaactcgtcgatctccggcgccgaagtcggctgccagggcgaagtgggcgtcgcctgcgccatggctgccgccgcagcctgccagcttttcggcggcactccctcgcagatcgagtatgcggcggaaatgggcctcgaacaccacttgggacttacgtgcgacccggtttgcggactggtgcagatcccctgcatcgagcgcaacgccgtcgccgcagcccgtgcgctcgacgccaacagctatgccaacctctcggacggccaccacatgatcagctacgaccgcgtggtagaggtgatgaaggaaaccggcaaggacattccgagcctctaccgcgaaacctccgaaggaggcttggcccgcaactatacccaaaaatagagcaggttacacaccccttttatgaaacattcgaaacttttcattttcgccattatgacgacacttgcagtttcgggatgcaagcaccaggcggcaacgtatcccacggacacgctgaccacgaagaacgggagtcagctgacgattacctttttcaaacacgcatcgctggccatcgaaaccgaaggccgccatatttacatcgatccgatcagccaatacgccgactatgcgtcgctgcccaaggccgatctgatcctcattacccactcgcactacgaccatctggacagcgcggccgtcgccgctctctccaccgcagccacaaccgtcgtgtgcgaccggaccagcagcgaaacgctgggaggcaagtgcctgacgatgaagccgggcgatacgctcgccccgcgcgactacctctcgatcgaagctgttccggcctacaacacctccgaagaccgtcagcaattccacccccgcgaaagagaggattgcggttacgtcctgactatcggaggtacacgcatctacatcgccggagacggggaaaatacacccgaaatgaaagccctgcatggcatcgacatcgccttcctgcccgtcaatcaaccctacacgatgacggtcgatcaagccgtggatgcagtcaaggcgatccgtcccgcgatcttctacccctatcattacggcgaagtcgaagagaaaaccgacatcgaccgactgtcccgggaactgaccgacataacggaaatccgcatccggccgatggaatagcgtttttttccaacccgatcggtcttcccttcacataaaacggaggtccggcgacatatttcgcaaaaagcggcaggacacccaaaacgctgtcctgccgtttttttacgcttcggtcgctccgcaatcagaactcccgctcctcgatatgttcaaacagactccacccctctgcctcacggtacgcatcggcacttccctccggaacatagagattctttatcgaagtaccctcaaacacctgtatacccagcagaggaggcaccccagcccgacaataaacatccgtcaatgcccgacactcataaaaagcctgacctccgatcttggtcgtcccttcaggaataaccacctcttccaacgcggaacagccgtaacaagccatcgacataacctctgccacctgcggtagtgaaatatgcttcaaactcgttttttcatcgaaaatggcactctcccacacctccattttcgcctgcgacagatccagacaggctactcgcggcaaattccgatatataaaacgaatatcgtcgtcattcagaaatcccgacacccgaagcgtttcgatccgtagcaaatcggcatcctccagcgccaaatccagcccgccggccttcggaacttcgacggaggccttcgtcggatctgcctcttcacccccgtcgccgttatcaccgtcatcgccactatcgctgccctcgccgctattatccccgtcgccgctaccaccggacgactcctttttcgggagtgtaatcactgttccgtcctgcaatgtcaaatagacgttctgttcatcctgcgtcacctccgtaatcgcagagtccgccccgtctttgccgtgataaatcgtaatcggatcgcttttaccgaaagacaactcgtatccgaccgtcttcctgttctcgatcacaggctcgaccgaagtgatgtaatcgttctcattcaaccgtttgcataactcctccagctccttcatccggttttcaagcgcctcgatccgttccgtcagaaccgaatcatcgtactcatcgctgcaaccggtcgtaaccaggcatgccgtgacagccaaaaagaacaaaaatttcttcataataaaaattttataaagatcggtcccggctcctcggaccccgtttataaaaagaaagtgtggagtcgatttcgtttatctgatagaaggctctgacaaagcccaagcaaaaataaacgacgcaataccccacacttgagtagatatggagtatgggaacactaaacgtatcccttgccataatctaaacaagaaatgagtgctgttcgtccatccttttgcttgtgaaaactgtcagattttctatcaaggacagtgcgaaaacactttcagtatgtctgccgaacgcattactacgctcgacgttgcaaaaatagaaaataattcgcagatgaacaaccactcattcggggtattgcccatataagctatacgcagaaatagattttactctatctcatccacattccccgaccctgttcgcggtctttgatctctattcctaagcgctccaaaaattcttccgccttttgccgaaaccattgcaaaatgggtatcaagtcgatgaccagttgaaacccaccagggcctttttcatcccgcaggagccgggcttccgagtgttcgttttcgaagtgctgggaatgctccgatgaatagagctttccggagaaatggacaggcagcatattcacgaggtcgcaggccatcttgtccgtgaagcctatctccctgcaatactctcccctccggataagctgaggcgtgtcgggaaaccaaccgtaaatgcggtctatctcgccttgcagtcttttggcggtctgttcatgctcccgcctctccctgtctatcgtcttgttcagcctccgtatctcggagtgcaggcgttcgttcttttgggtaaggtcatctatctgctgttgctgccgcttgactttcgacgtgccgatcctcgagccgataccgtcgaggatggtcgtacctacctcggcggtggagttcttcagcttctcggttctcagctctccttttaccgctttcagttccgcttcggcttgttctttggctatccgggttttctcggcctcctgcttctgcttggcgataatgtagtccgtccgttccagatgctcacgtccggtctgcactttggacgtgccgcgttccatgccgagcgcttcggcccatatggtctgcatttcgctcatgtcctgcggcaagagtttgcaagacttgcccgtgttgtggttcatcctgtcccacacgatatgggtgtggtagttcggcttccatgaggtttcatcgtcgggcatttcgtaatgtccctcgtcgcggtatatgaagatttgcaacggcgtaatgccccatcgcaccttacacacatcgcagaaacgctgcaactgcttcattgcggtatcttccttgacgaccaccacgccctttttgattggcgtgctgtcacggactacggttaccttgcccgtcttcttgttcacccgttcccggtctttggtctgcacagcccggcctgtctttttcttgactattgcagctatcagcctgttcgttcttcaagcgaggtatcgcccagttcaggcgatacccattcctcgtttttcgccatgaggtcggtacggatgtagatctttcccttgcggatattagcgagatattccgctaaccgtctgttgtgcgccccgctcaaggcagggctttatgttgatggatgtctttgccataattgtcagtgttatggaaagagcgtctgaaagacgttcttcccatttgtgaaatgaatgcaatgattacatttgtgcgggccttccggcggtcatcagtccgaaagaccgccgcgggagtgcagaggagtaaaccctttgccgggttgaaggcaggaccctcgcgggttttcagggcagagccctgaatccctcggaagtgcccacaactaccgaagcgcagccggtagttatagttcgctatatcaaggcaagccttgaagtttccttgccactccctccgctcgtccgacgcccccccggtatcgggctatcgcaccttatgcccgtgtggttgctgtttgcgctgcacttgttggtgctgcttctcttgcaggtattcgttcaggtatttgtggtcgcggtaaaaaacggactggtcgatcacttcggacgagggtaaggattctcccagtcgggccaacgctttctgccctgcgtcgtcgttgtcgaggagggcatggacgaccctgtggcgcgagaagaacgaaacagccttgtgcagattcaccaccgagttgagcacgatgctgtcaatcgacggtaacgggttcctttcagcgagagataggacagaaagtcgataaatccctcgaacgccattgccatatcgctgccgttgtcaagtgtcgtaatatgtttgggcgaggagccgcctttgaaccgtgcggagcggagctcccaccctccggcgtcgttgcggaaaccgacggcgaaatactctttgccgccgatcgtgtaacgcacctcgcggcaataagtccgggcgatggcagggtctatgcctcgccccgtgagatagctgaccaatgccggatggatctgttcgcggtcggagaggatagcaaggcggagcgcttccggtcagcctgtcttttgcgattggtcggaaagggatacaagcgttcgtgttcgcctactacgagcttttagacggcctcgccctcggcacaaccctccatacggggcacaaggtcgatgattgagccgccctcgcccgttccgaagtcgtgccagaggttcttgtcgtaactgacactgaagctgggagtacgttcctcacgcagcagcgagaggtacatgccccggttgccgcgttctcaccggggtttgattccccgtaccgcgaggtaagcccgaatactaatgcgtcgtcttatttcttcgtaattcatggtgtcggatttttttgtggttgttttattattttgcctcattagtatccactaaaaaatcgctatagtttttttgaaatgattgatatttaatttgttacaagagattttcttgcaaacggacttgaatttacttttgcagtctacatcagactgttatgtttaaagacaaatacgtttttgctcaattagttcaatttcttgaccgcaacaagttcaatcgtttatctgctaagtatcagggagacagatacgtaaagtcattcacctgctggaatcagttacttgtaatgatgttcggacaactctcaaaaagcgaaagcttacgcgaccttatcattgctcttgaagttcattggagcaaattataccacttgggtatgggcaagtccgttacccgaagcaatcttgctaaagcgaatgagggtcgtgactatcggatttttgaagaatacgcctatcatttggtggcggcggcacgttccaagagtaccgagaagatgttcggatttaccggtcatgtatatgcctttgactccacaacgatagatttatgtcttgaagtattccaatgggcaaagtttcgtaagcataagggcggaatcaaagtacatacgctgtatgatattgaatcccaagtcccagctttctttcatatcacggtggcggcaaccaatgatataaaggtaatgcctgagataccatacgaaaaggggcgtattacatcttcgaccgtgggtacaacgacttcgccaatctctacaagatagagcagatagaagcaacgtttgtaatacgtgcgaagaagaacttgaagttcaaacaaatctcatggaaacggaggcttccaaagaatgttttatccgactctaccattgagtttgtcgtctataagagtagtaaagattacccagctacactcagaagagtggtttatcttgatgaggaacaaggtcgtgaattcatgttcttgacaaacaactttgaacttcctgcatcggtcattgcagaactttaccacaatcgttggaatattgaactcttttttaaatggttgaagcaacatctaaaaatcaagaagttctggggtacgagtgaaaatgctgtcagaatacaaatctactgtgccgtaattacttactgtctaattatatgtgtaaagcacaatatgaaattggaacggtcggtttatgaaatcctccaaattgtaggaatctcacttactgacaagactaatctcaaagaactctttgacaaatcaaatatcaacaacgtcaatgaacgatgtgattcaagtaaaccaagtttatttaatttttaagcgtccataatttttagtgaacactagtgacatccgctacctggtgaacacgctcgatccgaaaggcattcccgtcgtgactccggccggcgtcctgggcggacacctggacgccatgaaattctgcgagcatatcccgcaggaggagtaccccgccggagcactggccgcagccctctacctctgctcgggcgtacgcggtatggagcgcggtacggtatcgagcgtccgcgacgagaacggcaaagagatcctggccgacgtcgagctggtacgcctcgcctgcccgcgccgcgtattcacgctttcccagatcaaatacgtcatcgaccgtctggagtggctctacgagaaccgtcacctgatcggcggtctgcgcttcacctacgagccgcccgtgctccgtttcttcatgggcggtctggaaccgaccaccgactggccggcacgcctgatggagaaattccgcaaggatttcggagacagcttgtaggaaaagcctcccctaccgataaacaagtgtttgcagcacggcatccgagcccgctgcaaacacttgttttatacctccggcaaatcacttcgcccgcaccgcctgcgcacgccgttccaaaatggccggcgtgttcttcaacgcccactccaccagactgttcagatacggcatcagatcgcccccggaatcggtcaaacgatactcgacacggggcggcacttcgggatagacctctctgtggaccagcccgtccgcttcgagcgaacgcagggtgacggtcagcatccgctgcgaaatatccccgagcgaacgttgaatgtcgttgaaacgcatcgtcccgttcgaatacaacgtcgtcagcaccagcagcgaccacttgtcaccgaggcggctcaagatatcccgaatcgggcaaattccctcgtgtaaaaaagttttcattattttgcggttttatctcgttgtcgttcaacatcggttacctttttgtaactcgcttaccaaaaaatcacctcttgcagaacccgattacttattttatgtttgcactacaaaagtaactaacatatcattaataactataaaaaactcaaaaattatggcaaagaaagtagctgtattggtcgtaaaccccgtcaacggatcgggcttgtttcagtatttggaaaccttcttcgagaacggcattcccttcaggacattcgcggtagcggataccacgaatgtaaaaaccaactcggggcttcgcctccagacggacgatataatcgcctcactcaaaggccatgaacacgaatacgacgccctcgtattcgcctgcggcgacgccatgcccaaattcgcggaaaacgcagacaaaccctacaacgtggatatgttgagcgtcatcaaaaattttgcggaccagggaaaaacgatcgcagggcattgcgccgcagcactgctcttcgacaacctcggcatcgcacagggcagacgggtggccctgcatccgttcctcaaaccggtcgtcaaaagctgtatcggaacggacgaaaaagccgtcatcgacggcaacttctacacggcacagaacgagaatacgatttcctgcctgctgcccgaactgttgaaagtcctgaaataatccccgaatcgtaaacatcgaacgaagtcccggcttttcataggccggggctttgcaatttatccgaaacttccgcctccgcttatcggaaatccgactgcaccgcgatacacagtccgaaaactgcccgtttccacacaacttccacacatttggggcacgattccacagtcatcggccacacgaatatcgcaacaacaaattatcaatcaacattttgaatacaatggcacacgattggatatttctaattgcaaaaaccaaattccaataccaatgaagacattcagacttattctggctctcgcagccgtagcgctgaccgcagtgtcatgcgtcgaaaaatcgggaaaataccagaccctgctcgcccaacgggactcgctgctcaccgtcgagcaaaagtacgatcaaacgctggaaatcctcaatgagatcgaaaccggatttcagtcgatccgcgaagtcgaagaccgcgtgatgactcaaataagcgacatcgaaaacaagccgctggacaaaaaacaacagatggtatcgcagatcaaccaaatcaagggtatcctgctccaaaacaaggagcgaatcgccgaactcgaagcacaattcgcacaaagcggccgcaagaacgcttcgctggccgggacgatcaaacgtctgcaggaagaaatgacccggaaagtcgcacagatcgaatcgcttcagaccgagctgtcccaaaaaaacatcgagatcgaggagctcgccggtacggtcgaggagctcaacaaggacatcgccggattgaacgaagtcactgccagccaaaaaactacgatcgaggaacaggatagtcagctcaatgtcgtctggttctgcatcgccgatatgaagcagctcaaggaggctcgcatcgtcgaaggcaacggactcttcaaaaccaagagcatcatggatggcgacttcgacaaatcggcattcacatcggccgacctgcggaatctgacccgaatcgaaacgggcagcaaaaagcccaagctgctcacctcgcaccccaaagagagttacacgctcacaccgggcgaagacaaactggtaacgctcgaaatcaccgatcccgcaaaattctggagcatatcgaaatacctggtcattcggaaataaaccgattccgacagaccgaatacccctgcccgaactgcaggggtatttttcatccgggaaagtatatcggaccataaccgtcggcccagataagaaaactcggcaaagctcaaacgacgctcgaaacgggagcagtgaacgcttgcgtacactgccccgcaaggaggaggaaaaggaacttaaataaatttggggctgcgctcggctttcactatctttgacatagtcttaaataggatgcgcctcggaaaattgggaacaagttcccgttttctctcggctttcactatctttgccctatgatccgattatcgctcatcatcgccacttacaaccgctccgcagcgctcgtcgaagcgctccggtcggtcgtgcggcaggatttcccggccgcagagtgggagtgtatcgtcgtgaacaacaattcgcaggatgacacgctggcccggttcgaagcgttcgcaacagaacatcccgcaatcaaccttcggatcgtaaccgaaacccggcaggggctctcccatgcccgcaaccggggtatcgacgaaagccggggcgaatacatcgccatcatcgacgacgacgaacgcatcaacgaacagttcatctcttcgtacgtcgccctcttcgacgcctaccccgacgctgcatcggccggaggccctatcatacccgaatatcctgcgggatgcccggcctggatgtcgagttataccgaacgtccgatagccaatccgatcgacctggggcgaaagatccgcccttttccgaaaggacgtattcccggcggcggcaacatggcactgcggcgttcgacggtccaacgatacggcgccttcgacccttcgctggggcggaccggagagcaactgatcggaggcgaagagagcgatctttttcagcggttggcagacgccggagaacgttgttactatgttccgacagcaattatgtggcatatcattccgccgcgaaagatctcccgggaatacttcgaatcattatgttaccaggtcggacgcacccaacgcctgcgggccggaatgagggggcaaaccgtgcgtctgttatcgggcgaagccgtcaagtggggtgcgacactcctgttggctctcggcttcctgttgcggttctccgtccccaaagcccgctatctgctcctgatgcggaggcaaatcacacggggaatatcgggtcgaaaaccgtaagacgcaggcttggggatctgccagtgaaaataccggctgcatcgctgcaaaccggtatcagaaaattttgctgtacaaatatgttctccggatgcaggacttgccgcacagagccgtacatacgtatccgctattccagtgaaacaggcggcggaaccccagaccatagttcggacgagtgtccggcggaggaacatctttatttatgtttcccatgcggcggaggcgtgccgggcttatgccccggtcggggatgtttatggggcttcggagcttttttgtgaggcggatgcggccgttcatgaaaatggtgcaccgaaggcggattcgggtgacgagggcgacgggaggcacacgaggtgacgagcatcgccgataaaacagcgaccagagtccaagccaacattcgttttgctttcataattctactctcttaaaagtggcacaaacaactaccgtaatgcaataacaaaaacagtcggcacgccgataagagtttccctttagaacaggtatttctccgaccgtaccttctcgaccagctggaacgcgtgctgccacgcctcctcgctgaaagtcgttccgaccacttcgatcaccttcccggcgacgatggcaccgatcgtaccgcactggcgcagcgtcagtccctcgcataacccggagaggaatccggcggcatacagatcgcccgcacccgtcgtatcgacccgcttggctgcggccatgatgcccacgtggaccacttcgctgccccgcttgatcaaagcccccttgataccgaccttcacgacggccagctcgcacagctccgaaagcatctgcaaggcattgagcggctcgccctcgccggtgaaggctttcgcttcgtcctcgttggcaaaaacgatatcgacgtaatcctgaatgagcgagcgcagaaattccaggttggcctccacgacattgaaactcgccaggtcgatcgccaccttcagaccgcaggctttagccgtacggaccgcaccggcaatcaactcgtgatcctgcaccagataaccttcgatataaagacagtcgtaaccttcgaaaatagcggacgtaacctctgccgcactcaactccagcgcagcccccaggaacgtcaccatcgtccgttccccatcgggagaaataagcgacacacaccttcccgagcgctccttcccccggaaaataaagggttctatacccaggttctcaagagcctgaataaagaaatctcccgtcttgtcggttcccaccttgccgataaagcccacgtcgcaacccaaccgggccatcgcccggatcgtattcccggccgatccgccgagcgagagcgagtaaggcagaccggcgaccgatttcgaaatctcggtctgcaaggccgcatccaccaggctcatcgaacctttcggcaaattgaacgtatcgagtactttgtcggtcttcagattgaccaacatgtctgtcagagcgtttcctattcctattacgcgtttcatgaagtcagtattgttcgaaaataatgtcagatagagaggatgcgcaccagatccaccgctccacggtcgatagtccggtcgtggctgacggcacgcgagaagggaacatagacgatctgcccgttgctcagaccgatcatcacgttgcgctgcccctccatgagcgcttcgatggaggcttcgcccatacgcgaagccatgatacggtcgattgccgacggcgacccgccccgctggatatgtcccagaatggtcacccgggcatcgtactgcggaaactcctgcttcacgcgttcggcaagccccatggcaccgcccgtagcgggattctcggccaccagcacgatcgccgaatttttacttttgcggaatccctggttgatgagctcgcccagttgatcgacctccgtgtccatctcgggaatgatcgcggcttcggctcccgaagcgatcgccccgttcaacgccagatagccggccgtatgtcccataacctcgacgaagaagaggcgttcatggctggaagccgtatcgcgcagtttgtccaccgcctcgacgatcgtattgagcgccgtatcgtagccgatcgtagcgtccgtaccgcccaagtcgttatcgatcgtacccggcaggccgacgatcggcacatcgaactcctgagcgaaaatacaggcgcccttcaacgaaccgtccccgccgatcaccaccaacgcatcgataccgctgcgcttcatattctcataagcccggcggcgcccttcaggggtcataaactcctggctgcgggccgtcttcagcatcgtgccgccctgctggatgatattgctcacggaatccgattgcaggtcgatgatttcgtcatcgaccaatcccttataaccgcgcatgataccttttacggaatacccgttatagatcgccgtacgcgtcacggcacggatcgcggcattcatcccgggagcatcgccccccgaagtcagcactccgatacacttaattgcagccatactttttctttttactgaaaaaacgttcaaatatacgaataagtcgagaacaaaagcgaattttattcggttttgtcgagcgggagtatattcggggtaagccaaatatacgaataagtcgagtgccgagcaaaatttattttagctcggccgagcgcgagtatattggacgaagtcaaatatacgaaaaacaaccgtcctccgcaactttactccgagggaaacgaccgtcgcacgcggcagtcccgctccgccggagccgggaaattccgaacgtccgcaccttccgccacacaacttccgtgcaatatgccttgcggcgtgctccttcggtccgccacaaaaaccggagcctgacttttccctcaggaaaaagatccggctccgacctgaaaaaactttttatttcgatcaacgcttttattcaaaatcaatcaaaatcatcgcattcggccgcaggttccgtcgcggtaatcttcacgcctttcgaaccgacacggatatcgactttctcaccgtcctccttatcctccaccgcgatcttcacccggccttccccggcactcaaatcaaccatgccttcgggtgtatccactcttaacaaagagttatcggcagatccggggtccggcaaagccggtaattccatatccggatcgtagctttccgtccttatctcataccattcatatccccgctcacgctcccggaccgcagaaacacccaggccgataataatcaatatccagattaggaaagtcgtcaggacggcccggcggctcggtttgcgggaagcaatcaggcacatcaacacataaatcagcaacagcaccggcaccaacgcggtcataatccccagcgacaccgtccagatgcccgcatcgacagacacaacctccggaccggccatcccgacagcaaacagaccgataatcaatgcgcatgcacccagaatcaacccgaataccagcaagccggccaggagtttcaatacgatcaggacgacctgccccaaggcataaacggccttggcaacgaccggtttggcatcggcatcgacatcgtgattcgccgccgaagcctcctcgatggattgtacggtaatccgctgtccgttttgttcgagcttctgacgcgcagtacgggctgccggtacagcgaaccacataatcaggtagcaaataaagaacacgccgagcaagttgctcatcagcggcacaagccaccagaaaaacggaatccatcccaacaacagcaacagaatgagcggcaggaacatcagcagacggatccacgtgggactggtcccgaaatacttggccacacccgaacagacaccgcccaggcgcgcctggtccatatcccggtacaggcgacgcggaatccggccttcgccgcgcggggcttcacggccctcctgttcccgaatggcttcggcagaccccatttgagcgataatctcctcgaccaacgatagctccaccactttagaattatcctggtgcgagagaatcagctcggcgatacgggcctcgatatcctcgacgatctcctttccgccgtcggtatttctatacgtatcgttcaagctctccaggtaacgcgaaagcacctgaaaggcatcggcctccatcgtgaaggcaatccccgaaatactgcatttcttaacctctttcatcgcgatcggtctatttgagttcgttattcgctgcaccgcgagtagaaccgccgctcgtatcggcagaattcacactgcacggtccagcataggaaacgcttccggcgctcgacgttcgggattgcaaagcctgctcgcaatagacccgaatatcggcagcgctcgacgcctccgcctcgcagaagtgtgcgaccagcttccgggcatcgatcgacgcagcggaagaggcttcgaacaccgctttctgcaccgccccctgcaacagaatcgacgatgcactcgaagcatccgcttccagacggtccgcatcgatctgcgccacgactttagcgctgctcgaagcgtcgatttcacacgtttcgacctgtgcatccacacggatcctggctgcgctcgacgcttcgatctccagcattctgccggtaaagagtgtcttggccacgatcttcgcagcggaggaagcctccaatttgcggatatttccgttgtaaggtacgcgcaccaggatctgctccgaaggcactgcatgaatgcgaggagcgaccgtaatcttcaactcgccaccatcgatcccgacccgcacgtactcgatcaggttatcatccgcacagatttcgatatcgccgggctcgtcggtaagcaggaccttcactccgcgcgaagcatcgatggtatgaaagtttccgaccgccacggtgcgggttatcagatttccgcttcccttgatccgggtttgaccgaagatactgcctccgcacgctgtcgtaccgaacagaacggccatcattgccaacagggccatcatcaattttttcatcgttttcagttttttaattaatcaatcggttatgccgggtcgttttcccggtggcgaatcatttgaatttgtcctaccagttcctcccacgcttcatccagcgaagccaggtactcccgccccttgtccgtaagggaatagtacttgcggggcggtccctgcggggactcttcccaccggtaagtgagcaggcccgcattcttctgccgcgtcaggatcggatacagcgtcccttcgaccacgatcatctccgcctccttgagttcggcgatgatcttcggagcataagaatccccctgcgagaggatcgccaggatgcagtaatccagaatacccttgcgcatctgcgcctttacgttatcctcaaccatatcatcgttgtttatacattgaatttcttatttcatgtttcagctccgggtccggtccgcatatcggaaatacgcaaccctttccccgggcagtttccgggctgtcccggattcggcctaccgggaattcccttcgagccgtttgggacctttgggtacgacgatccacaacaggatataaacccaaatcgacaaaccgccgaccagtaccaggagcagcgtcgccagccgcacctttcccgacgggagtcccaaataatcggctactccggcgcacacaccggcaatgactacatcgtccgacgaacggtacaatctcgcatgatttctttctgctttcatagatttccatttttagaagctgtttgaattttattcgagattattcgaaagccgttttcgagtagattctttttgggtagttgccgtaaattgcgggctattttcaaaaccagctaaaaaagaagataccgaaaagaggctcaaagaagccgaaacactttctcacagcgaatgttcaactcatctataaaattcaaaacagattcttagatttcgaagagatacaattcaaaggttccgacggaatcacgatccacaggatgatgtaaacccacagcgacagaccgccgaaaagaatcaggaacagcgtgataaggcgcaggatcgtcgagtcgatcccgaagaactcagcgattccgccgcacacgcctgcgatcgaacgattcgtccgcgaacggtacaagtgccgggaactgacgcacgaggcactctccgcatccacggacgcctcgtctcgcttctccccggtcggcagctcgccgaattccgaaggatcgcccatttgcgccatcgccccctgcaccatctgaagggtaacgaccatcatcggcgatgaaatcctggaccggaaaatctctgccagtcgggcttccacatcgttgagaatttccggatcaccggccggcaaccgccgacggatcgcatccaggtactccttcaaccgacggtaagcatccttgtcgaaagtaaatgcctgggaagccaaatttacgctaatagtctctttcatggtcaatatctatcattaataaatgagttgtatattctttacagttctatcacactacaaatataatgtaaaagtaattaccatgcaatacatagtactattttttcaacaaaaaatttcgtttaccaataatttcacctctataaatataaaaaaagcgccagaggtaaaccggacgctttaacataagatagaaagactaaatatataatatttccacgaaactaataaatgcctctttcctttaatatcatcccccaaccacttccatccttatatttaaataatataatttgggtaagagcattccctttaccaacttctattgtaccatcagaaaacacataaagataagacttagaaaatcgcttcctataaatctttttacccgtattattatccacaacaactactttgactccattggtaaaataatcaccaagttctgctgccttaaatttaacaatcacatctaaataattgttctgttctattgccgccaatgaaacatttcgatataaagtaattccccctattggcttaacactctcgccttcactttgcgcaaaagtggaaacggttgaaaaaataaacaagaatacaacgaatacttttttcatgatatcaaaaaacaattagataaagaacaaaacacaatcattagacctcatttccattaaaaatcatcaatataaaaaaagtggacaattcgagagaattgtccactttagtagcgggaggaggactcgaacctccgaccttcgggttatgagcccgacgagctgccaactgctccatcccgcgatatatcgtttattcgatgcgaatattccgcttttgtgactgcaaagataaaacaaaaaaatggttctgccaaatatttcgacaataaacccaaaaacaaataccgattaagcaggccttcaagccgatgaatcactcctcgcgcttgcagccggcaccaatcaattccgcctgaaagctcgcatactcctccggagttacgaatttgtcggcactgatcgtcagctgtccgaccggagtatcgatccgaatccgaacatcatcgctcgtaacgatcttcaggttctttatctcgacattcaaccgtcgggtctctcgaccacggaccacggagaggtgcaatactccctcctcgatctcgatcgctccattctgaatagaccaccgatcctgatcgcgcatcttccgaaacacaggatagaccagtaccgcaacagacaacaaaagaaaatagccgaatatcagtttccaatggagcgaggtaaatggcaattgctccgcaaaaaagattttcaacagcaaaaagaacagaagcattgcgactcccattcccaaaagaagccgacgaaaacgcgtctgtctcgtatcgtcataaccgtatttactcatggctcgattttttaaatgccggataaaagccatccgactccattccctacgactcgaatatacgaaaaattagcgaatatacttccccgaccccagaaaaattccgcaatacggctctacaacgatgttctgccacaacagcgccttctcatagaaaccctacttcatacgcctcctcaccgctccatccggacataccatcgggagcagacgaacgtcagacgcccttgtcgggcacagccgccactgtcttcgacactaaagcagccgccacgacctcggctagatccagcacctcccggccgtcagctccgcgtgcgatagcttttttacaaagtggacaagccgttacgatcgtccccgctcccgtagcgctcaactccttcgccacggaacgcgccaagcgaagctgctgcgcgtccgaaatcgccgtattggccaccgaagagccgcagcagagggcgtgttcccgcgtctgggccggttcgagcagcacgcccaccgcttcgatcacctcgcgcggctggtcgtaaatacggctcccgcgtcccagttcgcaggggtcgtggtaagtgaatgtctgcgcccctcggcgaagctgtaggcggccgtcccggatcaatcgcagcatatactcggaatggtgcagcacttcgattccttcgagatgatactcctcccggaataccttcaggcagatcgggcacgaagtgacgagcgtcgtaatccggtgcttgcggaaaagcgcaatgttgtaatccatcatcttgcgggccgaatcggtttcaccggagagcttcagaggccggccgcagcaaacgccgccctccttgtccgcccaccagacctcttcgcccgaagccttgaaaatccgctccatcgccaacaggatacggggcgtcagcagggtcatacacccggcgaaataacccacgcggccctcgccggccgaacggtccaccccctgaaaatactcgtagcgcttctcatcgggcgtattgcgcatcgtgtcgcgggaattcagacgcagcgtattgagttcgatccccaccggacagcgctgttcgcagcggccgcacatcaggcagttgttcgccaccgactgacgcaggtggttataccgccggtcacgcaggaaatagaccgactgcacgtcgtcgatccccaattcgctctgcaactgacaagggtcgatgcagatgccgcaccgcgagcaggcatcggtctgaaaacggtcgaacgatccctccttctcggtcgaatgcagcttgtagcggcgcagaaaaatcaggggaatttcggtgaagatatgcatataacgcgagaagggcagcactatgaaaaatagccccagacagatcgaataggcccaccacaacggctcgtacagcgtctgcaggacgatcggattgacatgatgcgccatccactcgccgatcgtacccgtgagaaatcccccgccgccgtgcagagcgcaggtgatgctttcggccagcaggcgggccgggaagatcagccacagcaccgacagggcgattcggtcgcccagtacgtgcctggtcgtgcggtgcatgcccatcgcctgcgaatagatacgcttgccgaaagccagcgtcacgcccgaaagtacgaacagcagcagcagatccatcaggaaatcgaagaccggcttgtgcggcagttccgtggcgaaatatttgaaaaagacatgcccatgcagcggaacgtaccggaaccccaggtaggcgaccgtttcgatccatccgacgacgatcagcaggaaccatccgaaggccaggctcatgtgcatatagcccagcaagggattgaccttgaagatgcggcggtgcagcagcgattcgcgcaccacttcccagaccgccaatggcgtctgccgcgaaggaatgcccttgacgatccgcatgcggtcggcagccgaaagaccgaagatccaggagccgtatttgacgatcagaacgacgaacatcgtcacgacgcccacgatgaacggaatagagaatgtcgcgtaaaaattcatcgtcagaaatcccccagtttacgtttgatgagcatcaccacggcccgcgtattgattccacgaggacacaccaggcggcatttgccgcacaacatgcatttgttcatctgttcatagacgccctgatattcgccccggcgcacgagcgtatggagtttgcggaaattgaaatccgtaaggttgccggccgtacaggtcgccgtacagccgccgcagccgatgcaggtctgcaattcgggcatctcgcgcaggatctcgtcgctcttgcgcaggttgttgctgtcgatgtcgatcacgcgcggcttgttgatcgcatatccccagttgatcgctgccatgactataccctccccagataagccgtcagggcttccactgccgcatcggcctcgttcaatgtttctccgatattcttcggcgcggtgaccgtaccggcgtaaaagatcccgtccacaccgctgcgggcgctgttcaagaagaggtcctgcggttccatgaagccgctgggcgcctgcctcaacccggccgaagccgcgaaatcggcgttcgaatcgttcgcccgcatcccgacgagcagcaccagcatatcgacgctcatccgcaaaggacgccccgtcagggtatcttcggccttgatctgcaaccggccgtcgtaggtcgggctcgcttccgaaatacgtccgcgcacgaaatgaatattataattctgttgagcctcgcggtacatctcttcgtaacctggcccaaacatacgaatatccatatagaaattaaagacgtcggcatccggaaacagccgcttgagttccatggcctgtttgacacccgtgatgcagcaaacacgcgaacaatgcgcctggcacaccttctcgtcgcgcgatcccacgcagtgcagcagggcgatccgacgcggacggcgaccgctggaggtagtcacattcccttcgttgagcatccgctcgatgtcggccgaagtgaaaacattgtcataaaccccgtagccgtattcctccttgagccgggcatcgaaaagcgtgaagccggagcaaacgaccaccgagccgcactccagggtgcggccgtcggccaacgtcacgctgccgggggtgatcgacaccgcttcggcggaagtcatcacttcgacatcgcgtgccgccagtcggcgacgcaactcggaaagcacctcggacgcaggcgtcagcgacgggaacagatgataccatccccggagcttgccgcccagatcgggctctttctcgacgatcgtcggacggatgccgcgatccgcaagccgcagtgcggtctgaataccggcgacaccgccgcctacgatgataacctctcttttcattgtgccttgatattatagatcatatcctgaacgccgcaattgacggccgaaggtgccggtttcccgatgaattttccgtggcgccccaggtatttggccgcaggatcgtagtcgatgcccattttttcgagcagcggctccacatccacctggtgcatctgcatacccagttcccagggatcgtaacccagcaccagaccggccatctcctcgtacgtcagtaccggaatacctcgtccgtcctgaccgtaggtgacgccctccatctcggcgatcgtatattgccatttgtcgaggaacatggcgcatcccggacagttggccacgatgaaatcgggcttgtagggagccatgctctcgagtttcttgtgcgaattggccaccgaatagccccggttggcctgcaccaggtagttgcggaatccgaaaccgcagcaatggcgccgctcgggataatcgacgcactggccgccccacgcatcgatcataccggcgagcacataaggaaattccgaaccgccgatacccgccttggggaaaatcttggcgtagtggcagccgatatgttcgaccacccgcagcggctctccggtggcagcattgaccagccggtatttcgccttgcgggcgatctcctcgcgcaagtggaaaacgatgtccgaagtgtgggccaggcttttcggcttgcggaactcgcggccggtagccttataaaggtattcgcgcgtctgttcctccttctcgggaaactcctcccaggtagccagtatctcggtatagatgccgaacgaagtgatgcacgaagagatgaaattctcataccccgcatcggtcatcagcgcgaactgccgggccacgaccgtcatgatcgtatccagcggcacgatgtccgaatggtagccgatgcccgtacacgaggtgtgcagcggatcgtcgaagacatcgcgtcccagatccttttgcaacatgttcaaaaacgccttctcgctgcccggaaaaaagttctgacggatgcagctgcgcacatagtaatatttatcgtcggcgatctccttctggtaatcgctccagctcgaccgtttcatacgctaataatgttcgttggaatttttggtgtaggtatccatcatgtactcgtcgtccgcaccgtcgtatcccatctcgcgggccttgcggtcggaatgcttttcgatcgtgtcgaaaaactccttgccgcccgtgacgtcgaatatccggtgaagttcctccatggaccggtcgtccagcttgcgcagcgccccggcaccgggacggttgtaagcggcagaaaactgtccgtaaatctcctcatcgttctcgtagatccactcccaaaccgtaccctgctcgggatgcagctcgggcttcaccagtttcggggtcacacagtaacccgtacggaggatattctccccgatcgtgcgcttgagggccagttgctgccgccccttctcgctctcgacgaagaaaccgagcttttgggaaagcgtccgcagcgcctggatgacataagcgggagtattgcctcggggacagcggggccggcacgacatacactcgccgcaataccagatcacatcgctgcgcatgagctcctcgatcgcatcgtcgtcctgcgtctgcacgatattgacgatctgacggggatcgtaattgtaaaactccgccgccgggcagacacccgtacacacgccgcaattcatgcacgaatgaaggccctccctcatccgcacatcttccatcagcatatcgaaatacttacccatacaaaaaagataacttcgcagcagcaaagttatccattccccaggtaccgtacagtagtagaaatacctattttcgccgtctgtaatgttcgaacgcaaaggggtaaggaaactccttccccgaagcaaacgactcgctgtcaataatttcccattcccgttcatcccacctcggaaaacaggtatcgccctggtaggcatggaacacccgcgtcaggtagaactcgtcgcacagaggcagcgcctgagcatagatctgcgcccccccgatgacgaagaccttctcttccgggcggaaaagcgccagcgcctcgtcgagcgaatgcaccacgtcgcacccttcgatcgaaatattctgccgcgtgacgaccacgttgcgccgacccggcagcggacgtcccaacgactcataggttttgcggcccatcaccaccggatgtcccgtagtgacggccttgaaatgcttcaaatcttcggaaatatgccacaaaaggcgattatcaccgccgatcactccgttttcggccactgcgacgataatggcaatcatgtctaatcaatcgttttttcttttaatatcagttcgaagccggatacggatggcaggatccgctgtttcgcatccagcaaggtcagcgtatcacccccttctttcaacaggttgatcgtttcgtccccctcttcggtcacgagctgccagacggtcgcatccgcattttcaggaatcccccgtaacgtatatctgcggcctcgcctcacggacacctctctccggcaggcatcgacttccgaataaaaccgctcgagtgtgaacgtaccgtcgccgctgtgttcccggctttcgatcgtaagcttaacacatgttattccgtcgccggaagccgccggaagagttccttcatataccagcacctgccggccgcccaatccctccgggtccatcgaagttcgaggaacttccgtttcgaccttaccgcctctgtccgcatgcgaacacgatgccgaaaaaaacagcgctgcgaccgacagcatatacagaattacccgcatagctaaaacgacatcggagccttgatcgccggccagggatcgtaattctccaacgtgaaatcctcgtaacggaaatcgaagaccgaccgcaccgccggattcagccgcagggtcggcaacggccggggcgtgcgggacagctgctcggcaacctgatcggcatggttcagataaaggtgcgcatcacccagcgtatggacgaaatcgcccggacgcaatccgcactcctgcgcgatcatcatcgtcagcagcgcgtacgaagcgatgttgaacggtacgcccagaaacgtatccgcgctccgctggtaaagctgacacgaaaggcgccctccggccacgtaaaactgaaacagcacatggcagggcggcagcgccatatcgtccacctcggccacgttccacgccgacaccagcatccgccgcgaatcggggctgtgtttgatctggtcgatcacctgccggatctggtcgatgcaccctccgtcgggacggggccaactgcgccattgatacccgtacacatggttcaaatcgcccggacggtaaccgtcgatcgacgaaggctcttcccgccgcacggcatcgagaaaggcctcccgctccagcggcaaaaccccgtgacggacacaaagttcgttgtaatagcggtaagcgtcgttgtcccagatatggaccccgtgatccaacaggtattttatattggtatcgccctgcaaaaaccagagcagttcgtaaatcacccctttcaggaaaactttcttggtggtaagcagcggaaacccagcctccaggtcgaaacgcatctggtagccgaagatgctgcgcgtaccggttccggtacggtcgctcttcacaatgccgtcctttcggatcttacggagcaaatcgagatactgttgcatggtcgaatcaatattttttcaacgaggcgttgccctcggagtcgatgaccgcatagaccggatcggagtgccactccccaaggcacagcacccgcaaatttccttcggaatagtcgcgcggctggtgcatatggccgaagatgaaataatcggggcgttcggcaccggcatattcgcgggcatattcgatgagcgggtcggtaatatggtcgcccatctcgcttaccagatggcttttgcgggacttgccgctccaccactgcccgaaacgcatcgcccagtcgggatgcacgagccatgaaaaaaggaaacggatcgttttggaacggaacacggcattcataaagcgcagcacaggaagatgatcgatcttcatattgtcgccgtgcgccaggaaaacccgtttgccggcaagctccatgatcctgggcgaagtatagacctccactccgcactccgcttcgaaatagtcacgaacccacatgtcgtgattacccgtcatgaaaaccacccgaatcccccggtcggtcaattcgcacaactttcccaatacgcgcacaaaccctttgggaacgacccgtttgtattcgaaccagaaatcgaaaaggtcgcccagaataaagaccgcatcggcatcgcgggaaacttcgtcgagccacgccacgaaacgtttctcgaccgcacgggccgcagccggccctcccgcgcccaaatgaatgtccgatgcgaagtaatacatagcctattcgaattgcgcttcgagcgcccgttgcaaccccgtaccgtaaagatcgcgggccactacgataccctcacgatcgatcaaaaagttagcaggcagtttctgcacgttgtaaagccccagtgcgggagaatttcgtccccggaaatcgcaaaccgaaatccagggaagctgctgctcctgcacggcgttgatccagatatctttcgaaacatccacaccgatctggtaaatttcgaatccccggtcggcatattcggcataaacctccttcaattcggcgttgatggcgttgctgtttcccaattcggccgaccagaaatccaccagcacgacctttccctgcaacgaactcaaacgcactttacggccgaacatatcgggcaactcgacatcgggaaaattcgtttcggcgatattcgacatcagattttgccgcgcatccatgcgggcgatctcactggccagcaacggcaggtaggaagactccggataacgctcctcgatggcttccgccaccatgcggtagtaaatcacatctccgtcgaggttgaaaaggtaagtttcgcccggaagccgctggtacaaggcatataccccggccagggaagacttatgctcgacgatgaacttgatctgttcgtgtttgatccggcggtattcggcccaatattcagactcgatccgtcgaatctcctcgtcggtcatcctgtaagtttccggcgaagaactcaacgcatcgagccgctgcatcccggccacaaacggctgataaaatcggcgcagcaactccgactcctcagacccttcgaccgtatagttgtgcaccacacgtccgaccgagctgaccgtcaagcgatctccgccctgcaggaacaggggaatcttatcgccgttgcagaccaggttgtaaagcgccggagtacggtccacatcgcacaattccaatttgtaattcccggtttcatccagttgcgccgaatcgatgagcgtctgcgccaacggagtaacctgctcgagatagatcatccggcaatccgaaccgactatacgacccgaaatcttaaccgtagaagagtgacaggaaaccgccaggagcgcccctgccagaaaaacgatcgaaataaaaaatctgctgcgcatgttgcgagaaaatggtttatcaaaaaacggaaccctatttcgaggtattgtgccgtgcgcccccgttcttgccgttgaaattgcgcgactgatgctgattccgattcttctgttgccgttgctgcgctcccttctgacctttctgacctttttgcggatgcgccataaagggctgtttataatcgcttcggatattattgagagccacttcgtcgatttggatcgcatttccggacattttttttatgtcttttatgataacctcgttattcggatgttcctgattgtactcgtagctcttggtgcgcatgtaacgcgccaggttatcgacggtccgcgagactacctggggattcttctcatcggccagacgccggatcatccgttcgacatatttgccgtaatgcttgtactcgatatgtcccgacgaatagggcatacgccggggcaccgtggtaagttcctggcgcgaaggctgcggatagggggagtccacatccagttgaaagtcggacatgatgaacaggtgatcccacagcttgtgagtgaagtcggccgtatcccgcaacaggggattcaggtttcccataacggcgatgaccgcacgggcctgccggttgcgctcgcggcggtcttcgatctgcatcagcgaatcgaccatttcgtgaatatggcggccatattcgggcaaaaaaagcttccgtcttttataattataatttttttgcataatttttgcgggagttcggtggcattgttattgcgaaccgttccaataacattctgaaaagatttcgcggatataaatttcaaagcgatcgtaaattcacctttgaaatcaactttatctacaaagttggattcctgcgaataatatattaacttcgtcacaaaagtacgtaaaaaaatcacaaaagcaaggtatggcaaaagttttaatcctggatcaatcgaaaagcatacgcaacacgctgcgagaacggctggagtttgaaggaatagcggcggaaagcgctgaaaatgaagcggcggcatccgtattatgcgaacgtatccctttcgatctgatcatttcggatcatgaaacgaggcttcccgagagcgacgtacctttcatcgtactttcctctgaagcgacggtcgattcggctatcaaggcactccggaacggagcgcaggactacctcaccaaaccgatcgacatgaaccgcctgatgcagtcgatccggcaaacactcgaacaggcagccgaagcgccgcgcacggcggcaaaagccaaagcgaaacgcagctcggcaggtcacacggaagagatcataggcacttccgagcaaatgcaacacgtccggcgtctgatcgacaaggtcgcaccgtgcgacgcccgcgttctgatcacgggcgagaacggcacgggcaaggaactcgtcgcccgctggctccacgccaaaagcaaccgggccggagcgccgttcgttgaggtcaactgcgcggccattccctccgaactgatcgaaagcgaactgttcggccacgagcggggagccttcacctcggccatcaaacagcgcaagggcaaattcgaacaggcgagcggcggaacgctcttcatggacgagatcggcgacatgtcgctggcggcgcaggcaaaggtgctgcgggccctgcaagagcgcaagatcagccgcgtaggcagcgacaaagacgtcgatgtcgatgtgcggatcatcgcggcgacgaacaagaacctgcgagaagagattaaaaaaggaaatttccgcgaagaccttttccatcgtatcggcgttatcctgatcaaagtaccgcccctgcgcgaacactcggaggatattcccctgctggtcgatcacttcatcgatatgatctgcgaagaatacgacatgccgcgaaaaccgatggataaaaaagcggtcgaaatgctccggcaaatgccgtggacgggcaacatccgcgaactgcgcaacgtcatcgagcggctcgtggtcctgagcggcaccaaaatcacaccgaacgacgtagaactctactgttaaacatttcagagcaactcgagaatctcaccggggcggtccactacgtggtctgccccgtgttcatacaactccgcccggtcgcggaagccccaagtcacaccgaccgaccggacaccggctgcccgggccgtatccatatcgacgcccgaatccccggcgtacagcaccgctccggattccgcatccgtatcggcgagaatctcccgcaccacctgcggatcgggtttgagcgggactccggggcgctgaccgaaaaccgcatcgaaacggatcgacgggaaatagatccgcaccaacttctcggtaccgatttgaaatttgttggaagcgacagccagccggactccacgctgcaccaactcccggagcaattccggaataccctcgtagggacgtgtaaaacggtcgatatgttcggtatagtaagccacgaaatccgcacgcaccgccgccaccgtttccggcgtgcgcagctcctcgggcagcgcccgttcgaccagccgcataacgccgttgccgacaaaaccgcaatactcctcataggtatgcaggggcaatccccgcgcagccagcacatgatcgcagcaagccgccagatcgccgatcgtatcgagcaacgtcccgtccaggtcgaaaatcatcaatttcgtatccatatcaagtccttgaattacaaataaatagtccgaaaacgggcaggagccgtgttcctgccccgtaaaaacggcccctatcggccgaaacgcccaaagccgagccaaagatacgaataagccgagcgcaaaagcaaatttatttgcgttttgccgaggcgaaatatctaaaattacaaaggagccgagcacaaaggcgaattcattcgcttttaccggtccaagcgcttgaaacggccccgaaaaagggacaaaaagctgtccgaaggcaacgatgcacgcgaaacattttgttatttcgggattttgagtttactttgtcatcatcgtataaatcggacaaaacctatgaaaacagacatcgaaattgcacgcgaaacgaaattaaataagatagaagacgtagccgaaaaactgggggttccccgcgacgaagtccagaattacggccgttacatcgccaaggtacccatccacctgatcgacaagaaagagatggagaagcacaacctgatcctggtttcggccatcaccccgaataaggcgggcgtcggcaagactacggtatcgatcggcctgtcgctcggcctgaacaaaatcggaaagaaagcggtggtcgccctgcgcgaaccctccctgggtccctgcttcggcatgaagggcggcgcagccggcggcggctattcgcaggtgctgccgatggagaacatcaacctccatttcacgggcgacttccacgccgtgacatcggcccacaacatgattaccgccctgctcgacaactacatctaccagaaccggaacagttgcgaggggctgaaagagatcaagtggaagcgggtgctcgacgtgaacgaccgcagcctgcgcaacatcgtatcggggctgggaggttcggccaacggcatcccgacagaaacgggattcgacatcacggccgcctcggaaatcatggcgatcctctgcctggccaccgacatcgacgatctgaagcgccgcgtcggcaatatcctgctgggctacacttatgacggcaagccgttcacggtgaacgacatgggcatcgcaggcgccatcaccgtcctgctgaaggacgccctgcttcccaacctggtgcagaccaccgaaaatactccggccttcatccacggcggcccgttcgccaacatcgctcacggctgcaactccgtgctggcgacccagatggccctgacctacggcgattacgtcatcaccgaagccggcttcggcgcggatctcggtgcggaaaagttcttcaacatcaaatgccgcaaagcgggcttgtctccgaaactgaccgttatcgtagcgacagcgcaaagcctgaagctgcacggcggagttcccgaagcacagatcaaagagcccaacaaggaggggctgatccggggattcgctaacctggacaagcatatcgaaaacatgaaaaacttcggccagcaggtgatcgtcaccttcaaccgcttcgccagcgatacggacgaagagatcgccctggtcgccgaacactgcaaggaaaagggggtcggctttgcggtgaacacggtcttcgccgacggcggggaaggcgcagtggaactggcccggctggttgccgaaaccatcgagaaaaacccgtcgaaacccctgaaattcacttacgaagagagcgattcggtacgggaaaaggtgcgaaaaatcgccgaaggaatctacggagcctcctcgatcgtctatacgacgctggcggaaaagaaactcaaggagatcgaaaagctgggcatcgcccacttccccgtctgcatcgccaaaacccagtactccttctcgtccgacccgaaagcgtacggcgtagcgaaagatttcgaactgaaagtccgcgacatcatcatcaacaacggcgcggagatgatcgtagtggtcatgggcgaaatcatgcggatgccgggtcttccgaaagagccgcaggcccgccacatcgacatcgtaaacggactgatcgaaggattgagctgattctgcggggtgcgataaaagatcgaattttatcgcaccccgatttttcacggcacaagttccgcaacagtccgtcccgatttggcggattcaactattatttctatttttgagtgttttaaaatcgttgaatttctcgactattttgtgcccggcataacgaatcgactcgctctgccctgactgatcgaaaacacttcaaataatggcaaaacgcatcccgaccccggccgacatcttccgattctacgtggacggattccgctcgatgaccctcggacggacgctttgggccattatcctactgaaactcttcatcatgttcgccattctgcgacttttcttctttcccgaccaactggccggcatgagccaggaacagcgcagcgaacacgtactcgaacaattaaccattcccgacgtttccggcaagtgaggccaccgcaagcccctcccggacagcggaaacgaagactaaaactcaactaattatctcaaaagtatgttgtcggactatctacaaaccgtcgattggtcgcgggcccaattcgccatgacggcgatctaccactggctgttcgtccccctcacgctgggattgagcatcatctgcgcgatcatggaaaccatctactaccgcacgggcgatcccttctggaaacgcacggcgaaattctggatgcgcctgttcggtatcaatttcgccatcggcgtagccacgggcctcatcctcgaattcgaattcggcaccaactggtcgaactactcccacttcgtcggcgacattttcggcgcgccgctggccatcgaaggcatcctggccttcttcctcgaaagcacgttcgtagccgtcatgttcttcggctggaaccgcgtcagccgaggcttccatctctccgccacctggctcacggccgtcggcgccaatctgtcggccctctggatcctggtagcgaactcctggatgcaatatccggtaggctgcaccttcaacatcgacaccgtccgcaacgagatgacctccttctgggacgtactcctctcgcccgtagcggtcaataagttcacccatacggtcacctcgtcgttcgtgctggccgcgctgttcgtctgcgccgtctgcgcctggtacctgctccgcggccgcgaacagaagatggctcgcaagagcatcgccgtcgcttcggttttcggtctggtattcgctctgattaccgcattcacgggcgaccgctcgggagcgatcgtggcccgggtgcaaccgatgaaactcgcggctctcgaagccctttacgacggagaggagggggcagccctgaccgcagtcggcatcttgaggcccgaagccgaacgctcgaacaacgaggatgccttctatttcaagatcgctattcccaaaatgctgtcgctgatgagtttccgcgacgccgacgccttcgtaccgggcatcaacgacctggtgaacggcaaccctcaatacggcatcatgccgacgatcgaaaagatcgaacggggccgcgtagccatcgcggaactggagcgtttcaaacaggcccgcgaaacaggcgacgaagcgaccctcgacgagatacgggccaaattcgatccagacacccccgaaggagccgtcttcctgaaagagtatttcgcctatttcggctacggttacctcgactcgcccgcgcaaaccgtacccaacgtaccgctgcttttctactcgttccgcctgatggtcggcgcagggtgtcttttcatcctggtgctggctgccgcctggtggttcaaccgcagggacacgctcgaacgcaagcgctggatgctgtgggtgctgctcctctgcatgccgctcgcctacctggcctcccaggcaggctggatcgtcgccgaagtgggccgccagccctgggcgatacaggatctgatgccggtcggtgtcgccgcttcgcgcatcgccagcggctcggtcgccacgaccttcttcatcttcctggtgctcttcaccgcactgctcgtggccgaaatcagcattctctgcaaacaaatcaagatcggacctgaaaaagagtaaaaattatggatactttggcattgctgcaacactactggtggttcctgatctccctgctgggagctttgctggtcttcctgctcttcgtgcagggcggccaaagcctgctctacaccatcggacgtacggaacacgaacgcaacctgatcgtcaattcgctgggccgcaaatgggaactcacgttcactacgctggtaactttcggcggcgcgtttttcgcctcgttcccgcttttctactcgaccagtttcggcggagcgttttacgtctggatgctgattctgctggtcttcgtcctgcaagccgtttcgtacgaataccggcgcaaacccaataacgtattcggagaaaagactttcgactggttcctgaagatcaacggatttctcggaacgatcctcttgggcgccgctgtcggcacattcttcacgggtgcgaatttcaccgtcgatcggttcaacatggccaacctgggcggcgacaccacgatctcgcagtggacgactccctggcacggactcgaagcggtgctcgactaccgcaatgtggcgctgggactggccgtgctgttcctctcgcggatgctggcgctccactacttcatgaacgacatcgacgacacacagatccgcgaacgctcgcgccgccgctcgctctgcgccgcaggaacattcctcgtgtttttcctcgtattcctcgtaagcctgctcttcgcccagggttggagtgtcgatccggcgacgggaatcatcgctccggaaccgtataaatacctgcacaatttgctggccatgccctacgtcggcatagggcttctggcgggtgtggcgctggttctctggagtatctggctgggctggcgcggtagccgcaaggcgatctggctgagcggatcgggaacggtcctcacggtgctcgccctgctgcttacggccggatggaacgatacctcctactatccttcgctggccgatatgcagtcgtcgctgacgatctacaactcgtcgtcgagcgaattcaccctcaaggccatgagtatcgtatcgctctgcattccattcgtcgtcgcctacatcggctacgcttggtgggccttgagccgcaaaccccaagacggctccaaagaagaactcaaatactaaagacacttcgacgatccctcgatcagcgggcccggaagagtgatcttccgggcccgctgcaaaatggcaaaaccgtcaattcaggtttttctcgataaactccttcaaaatcaccgcatggttctcaaccctgttcttcgaggcatagagcaacgtcacatccggataggtccgaatgcggtcgagaaaatcctgcatggcagccgaactccccagctcatcgaggtacttgcgccgaaactccgcccaacggcctgccggatccccgtgataccacacccgcagcgacgtcgaaggagcgatccgcttcgcccacaaatcgtaatgaaacgcctctttgcgaatgccccgaggccaaagtttatccaccagcacccgaaatccgtctccgggactttcagggtcgtaaacccgtttcagccgtacttccatattcttatggtttttgcaagttttttaagagtaaataggagtataaaattcatttcttttgatgacggcgaacatgcgggccacgattttagcacgtaacgcattgattaccgacattttgttctttccttcttctactttccgcatatagtaggcctttagttcaccctcttt

SEQ ID NO: 10429 - DNA, 368 bp, Unknown
  gut microbiota DNA sequence
gcctcgccgatgcgctttttcagctcgtccgccgttatgaattcttccgcgttgtaagcctgcatcttgatgtggcccgatttacggagaaataccatgattttcgtattgaagtcatggactccgactgcggcaaaggctgacgggcccaacttcgtctgaccgacaaatgagaatctgccgtttataccggctatccgtgtcttctcccagaacccgctctgcatgaaggaacagggcacgatgaccatcaggattcctgccggattgagcacatcgtaagccttgtccatatagtattcctgcgacagtttgtagtcgaacttcaagttaaaaggaggattgccgatgataacatcgaaacgttg

SEQ ID NO: 10430 - DNA, 23291 bp, Unknown
  gut microbiota DNA sequence
agactgcaaggccgaagcagggtcttttgcatttaaaaggcttaatccagtatatatatctgataatcagaatttaacaatatcaatggtaatgatttagagacagaaccttctctgtgcttacatcgatattctcttatcaaacaactcttgttacaaagataataataatctatgattaagacaaatatactttcatccgatatttttcctgtttctgcatctttcatcggcctgtaaatgcctccttatgccattcaagggaaagtcgcttccattgtttttctttgcagattgccggaatattccggcgcaatctacaataaaacattgtatgactatggagtttcaaatgatcgaacagagcgctttcgacgaaatgaaaacgctcgtaacatccttacgggagcgtgccgagcgattccgagaattgttctcaccgccgcaaccgcgacgctggctgacagccgaagaggtctgtaaagcgctgcgcatcaccaaacgtgccttgcagtactatcgttcggaagggatcatacccagcacgtcgttgggcaacaagattctgtacaaagaatcagacatcgcgcgtattctgcaaaacaacctcatcgctcctttcaaataatggacgacgtactcctgagaacctcgccggaatacaaggagttccggcaggaaatacttcgagcgattcatttgctggaaacatcgatcgcggcccatcgtccgacgatcgtcacggaaagctatcttacgggcgaagaggtgatggagctgttttcgttatgtccccgcaccctgcaaaactaccgtgaccgtcgggtacttccctacacgacgatcggcagcaaaatcctctacccgcgttctgagatcgaaaagattctggaccgaaactatcgtaaatcattgcgataacgtattgtcaaatagtacgggcgacacacaatgccgtccgtactgtttttatttcatcgttgcatccattgtctcggagagtttctcgtacagggtttcgaccatagcgaagcatccgtcgcgtttcggattggctccgcttttcgtgcgactgtgacggatactgtttcgggagagttcggttacgcttcggtgcagggtcccgtgcgtgcgaagcggtatggaaatcaacttgagtttgcacagtccgataaaatcctcgctggagatgtattccccagcgaggaatctgttccctaccaaccgtaactgttcgcgctgctgctcttctttccggcgttccagcccgttgtcatattccagccgtgcataaagcgtttcgttatctacaagaaatccgtacacgccgcaagcgtcgtggtcttcgtcgctgatgcggacggaatatccttaggtttcgaaattttggtcttcgaactgaacgacgaggctctgcgtatttcagagattatccaactgaacactgaatccttattccataaagtcttcgacgattcgtccctgcgtatataaatcgcgctctattccgaggccgcccggcagcacgatacgttgcaggtcggagagcatcaggtaaccccattcccactcgcaaatgtggcagaacccgaagagtttccaatctccgtcctcctgtttctccgcctccgtaatgagccacgttccggctcccatggggttgaaatactttacaagcacctcggccttcagacctttgccgtcctgcgaatagatcggatgttcctcgaatttccgaataatctgtttcgtaagcaattccatgactgttttatgcagtgtttatcctcctgcgccggagttttacagaacggccgttccttcggcaggagcggccgtcaagggttcgtatcgtctgcgacttagcaggttgtttcgggttgtgcgatccattcatcgtaggtcatcgcatcgatgagtccgtcgtcaccgtccatatcgatttcgatataaccttcagggcccatttcgatgggttgtcgggtcaggatcgttcccgtatggttgaccgtaacacaaggttcgatcgttccgaaatcgttaccctctccgctccgtatgtcataggcataaataccttcgggaagcgaagctctgtcgatacgctcttcggtaaagagcgcggagtatccgccgaacgacgcctcacagaagtcgtcgatttcggtaataggtaaaggcatcatttctgtaattgttttttgtcggacgagtcgaagtttttttgtcgatgttgcagaacagcccagcgtaatcgcagcaaggcattcagataacgatgcagtttttcttgtagcttctgcctgaaacggagcaattcgggatctgcctgctcgtcgtaaaacagcggatagcgcaatcgctgctgctcgatatgctcccgctcccgacgtttggcaagcgtaatctgtgcttttgccgcccgcagcttcgacaggcaggaatcgacgccgaacttcaatcccgtgcgtttgtcgtagtaacagtatgtcgctgtgatcgtatcacgcgggaaacggcattgaaaacgagccgtgcgccagcgtaccacccatcggtaacgtttgagcatcgtacgcggcagatcgtagcggtagagaatttcgatcggtccgtccgtctttcgaagctcgaaggtgacgattacccatcgttcgattcgtaatgcacgttcagcttgagcataggctttggccaacgccataaaatcttctgtctcgttcttcataatttgcagcatctcgacgttctacataaccttgcaagcgaatcgcaaacctgcaatttcagacgatgcagcggccgtctttcccgacaggttatgcagcaggcgccatcgagcgtattgtaatatccgtgttcgggtacgatcctgcacccgcaggcacgacaagtcaattcattcatcggaaacaagttcgtttttatctgcatggcaaatggtggtctttaagctgttcggcaatctcgcggcacatccgataggaggcgcggttacggtcgtcgatgtgcacgttgccctcttctgccatgaagaggacgcacgtgcgcagcagagcgaagaatcgctgctgcacggtcggatgttcgtattgcagtcctgcggcgaaggctttgcagtcgaatccgaagtcgttcagctcgctcatcaatgcgcggaaaagtttatgctccggcatctgttccagcgttgtgctggtatatttatcctttacctgtttcatagcggtcgtcagttgttcacgcggttaagcagttctcccgacagctcgtgcagttcgcgttgtcgtgccggctgcgtctcgcgggcataggccgttatcgcctgcgtcagtttccagagcgtcggccctccggcgaatccgtcgtcgggattgttgttcatcagcagtttccgcacgccttcgttctcggttttcagcaggcggcctttctgcatgagccgttccagttcttgtgtgaagttgacctccttggctgccgcagcctttatttcgagcgctttgcgacggatgttgtcgcggccgaagagctgggacgtaaggtcgttcaccgcagacacggtggtctgcgtgtcgagttcgtacgtccgctgcgagagctggatattatcgggcagcttaccgcccagatggatctgtttcattacgttctcgcgtaccatgccgttcaagcagacgccgttgagcaggaagacgcggatgtccaccgccccgtcgccgaaatccgaagtggaaaaacgtgctcccatatagatttgtacctcaccgttgaactcggtggggatgcagatcggctgaggaaggatcgtctcgacataaatcttcgtatcggtccacagcgcatcgtatgccacggctccctgttcgagagccttgcccagaaatgccgagaggatgcgctggctgtcgaggcggcggtagctgtccgagaggatgccgcgcacttcgtcgcctacggcgcggacgagaacacggctgcggtcgctccacgaggagtgttcgttgagaatgcgtgcggccagtgcgcgtttccacgatgttccgcctgccaactcgcgcaggtaacgcgacggaacgttcatcttctcggccgcctgtcccacggcgttgtcgtgaaggcggaagcgtccttcgggcatctgcatcgtcagacggttgccgtcgtcgagaaagagtaccttgcgtgtactgcccgtttcccggtattgggcgccgatcggaaggatgtagtcttgcagctgcgcggattcgacgatcatgcgctggagggtttgctgcaccgtgggtgcacggtgttctaccaagtgccgtactctgtcggctacgacccggttcagaccttgttggtgtgctacacgtgctaaggacgcactcgttacggaagtattcataaatttgaattttaagtttcgccgctcgaaccattcgggcggcacgcagaaggtcatagtcggggacggggctgcccgcaaggtttttccgcaaggaaaaccggcaggacttgcgggcagacacggacacgactacttttgccgggccgaccgaggggcgaatacttttctgaataaaacaagaaaaccgaagacgctttgcatcttcggtggaaataggaatgaaccacagtaattacataaaataaaattttatgtaattacttcttgttcgaatcgagataaaatttaattatttcggtcttgaagatatattcgtatttggcttgcagaagctgaacctgagcctcgaccagcgcatcgagcgccgtgttgtaatcgacaacggtagccgctccgagattgtacctttgttccatttgccgggcggcttcctcggccgaggcgacgtatttctgcgaagagagatacttgtcccacgccgtccgggaatcgatcagtgcttgcgtagcctccttgttcacctgcttctccgtggtgcgtaacgcatactccgcctggcgaacggcgatcttctgccgctggacgttgtgccgcgtcgtcaggcgaccgaaaatcggaacgttcagcgatacggaaatatagctgctcgcattgtccttatactgttcggcgaacggataggcttcgtaacggtacgtgccgtcgggattcataaacattttctgccgggcatcggaatagctcgacccgtagccggccgaaagcgaaagcgtcggatagtaggacgaacgggcgattcgcagatcgcggcgggcaatgtcgatacccagccttgcggactccacctccgggagttgctgcgccgaggccagaagcgcatcggtactgaccggcatcggcgtatttcccaaaatattatccgaaggagcgacggtatggaatgtcgtgtaatcttctatttccaggagctgacaaatattcaggcgggcgatgtcgtaggaatttcgagccgacaaaagagtgttttccgcattggccagttgcgaacgtatctgcaagaggtcggcagaggtgactttccccatctcgaccgatttacgggtcttttcctcctgtattttcagggtttcgaccgtctgttcggcattgcggatgttctcttcggcgcaaagaatttccagataataggccgtgatattgagccggatgtcgttgcgggctttctccacgcccaacagcgccgcacgcagatcgaggcgggagcgttccagattatgaagattccgcataccgttgaataaagtgaccgaggcgccgacagaggtcgaagtaccgttcacgctctgatgctccacgaactcatacgtggtgggatccagtacgcggccgctggagaagctgtaactgctcgatgcggagatgtcgggagcataggcccaacccgcatccgagcgggtgagccgtttggtttgaacgtcgagttcggcctgcttgacttcaatattatgttcgaaagcataggcgatacactcttccagcgtccagcgttgcgcttcctgtgcgttgagcggtgttgcaccgaacaacatcggcaccgaagcgacggcggcgaacaacggtattatgcggcatttcatggtcagcggtttttgaacagcgatacgacaggttgtatgaattgctcgataaggcgcatatcctccgtgatgatctcgcccgtaccgtccatctgctgaatcatcggcagctccttctcataggtcgtcctcattccttcgggaaatacgacttcgaccgtataggcgatcgtcgtaccggtcgcggtttgcaccgaagccggaaccgaggaaatggagcgtatcgtacctttcaggacgccgtactccatatagggaaagccgttcagcttgacgttgaccgtctgtcctgtttccaccttgccgaatccggccgaaggaacctccatacggccgatcacttcagtctccttttccgggacgatgctggcaagagcggagccgacggtcacatgctgccccttgctccaatatccctgtaacgacacgataccgtccatcggagcgatgaccgcatactgttctttccactgggctatggcggcgagcagttgttggcgtaactgaccgatggtacgttcgtattcggccacctcgttctcacgctgcacggcgagttccactaactgttgttcggtttgcaggatggagagttccgtggaggtcagtgttgcatcgaagccggccttgctgttctgtttggcgagatagttctgtacggaagtttcgtagtcggccgcagaaataaccgattgagagaacaacagcgagtcccgctccaatgtccgctgccccatagcaaggtccttgtcgagcagtttgccctgtgcctccaattgggcataatagcgcttgtttttcgcaatttgggctgcgagcaggcgcttcttcgttccgatgagatcggtggccagataatgcctaaaatcgaggcagcgggcggcgaactccgcccacgtggcttgcaggtcgcccagaacatatcggtcggacacccagtcggcctcggcgagtgcttgcggcgaatcggtggcggagagattttcttccaacgaccggatgtcgtcgtagtcggccggtgtcgcgagcaaagcgataagctgaccggtacggacgttctccccgttgccgacacatacgctgtcgagcagtccgtcgtaacgggccgtgaggtcggagggggcattgactgtcgtaatggatatgggagccgtaacggtctgtggatacttgatgatgtagcagcccaaaacgattagggcaagtatgacgaaaatgaccgtaattccccaccgcacgacccacgaaggcgcacgccccatgatctcctgcgcctcctcgctgtgaaagttatctctgaactgcggcataacctgtccttttattgttatttctcagtagcggcttcctgagctttttttctggcgatatgtattttcaagaaatcggaagtaaagcctttatagtaagtacaacaatcattatggccgccttcgaatttattttcaatgcgttgaatcgggcatcctccattgcatatgggcaaatatttgcatttcgaacacgccggatcatcaaaagtatctgcaccgtataattgacgattaaggaccgtttgattgatgtcggtcaaaataccgtcatcgttcaatttgccgattgcatattctttgtttcctattacctcccaacatttataggcatatccttccggatcgaatgcgatcgccatatcgttgcgaattgcacattcgttgaaaaaaggttccggataacggataaaaggggaattaaatcctctatatgccaagtcgaggataaattcggaccgttctttgtgattaaataatgtacttttaatttcacatttatcacaattacttgctcctcgatccaatacgaatgccggagctattccaatattcttacggcctttgaaacgttcgacatacaacgaacaaagctgcggatattcatgtttgttttcgtgcgtgagattgactctgataacgatattgatttcaggcgcttgatcgtttaataattcaatattggatatgactctttcgaatacatcctctccagacggcagatgctttactgtgttatgtgtttctttcatgccgtccaaagtaatctgtgcggaggttattcccacttttttcatgacacgaacagcctcttcgttgatatgatacccggttgtgatgatgtttgagttaattggtttttcccatacggcactgaacttatcataaaattcttcaatctgaggcacagccataagaggttcgcctccaaaccaagtaattttgatatttttcagatcaggacatgacataacgtatttggtaattcgatccattacttccggtgtcatgtactttttctccttgtatttctcgaaacagtaatggcaacggaaacaacaatccatagtcggggcaagtgttaaatgcatgctcgcccgttgactcctttgtcgcattatgatagccttgtatttcagatagtcatcttcatcgctgtctgttagaatgttgttctcgcacaagacatcccataattctttgtcgaccttctcggacgataattcttggataccggttttgtgattttgaaatatactataagattcttcgtcgatttccagcagagaatttgatagtgtattataggtgtaatattccttcccatctatattgaaaaagaatgtgtatttcgagattttcattgctgtgttgtattatagattattgtataatcgttattcatataaacatagtcctttgtcgcatacccattgcctctcaatactaatccatattttttatttttttctatttgagagcaatcgagcgggatagaaagcgtataatcgtcgatccaataggcttgtcttatttgcgcacgtggcaggtctgtgattgtcggatcatccttaacagtatctatgcaataactgcccaacattggctgtgaaaatgagatttgaatatccctgaaattgccattataaatattgctaccattagcaggaaaaatattcctgacatagggatggttattttgggtttcgaattttattcgatcgaaatcactggatgtataattgaaaaaatcaaccacttgcggcataaaagaatcgatatgcggatattgtcctctgttttgataaaagtattccataaactggacggatctgggcatccaaatgaatcctctgtctctgagaattccaacgatataatctacaagtccaggttcgttatctcttaagtacatgatcgaaaataaattattcaaccattccaaaagactttcctgtacattgccataggcattttcccgcatgtcatccgcaatttcatcatagatggcatttgctgagaactccattttagaccaatatttataaaagagaggattagtataattatgacaaatttcatgaattaccatcggaagagtagtctcataggtataatttaatttaccaccgatgatgattgaataaccggccttggattcgtaatccattatgtaataattgctcggaccattacccaaagcaacatacatgactgggcttataaaatcaccaccaaaaaaattggaaaaccatgagaaattaaaatcagcaaggagttgatttatacaagtttctgctttttcatacaaaggtttgtgatcgttataaaatttctgaaagtttgtcttcacatagaaatcattcaatagttcgacatatttgcgaaataccttttccgacctccactgctctccgagaccgggtaattttgagacaggtatatgctgatttaatgaaactttaccattacctatgcaaataaaacctatactcgccgcaacagctgcatatcccagacgatcctcatttctgagcttgataatataatctatcagatcatggtgagagtagctctgaaaatactcatctatatctttattgtattcctcaatgactccatatgtgtattcaggaactcctgcaatacgaaatacaacgcctgtcaattcaatgcgttcatcgactttcggttgtaattgtccgaaacatttccctgttacacagactaataggaatactaaacatataatattgcgcatacttttatctttaattttgacgaagaaatggagtgagatataaatctcactccaaattatatatcaaaaatgatatacttgtccttgatgacaggtaaagtaagttgaagaaccattacaattcacatcatatgcggcccacataccacatgtatggtaagtgccacctccataacagggttctgacgaataattggtctgtccctgattagtatattggcaaagaacagcatgatttcctgtaggacacagtgttccaatatttccaataccacctccagccagaatccgttctggattcaataatcgatttccttcgataactttaaactttttcatagctttcattttttgaaagaatacattcagttcgttcaatcggttttgcgtgcgacagcaccggaataaactgccgtttcgtcacaataatgcaaattggtcggaaaattgtatttttgcaactgcctttcttgcgtttaagttaaacttatgagccgtcacattcagttttgctttctcgtaaaaatggcttcggcaaggtgagggcagtgattttcactgcctttgccgaaccggaaaaacgaaagtctaaattttccattttattgaagaaggcaagtctccaatagtttattaaagttagtgatttttctttaacttcccaattccaactgatttttcaccagttcgtagtagtaaccccgtttggccgtcagttcgtcgtgcgtgccctgctcgacgatgcgtccgtgcgccaaaacgatgatgttatcggcattgcggactgtcgaaagacggtgtgccacgatgacgacggttttgcctttgaataatttctccagacgctccataatcgtgcgctcgttgttggcgtcgagcgaattggtcgcttcgtcgaagaagaggtatttggaatccttgtaagcggcacgggcaatcaacaagcgttgtttctgccccgtactcaacccgtgtccgtcggctccgatacgggtgttataccccaatggcagcgattcgatgaactctccgatattggcgatttccaccgcccggcggatccgtttcatatcgggtatttcatccgatacggcgatattattggcgatcgtatcggaaaatacgaaactctcctgcatgaccgttccgcactcctgacgccagcaattcgggctgaaagcggagagcctgcgaccgcccagcaacacgtccccctcgaccggagcgtaaaagccgagcatcattttaagcagtgtcgtcttgccgctgccgctttcgcctacgatggccgtaaccttgtcatgcggaatcgtcaggtcgattccgtccagcactttgtccgagtgcggcccttcgtattgaaaaactacgttccggaactcgatggccgcgttttcggggatgtcgcggatcagacccgcgtcttcgggttcctcatccggtttttcctgaatttcgttcaggcgttcgagcgaaattttcgcatcctgcgtggcctgcacgaaaccgatgaactgcgatatgggggcgttgagctggccgatgatgtactgcatggccatcatcataccaagtgtcatttccccgtcgatgacggcgctggcggcaaggaacgagatgataacattcttggtctggtcgatgaacgtaccgcctacttcctgtgtttgtccgagcgtcaggctcttgatcgaaactttgaacagcttggcctggatacgttcccattcccagcgtttctgcttctcgcagttattcagcttgatgtcctgcatgccgttgataagctggacgatattgctctggttgttggccgactcctgaaagcgcatgtagtccagtttgcggcggcgtttgaggaatatcaatatccagccgatatagaatgcactacccagcaggaatacgccgaggatgccgaggtcgtacccggccatcacgacgctgtatatgacgagcgacacggcagccatcacgatactcagcagcgagccggtcaggaatgtctggatccggttgtaatccccgatgcgctgcatgatgtcgccgaccatcttcgaatcgaaaaacgcgatgggcaggcgcatgagtttggccagaaagtccgaaatgagcgagatactgatgcgtgtggtcatgtggagcatcagccacgagcggatgaggttgttggccatctgtccgagcgtcagcaccacctgtgcgatgagaatcatgaccacgaacgaaaggttgctgttcccgatacccgtatcgacgaccgattgggtcaggaacggaagaatcaggccgagtacggcagcaatcagcatcgcaaggccgagttggaacaggtaggatttgtaaggccgcagatagcgcagcatcgaggcgaaattcagccgtttgtcctcatcacctttctcggcatagaactccggtttcggctccaacagtagggcaatgcctttggccgaggaatcgccggaaaggtcgccttgcaaaacagaatcttcggccccagtctgcaaccacgatttgagaaattgtcgttcgctatatttgagtaatcctacggccggatcggaaacatagacccaccactgcccgcgtttcttctcgattttatagaccaccacgaaatgccgctggttccaatgtacgatgcagggaaaattggcttcgtcgcgaagctgttgccatgtgagttttacaccgaccgacctcaaaccgatactttcagccgcatcgctgatacccaacagcgaaacgccctcccgcgtgatatggcagcgatcacgcagattttgcagtgagtagtgccgaccgtaaaatgcagcgatgattcgcaggcacgtcgggccgcagtccatcgaatcgagctgggtatagtggggaaaactcataatgtctcttttaagatttgatttatcttaggaacaatcttttatctgactattgaaatgtagtgacgtaaattaactactatgtgaacttattgatcggggtgttgcatttccataagcaactcatttatttacaaatatataattttttttcgaaagtacgagctgttggctgtagtccgtttgctaaaaaagaaaatcatttatctattctcggggttatgttgatagtaatactatatattgtttttgatgtttctgtctcccatcggagtatttcttctcgatagttactaatgaacgtgcgagtaacctcccattaaagataattgattagcccgttagccaacaaattccatcagcagcattgaaaaatttatcattctctatcgaaattgcgactatgtacatgcaaatatttgcatatcaaataattattgcaaataaaatgtctaataatctcgatatgactacgaaaattagaacagcgcaatagataaactatcacgctgcccataatgaatcatattttagattacttcgtaactattactatgtgttctcaagatttatagttacgacctgtattcagcaccgatcagatatatagcaaatattgttacattgagattttcccgaaatggaattttccgttatcggatcggtcaatgtatcacagttattacctgcacacgagtctttctgtgtaggacaaaggcggtctcgtgtaggacaaggatgtctacatgaaccacaattcgttccaccggaatctccagtaatagttcgggttgtagtgtcgtcaccgccacgaatcttcagcatatccaaatcctggacaatttcttttttcaactgcaactttttcataactcatgacttttttaattttccttactctgtttgcagattttcaggttcctctgtcttgttattcaattgcatacattcgatgtcgcggatataatatatcccgtcgaagatgttgagccaatggccgtttttacgtttacctacctcgggaaattcaaaaactgctgttctatatccgtcaagccacctcaatctttcacaatttatgaatgcataaggtgcatcccttgtaaaatgtgcaatttgtcgctctaactcgccgggttgctgtaaatcagaacgattcaatgaagttatagcaatagaatacacctcattacccagctcgtgataaagattttcggtcaatagattgtgatagtaatcatttaattcgcaatccattatttgagatgcatcttttacggcatgcagattcgcacaccagataatcaacttttcatcggggaagtgctttctgtaccataatacattttcagccatcgcgttgtctcgtatctgtactcgcatagaaccgagaagaccgccgaatactcgatatttaagccgagatgaaaaatcgaaaaaattacgatccatatttctcagccattgttttattgcactaaaatcggttgtcattccatattggtctatcaagcaatcgactcgatttctaatttggttcaatatggaaatatattcgaatagttctccggacgtaatcgattcagggtcgtgcgaatgactttgcaactgcgcccaaagtcgatgtagttgaaaccaggggattgttaaatcgtccgtttgaggatagccatctaaaattttctttgcaacgagaaagtccgaaaaaacaatatcgcaatccatgccgaaaaatttgaaatatccactatcgagcatttgcagaattggagcgatagattctcggtccataagccaaggactataatatagcaattcctctgtcgtgattcgaattccagacggcaaccggccgaaagcatagccggaaagcatcggcgccatctcaaatactaatgttgtaaaaccgcattcatgcaacttacgcagtagaccgattcgtgcggtggtagaggttatgtcgaaatgcatttgctcccccagaacaataatggacttttctttaacaatctcttcgataaaatcccattgttcgtcgtcttgcatagccacagcattccgagcgatatttgctgcagtcgaaagagtgtcggcccataaaatacccctatccccctgctgttgcccccatgttgtcgcacagagtaaactaaatagtaaactaataattcttattttcataattcaaggcctataacaaaaagaaattcatccatttggtattttgaggagcaggtatatataaagataataatagtaatccgattccggctattccttccaaaagatcgtattctttaacccatcccttttcatttcctccccatgcgctatatccagccaatccttcttttctactgcccatatttaacgtcacatcgaaccaataatcgcggacttcctcgaacagattttctccggtttgtcggtacgcataatggaacatcatacatacactggctgctccgtgacataaaccggcatcgataacaccggcactgcggatatccctacgcgaagtcgaaaaccgcagcacctccaacgctttttcctgccattcccggttatgcaacgcttttcccgcctgccacaatgatgtcgctacacccagatcgccatagcaccaagccaggcgactataataattatcgtcaccaggattattctccaaagattgattcggaaagaaagcgccatatttaacatgatctatctcctgggatagaatataattacaagtattcctgatgattcggtctcgtctttcccgatcgatcccttcgctttccaacaagctcaatacggatacgatactcgacatcccgtgtgacaggcagatattgtatccgacgcctctgtccagtcccagcgaagatttccatttgtagattctatctcctttttcagcggtttgctccaatgcctccaatgcccggtttacaaactctgcgtcgtcgcaataatatttgacgatgcccagtccgccatgcaggtagtcgtaattcccgtttagaatactgtttatcgcgaatgtttgcagcaattcccgatagtttttctccacatcggaatagtcgatctccaacaaccgctcgcggttcaggtatttcaaaccctccaaagcgccggtaagtccgccgcagtatgtaaataatcctatttcggaggttaatttgtcgaaatacgtttcgaggaagccttctaaaatttcctctttctccgaattgggaaacacttgcagatagtgtttgcagaagataataatgccggtctgtccggccagcaacccgacgccttcgttgtcgagcttaccgtctttcatatcccgaaacagcacatcggctattgcatggattttatgttcgattctcgttttcatttttaccgaataggaatgaatactttcattgtttttccacaagccgctttgtccgtgcgatcgccgactcgaaatacttggttaaaaagtcataaataaccaattcgaactgccggttattggtacggaaccaacggttcattgtcatgtgcgaaatgctgcccagcaactcgtcgatcgtaggtaccgccagcccggaggattggattcgggaaatttccgctgcgacttttccgatttccgacttacgaggttgtaatatggcatcgtaatccgtaaacatctcgcggtcggacaacgctttttcgatgtccgctcgataacggcggtacttatcattgatctgtttcgtgaacgaatgcgaggtgaatccgaactctttcttgaaattctcggccatccgggaaaacagtgtttttttctcgtccggtgtttttccgaaggcggtcatcgtatcatccagtaatgccagtgccaactgccagcgggtcgtttcccgcgtgtccgtaggtaattcctcaatcttttcgagcaattccagaatcgcaccgctgtctattccgaacaatcgttcgaccggctccatagtatttgccccgtatcgttcgatttcacggacgtaagtatcgcataaaacccttataacagccccgttttccaccaaaggctgaaacaacgcttcgaaacgtcggaagataggggcatagttctcgaatcggtcgatgtggagccgcagacggatatgaaaatccgggtcgttataacgaataaagaagctgccgtcgatccatcgctctgcgtacagttcccgaaggaatggccgtatggtatgcgccaaaacctcatcagccgttttgacgcccgtgtatattttgaagtatagccattggctaccgggtatgaactttctctgtatcatgttgctcgtttttatgaaaggcgaaaatcacctcgttcgtaaatcggtcttttccccgacggacaataccggagtcgttacgaaacagaaattcctccaatacgatctgtttgcgtttggcgatctcttccagaagcagtcgttggcattgtgtatcttccaaattcaaatagagttcgttgtcgctgtcgggaatgacgacttccgtcggcatttgtcgtttctgtaaaaattccctgaagcggacggaaagttccgaatcggataatttatccatcccttcgacctcttcttgtttgattctccacagttctctcgaaagaataatgtccttgtattgaatccgaggaagataatcataagcggctaaaagtcccgaccaaccgcaactcaatccgccggttatccgttggtgttgaagatcgcagaggaaacggtaaatcggaataggactcatcgaatagttatgggcacacgttaagcggggaacgacctctttgtcgtattttttggaacggagaaacagacgcccctgccgaatggaaagcatcaagtccgatatgggaatatccgttccatcgtgttcgcaattcgacagataatgcagcgtatgttccctaaataccgggcgcgaggcgatatttccgatgcgtgattcgggaagatgcgatatttcggcgaagataacgtccggagtttgccgctgctcgaaatcggcgatctctttgaccaaagccataatactctcgtcgatatggcagaagcgccccaaaaggttggccgcacatactccgccgatcgattttatgttgattagatcgttatcgagcaggctgcacataacggcaatcgtatcgggaaactgatgtttgtagtccagtttctcgaaatccttgtcctccagcaatacgacgtggcctcctttgcgggcattttcgatatatttttcgaacagaatgcggtcggcgggagtttgggtaacagttacagcatttgaataacgaccgggaaatactaaatcgttaatcagaggattgacgtcgccgctacccgatgaaaccggataacccaatcccaactccccgtccaatgccacagccaacggaacttcggcctcttcgtaccggctttggaatgcctgaataaaattttgcagcgtgggatgttcgttcggtggtgtaatcttcgccagaaagtcgattaaacgaacgattcgggagacagttttctcatccacctgtgctcgatgcaccggtttgaacatatccgtctgaaacagatatttcggctcgtagcctacgccgatattttttacgatcgataaaatttcatcatataacggcagtgtcgtacctaccggttgtgcgtcgattcggttcagaagctcctggatttgtcggagcggttgcaggatcggaacattttgcaggcgggagagtttatcgataagcgtatcgagtacgtcttcaccgacgacacatggatcgagttcgcttttcagcacttgcgaggcgatagtctcgatgacatattcatgcgcttgttccgtggttatctcgtcatcgacgagtgcttgcaccagttgttcgattgttgctccgtctgccgccgtgttcaggagcgtggccagcgcttcgtcgatttccaacgaagcaaccgtatgctggcgctgtgatttcttatagcgatattcgacatagcgatattttccgccgatttcataaaggctgtcattcgggtaatatacgagttgctcccgcacgttggggtcacgctcgatctcctgaatcagagcacacagatattgcatgtccaaccgggtgcggcgtttgttgtccgtcgtagccggtaattcgatcgatgtactgtccgcaatctttcccgtgctgcatcctgcgaataaaccgaacggagtacatcgtgtcatcgcccggtgccggtatttcagaacggaacgctcgaatttagtctgcttttttcggtctttcgatacacaaccttcatacagctccggcgaggctaaatagagtgcttcccgaaattcaggactcaaggtcgtatcttctgccggagcatccagcgggaataacggcgtcctgaaaacaaagtcggggaaaggtgtaaacgtcggtttcattatttaggcgattgttctgttagtaattctgttttcttttatctttttacaagatacagccagaataatatattgacaactgattctaagaataattttattcggcgtttattattttcaaaaacacacgataaataagaaaaattcattaaatttatcaatttattaccatctaaataaagctgacgcaaaatatcttttatcggtgcataacttataatagaaagcccccttcgtattaacgaaaggggctttctaaaatttacttaattcctattcgcaatcacatgttgcgttcacagtttccaaacacacacattcggattgaatacaacttcctccttgtgaaatcatacagccatttttgcttacttctacacaggctgtaacattatccgattcacaccccgtagccgaaacacaacgagccgtttcacattgtttcgttaaggcacaaacttttgtttgctggataactgtagtatctgcaccacctttaaccattgcactctgctctctgtcaagacgggacaccacgtcttttttaagttttagtgttttcataataaagcagttttattagttggtattcgaagatataaaatttcaacaaacgatgcaaatattttattgttttttttataactttacctttgtgagaaagaatttgtgtgatgaatcgatgtaaattgtcctttgttatattatacctttatgtcgtcacatggccattggtattgttgcacgcgcagaagaacccgtttttggagcaaatccgtaattttccgcaggagaagatccacgtgacgaccgaccgcgacgcctatatcgcgggcgacacggtgtggctgcgtgcgcactgcgtcgacgccgcgacgctcgaaccgctcacggcgagccgctacgtctacgtggagcttcgcacgacggacaacctgctcgtgcgccgcatcaagattctgcaacgcggcggcgtctatgccggctacctgcccctgcccgcgacgctcgcgcaggacgaatacgtgctgtgcgcctacacgctctacatgcgcaacctcggcggcgactatctcttttcgaaacccctttcggtcaatccctaccgacaacccgaaaaacgacggcgccgcacggcggcgggccccttcgacgtggccttcttccccgaaggcggctacctcatcgacggacagccctgccgcgtggggttcaaggcactgggcagggacggactttcgcggcaggtgacgggaaccgtgcgcgacgaccgtggccgcaccgtcgcgcgtttcgcctcgcgccacgccggcatggggtcgttcgagttcacgccgcggcccggccggcgctacacggccgaatgcgtccagacatcgggcggcaaggcgcggcgcttcgacctgcccgaagccaacgacctcaccttcgtcctgcgcgtcgagcccaacgacacctccttcgtcgtatccgtccgttcggctaaaaagtggcggccgcagggattgaagctcctcgtccaccgctgcggcacgcaatgctactacaaggagtggaacccgcagcacgcctcgctcaccttcctgcgcgatgaactgccgggcggcctctaccagatcctactgctcagccctacgggcgaagcctactccgagcggctggtcttcaaccgccgcgacgacgaggccgaggtgacgatgcggcaggagggcacgctgcggcagcgttcgaaggtaacgctgcatttcgaggtgcgcgacaccaaacgccgacccgcacagggcgacttcgccgtcgccgtcaccgaccgcaaggcggcggctcccgtagcggcggcaggcatctactccacgctgatgctctcctccgagctgcgcggagtgatcgaagatcccgactggtacttcgcgcccgacaacgcgcagggcgacgaggggcttgacgaactgctgcttacgcagggctggcgcaggtacgacgtgccgaagctcctgcgcaacgaatacgaggagccctactacccgttggaggcgggacaggagatcgcgggacgcatcgagcgcacggccatgttctccaaaaagaagaagctcgaccgctacacgatgcggctgctggtaccccggagcggctacgccacctcggctcccatcgccgaggacgggtcgttcgcactcaacggcttcgacttccccgacagcacgaccttcgtgctgcggcccaccgtccgagggcggacgatcaccgacgcgcggattctcatcactcccgattcgtttcccgagtaccgcacgctgccgcgcctgcggcagcccgatccgacctacgtggcgcaggcgcggaggtatatcgagcagcgcggcacggcggacatgcggaatatcgtcatcgacaccgtggtcgtgacggccaaaccctgggacgacggcatcgacgaaaacgcgccggaacaccgtctggccgcacggtcgtggaacgccgagcagatcaaggaggtcagcgccgggacgatcctcgacttcatcgagaagatgcccggaatgcaggtcatgggacgaagggtactataccgtggccacaaaccggcctttatggtcgacggtcggttagaggaaacggtcggtatgttaaataaaacagaagatgttgtcggagaaagtacgaattggggttcaggaagaatggataagaacgataaacgaacaatacactaccagccaattccaactgtcaatagttgggtagatatgacaggaagagattattcaagtactaatttggaaagagaacttgcaaaagctaaacgacaagtcgattatcaagataatttggataatgtccccgattgtttgtattatccgatcgaacaggtggcacgtatcgacctgatcgaccgtaaccagacgacctattggggaacgaacctcaaaggcggcatcatcgccattaccatgaagaaaggaaaagcgctggccgaagcgtatgccgctgcaccgtcgccggacgtaagcgtagtgacgcctttgggttatcaaacccctgcggagttctacgctccgacatacgacaccgaagagaaacgtagaaccaacacgcccgactatcgcacgacgctttactggaatcctgtcgtcaaactcgacgacctggggcaggctactgtcgagttttatacctccgatactcccgccgattatgacatctctatcgaaggcgtatcccgaagcggaaaaattatctctttatcgaaatcgtctgtaaaaacagaataaggatatggacacgattatgtgtggtgcgctatattatttctcgtaatatcgattttctgaatcaataaaaacacccgaaaaacctctactcggcttttcgggtattttcgaatttatcggacgaagcgaaaccgctgatctcttaccgccgttttacaccgtgtatccgattcgacggcacggagggaacatgcaggtccgagatgtcgtcgtacttgttccgatgcggttgcatgccccgtcttaagggatagttctttttcaatatctcagcggccagccgtcgggttcgttcctgcaactgcctctgcgccgccgaaccttccgatgatgttccgtattcgcgtgccagcgtctcgaatgcttcggcactcgggaaaagaccgttcataatcccgtacttcattcctccgcccattccgttctgctgcatcgtctgtaaaacggcgatgtcgaaactgtagctgctgtaatgcggggtgtgcggaacgtcgtcgatcagcttctcataattccgcaccgtcggcgccagatcgaacgtgtcggtccgtatgccgtacgctagcaatgctttcggggcgaatgtttcgggcgg

SEQ ID NO: 10431 - DNA, 20407 bp, Unknown
  gut microbiota DNA sequence
gattgaggaatccgtaatcgcagtcaacttttcataggtcggaagtcccgtcgtcgaagtatcgagcagtgtttcgggttcgatacccgtcagatcgcaggtcatgtcggaaatctcttcaaaagccaaagccgcaggcatcgtcgtcggatatcggtcatagacatgctgtgtcaagatctgcgatgcggacgaagaataaagttgcggataagaattcgtatcgaatgacatttgcaatgcctcgcgtgtctgcggcgtctgtgcggaatcggtgacgagtttctgtgctgtcacacgccccatgccatcgtaatgaaaggtgagccatcgattcttctcacgcatcaatccgtcttgtatcatcatcggccgatcgccccggttgtagacgacatacatcgcctcgcgtcccgggaaacgtttttcatagacccgtccccactcgtcgtagaaatagacgtaacagttttgctttgcgaagtcgctgtcaggcgagaaactcgatccggcggagagcagatcgctgcctttgggtgtcatgacccacgcaaggcgtccgcagtcgtcataggcatagtaggtgattatattctcggtggcacttccgttgcgcagctgtcggttttcatagaccgtgcgaccctccttatccgcataggttatgacgacggctccgtcttcgttcgtagaacgtgtgccggagagttcattggcggcatagtaaccgtctgccgtcagcgaacgatcatcgggatcgacacgcaggcgaagaaccgttgatacggcattacccatataaaaagtctgcatggaacgggtatcagattggtattccgcaccgggtttatgtgtgcgtaatacccgattcagtgcagaaggttcgtattcggtacgaacacaagcgtgaggatcggtcgccaagccgtatctggttttataaaactcctcttgattggccaatgctgcatcgtcactttgcccattgttggcatccagcgtataagggaggtattgtaactcctcgcggtacaatccgtcgtagacgaatggttgtataatatctccctgtccgtcgccgttagcgcaaatttgtacgttttgcaatgcatatcccaatccgtcgtaatagcttacatcataagagatttgttcctcttcggtgtccccgtggttgtcgcagttgaaggttcgtgtcagaatccagttacgatcgtcattgagcgagagcatatcggagttgtagcggatgccttccaattcggcagagtcgctcaaaccgccctcggagtaggtagcaacaatgcgatagtaacccgatgtagcaggagtcgagagacgtaacgaaccgccgtttcctgtaagactttgcaggtagctgttttccctataaagcgtatacgttacgaatggttgtgtatattcaactatcgcaataatttgagaagtctctttgtcgtattcgtatgatacgggaaccgtccaatccgattacgatgatcgactataagttcgattcttatgaagctgttccggcggaattggcatacaagagcgaaccgatcggcaatatgtcggccggagtggatcgcactgcggtcaaagggttgaagacttatgagaaaatccgggtgcttaccgagcaggaccgaactgcgggttatatcgaacgggcctattattacgatatgctgggacgcgtgttgcaagtcgtggagaagaactacctcggcggtatcagctatttcacgacggcttacgatttacagggtaatctcaccttccgacgggaacgggtcgtacccaaaacaggctgtgcggaggatcttctcacggtggaatacacctatgacaatgccggtcgaatgcttacccagacttcgaccttcaacacgtcgaaaccagttactgtaacttactcctacaacgaaatcggtcagctcgtgcgtaagaacatcaacgggcttatcgaggactatacgtataacgttcagggttggcttacgagccaggacagtccctattacagtgcccggctcaagtattacgacagtgagaatccctcgtacaccgggaatattaccgaatggaactggggcggtgccggtacgatgccgcatacgtataaatacgagtacgatgccctttcgcgtctgaccgaagcacgttacagcggcaatatgggcaccgatcgctattctgaacgcggaatcaaatacgaccgcaacggtaatatcctgaaaatgacccgtggattgaacgaacagcttgaatacaaatacaatgatgccggtcagctctatggtattaaccaggcatctgtggtttacgacaacctcggtaatttggtccgggattcccggaatggcctgactattgcatacaattttttgaacctgcccatgcagatcaagtcgagtgctgacaactttgagttgaattattgttatcgcgccgacggaggaaaattctccgcattggatgccgataaaacgggtttgatttatatcggttctttggtatataagcagacagccgggagtaagatagagttcgagagcgccgccttcagcgacggtcggttccggaaaaatactcatagttggaatacgaattacgctccggagtattatttgaaagatcatctggggagtccccgggcatttgtggattggtcgggtgaattgatcgcgttgcgcgattactacgctttcgggaagtcttggttgaaacccaattccccggctacttcggacctgtcccgtttcaacggcaaggaggagcagacggtcggcgacgccggattactcgacttcggagcacgtttctatcatccggacctcggctgctggctgacgcaggacccgatggccactgaatatataaatatcagcccatatgcttactgtgtaaataatccaattcgatatatagatcccgatggacggcaaattggtataactacgatcatagatggtcgaagtgttctttatacttggagaagtataaatggtgtatggggcttttacgatagttatgggaataaatatagtggtaacgatccttttgtgttatcagtgattgatagtattaccactatcatgcagggtgcttgtggaagtagtttgattcaaaatattgtcaataatccggaaattgtagatatcaaactatcaaacgaaaataattatttctcctataataaggataatgcaacatacattgtatattggaatccaaattcaaacgtgttgattccgactactgacggcatgaaagagaatattccgtatgtcagtcaggctcatgagcttcaacatggtttggattatatttctggaacaggggatagcggtgtttggattactgttatggataaggatggagaagtgaaaaatattaagaatacggagatttcggctacacatatggaaaacttgatccgagcagaacatggcttgccattgcggacacactatttgcccgatgggaacagccgaagtgctataatcgatagacagacttcgagaagtctgtattatgattgtaatggcaatacaacttttcaaaaaattataagtcctaataaaggttataagtataaaagaagatgaaaaaattattttttataggatgtttcgtttttttgtggagccattcctttccacaaaggaacgagttgtttcaaatctggaaaacggcagctgaagatgtgaataaatatgattataggcctaaatatgaagttttggacccggactcgtatcattttcatacgtatgatctgcaagaaacgcttcatacgacatactctcgtttgacggattcagattacaagaaattagcccgtagccttattaagaagggagggtttgattttgatcgtcagaatgacacattgatgtttttgtttaacttttatctgtctgtaaatgtccctggtgttgtaattgcaaaatctagttgttcggaaaaagtttattttgtgagagagccaggtattgtttttcgtagttatccggtaacgaaggaatttaatgacggtaatatagcttttaaagcccaatatgagggagatgtggcgaaatttcgagagctatttttaaaatatggatattatgatggcaaggaagtcgttttacgtattgttctgaaaaatgggaaggttgtgttgccgtcttatctctggatttatccagccataagaagggaactgctggatcaataaaatctttaatttgcattttaccggcaacccttttcattgggttgccggttttttatatgcttggatttggactttagggggatttttgtttaatttagtaatgtagatcaagtcgagtgcagacaactctgtcttgaattactgttaccgtgccgacggaggaaaattctccgcattggatgccgataaaacgggcttgatttatatcggttttatctacatcaattatttaactcatctattgttctgtaaaacaaaatttataagactgttccaatttcgaaatattgtcttaatgatgtttttcttttgttgtttcccgtcggaacgattttcactttgtcagtagcgtcctcattcggttgccgtcggaaaagataggtgcccgtccgcgcctgcggcgctcgctctctccgcggcggaaaaatcatcctcgcgcgggcttcggtatttttccgtcgcttcgttcgcacggtgcaccagtattctttccgaggcaaccgatccgttcgggatcgcccctcgaataattatcgattatcgtatccgatgcaaatagactttgcatcgcaccaacacgtgagacacacggtaaaaactgtccaatcattatgacgaagacgaagaagtccgcttctcggaaatcctccctccctgccccggcgacgaccactgctgcttccgcagcaccgctctcggaacaaagttcgacaacctccgctgccgcgtccgaagccgtcgcgtccgcttcggagggcactcctgccgctacgccgatcgtccttctggagctgaatcggatcgtttgcagcacctataaccctcgccgcaatctgaatgagtcgtcgctggatgaactcgccctgagcatgcagcagacgggccagctgcaaccgatctgcgtacgcggcagcggcgagcactacgaaatcgtttacggggagcgccgctaccgggccgcgcagcgtgcgggcttcacacacatcaaggcccttgtctatgaacatctcacggacgaggatgcggaggatatggccatcacggagaacctccagcgtgaggacgtagcgcctctcgaagaggctgcggcgttccttcgagcgctcaaaacgggccgtcatacggtctcgacgctcgtcgataagttcggcaagagcgagcgttacatccgttcacacctgaagctcaacgaccttatcgagccgctcgcgaacctgctcgaacgcgaggagatcatcgaaagcatggccatcgagctggccaaatacccttcggaggttcagcagtgcgtcttcgaggagcatttcgcaaacgacggtcacaactcgtggaagaacacgtcgccccgtcaggtgggccaataccttcacgaccgctacatgaccaagctgaacacctataaattcgacaagacggagtgctcgacctgtgccgagaatacggccaacaacattctcttttcggatcttgccgaagggtgtgcgggctgcgaaaaccggtcctgcatgatccgcaagaacgacgaatttttagttgagaaagcgatccggatgcagcggaacgaccctcgtacgctgcttgccgtagaggtggggcactattcggatgccgttctcgaacgcctcacatcccaaggttatacggtcgaggtcatcgacacctacagcatgtgggagtcggacgttcccgtgcttcctgacgtcgaggtcccccaagagtcggattacgaggaccgggatgagtatttagaggctctggcggagtacgaatccgaggtttcggagtaccgtgagaatatgaagaagctggatgcggagatcgacgcgggccgagtgcgtaaatatgcccttatcggtatgctggacgtcgatctgttctatgaggaggttccggagcagatcgaggagacgtccgacgacgagggcgtcacggtctatacgtcgatcgctccgcgtcccattgtcgaggagcttgagagccgcatcgttatggcacatcgctcatgctatacgcagatgacgacggagctgaaacgagtacttcgggaaacggagatttcttcctccgctcttgcggcttccgagagccggctgtacggctattcgctgctacgcctgcttccgtcgagctacgccgaaaaactgggtttggagcgcgaagccttgcaggatgtgcaacagatcggcgattttctcgatcatctggacggggatcgcatgaatatgctgatgcgctcggtgatcttcgactgcatggaccatatcgaagagttccggcagacggatgaaacgttcgagctgcaactgctgcgtcagttcgccctgcaacaggacaaggagacgagcgagcgtgtgatcgcggagcatctggatcgcctggagaagacgcaatccaagctcgaagagcagcttcgcgctctggagcagcgcaaggcgcaggagttggccgccgaggtgtcggcattcgatcctgtgattcccgaggatcctgacatcccgcaggagaaccctgcggaggatgttccggagcccgaaggagagccgttagacccggatctgtggccggaagcgtcagcatcgcttgcggcataacagttataaataatgtcgataccgggaggagcggttatccgctccttccggctttttatttcttaaccaaacccgacaccattatgacaaaaccgagcgaacatttccgggatacgatccgggaatatctggagcagcgtgcaggcgcggatgcgcttttcgcggcctcctgtgccaaagagcataaaaacctcgacgactgcatcacctttattctgaactatgtccagcagagcgggtgcaacggcttcacggacgcggagatctattcgctggccgtgcattactacaacgaggacgacatcgacgtcggcaagccgctcgattgccgcgtcgtcgtgaaccatacgatcgttctgaccgaggaggagcagcgcgaggcgcacgagcaggcgcttcgcaaagccaccgaagaagcctatgcgaagataacgcacaagagcaaatcccaacctgcgtcgaatgccgcaaacgctgcgaatcaacaaagtcttttctgagccatgaagccgagaacgaaactgcaacggcgcatcgtggcggcgagcggccgcctgccggagatcacaccggcgcagctgcattggggctatgcccatcttctgccacatgaagcgttccgcaccaagaggggaaaaatcacctgcaccgaatgtcggcatacgtggcagggagatcagcaaatcgaccgtgccgtctgcccgcattgcggcgtgcgacttacggtcgtaaccacccgtcggcgcacgtcctggaataagacttacctctctgtggtcacgacaagagagggcttgcaggtcatacgctacttccttctcgaacggcgggtgcgggacggccaccccgcacgctacgaatgctgcgaggtcatgcagcgctggatcgcgcccgacggaaaatacgctaccgtagcacgcctgcgcaatatgtcctggtattatgatgtgtggcgctgcgctacgccgctggcgctgcggaaggaatattggctttacaaccgcatgtccgtcgagcggagttatcctcgccgccgccttatccccgaattgcgaaggacgggccttcgctacgacctttatgcggaggatcctgtcggtatcttccgctatactctcagtcagcgccacgcggaaacgctgcttaaaatcgggcgccacgacttgttccgctacttctgccgaacgggcgggcgtcggatcgaagattactggccttcgctccgcatctgcctgcgcaacggctaccgcatcgatgatgcggcttcgtggtgcgactatatcgacatgctgggccggttgggcaaggacatacataacgcacactatgtctgtccgtcggatttccggcaggcgcacgaccgctgccatgtgcttctggcccgcatcgaggccgaggagcaggtcgcacgccggcgtgcggaatacctcgaatacgaggaacagtaccggaaggccaagggcaggtacctcggcatcgctttttcggacggagagatcgaagttcgggtgctgcaaagcgttcaggaatttatcgaggagggcaaggctatgcaccactgcgtcgagcggtatcacgacaagagcgattcgctcctcctctcggcccgcatcgcggaccggagggtggaaacggtggaggtttcgctgtcgcggttgcaggtcgtgcagtcacgcggggcgtgcaataggaatacggagtatcatgaccgcatcgtccgcctcgtgaacgacaacatgtctcttgtccgagccgcccgccataaaagagataaagctccccgtattgcaacgcttggccgcgctgcatcggacaggctgaaggtttctgcataagatcattcggaagagaccggttattcttgagtcgaattcgagatacatccgggaaaaaacggcgaaacagagttgccggtgctgctgaaaatcgctatttttgcaaatataacgaacatcaatatgcagcacttatgacaaaagcagagatcgtcaagcaaattgccggacaaacgggtctggagagtaaaatggtcgcaggtgtcgtcgaggcgttgttggagcggattcgtgcagcccagataggcggagagaacgtctatttccggggcttcggcagcttcgtgcgccgtgagcgagccgcgaagaaggcccgcgacatctcgcgcaacacgaccgtcctcgtgccggcgcataccgtcccggcgttcaagccttcgaaggcgttcgtcgagtgtcttaaaaaatagtcgcttcggtatgaaacaatcgtcgccgcaggggactcgactcctgcggcgacgatgttgtgcggtcgttactctgcgaaacggtttccgaggtccatccgttcgtggaggattctgacgattagaatgatccggtcggattcgatgcggtaaaagaggatgtgccgtccgactctgaatccatacaacccctcggcgatctgttcgtaacggcgtccgatcgggacggtgcttgcggcgatctttcggcaggtcgccacaagcaatccgtaatagcggtctgcctgctcttccgaccaccgctctaccgtgtaacgccagatgtccgagaggtcctcgacggccttgcgggtaaaacgaagttcagtcatctgcacgtcgggctttcaaatgctgcaaatgccgctcgggatcgaaaccttccgcgatgccgctgtcgaatccttcggcgacggcattttgcaggtcgagcgtgcggctctcgttctcttcgagcagccgcagcccggcgcgtatgacctcgctggcattgttataacgcccctgggcgatcttggctttgatgaagctctcgaaatagtctccgagtgctacggatgtcgttctcatagttccttctcttgttcagctacaaagttaccaatatttagtaatataacaactctccggccgaaattattgtgcccgacggagcgatccgctgcggatcaaagggtccgtgccagcctgatctgcttgttgcgaatctcgatacgctgatggcgtgctccgtttcgttcgacgatttcgagtacgaggatcttgtcgtcgggcatggtgaacttgggcagcgcgaagacggttctctggcgctgatgggcacgtacgatacgcaggtcgttgcatacgcgcagcagttcgagtggcgttatctgctgtgccgttcgctttgcgaccttgcggtcctcgatccgaaaatgcaggtcctcgacttcgaaggagatgttggagttgttgtatagcgacagatggatgtatatcacgtcgttgcggacgtagattccctgcacctccgtttcgatgccgtaatgttttttccgcagccgcatctcggttcggttgagcctgtagatgtcgttgagcgtcttcttgactacggcgggacgttcgcgtccggtggcttcgagcagcacgcgaccttctgcgggcggcgtctgcacggccggggacgcggacgtcgcagcgcctatctcatgcgttgctacctgcgggttctcggcatagcgtgcatcgaaggagtagtagcctccgtcctcggtgatgaccgtgaggttcgtttctttcggaaagtctcggacggcggctttcacgcgcacgacgttctcggctcctgcggcctttccggcgatgatgtccatcgacccgatgtcgatataggtcacgggcgacggaaagaggatgtgtacggtcttgttgaaccccacttcgatacggcggggtgctacatcgacgtgctgcgcatctgcggcgagggccgcaagcagcgctgcgatcgtaaggaaaagactggataatcggttcatgacggttttattctttcgacagtaaatagatcctgtggtcggctttaagtgtgatcttgacctctttgagcttctcggccgcatacctcgtcgtagctcgcagggccgtgcgggagatgtctgcgagcacctgctgcccggcgttgcggctgatgtcgatgctcgtgccggtctgctgcccgatgtcggcgagggcctccttcacggctcggcgctcgcgcgagtcggggatgttgagccccggctgcccgtccagatcgtaagctgcggcttcgaggggaaagatccgcccctggtatcggatgctgcgcacgacgatccgcagacgcacgccgtcgagcgatgcttcgccgtagagagaggtgccgcgcggcagccgtacgccgtcgactgcggcctcttcgagcagccgcaggcggaccatctctcccgagcgcacggtctgtgtctgcgctatgcacgcgcagacggccgtgttatgctccgggatcttttcgccttcggcagtcaggaaccccgtgttgcgctcctgtgcggaatctgccgctgcgccgagcgtcgaagccgtcagtgcccggtccggcacggggcgcagcacgcagagccgtccccgttcggccggtacggtgtcgatgtgcggtgttccgccgccgaggtacttctgagccagttgatattgtcgctcggccagctccagcggatctgcggaagctgccggcggcgacgcatcgagccgtgcggagagttcctcgacctgacgccgcagatgctcgacttcccgctcggaggtgcggggtgcataggtttgtgcgagctgccgttgcagggcgcggttggcctcatctgcctcctgcatggggttctgccgggacggaggttgctccgtgcggtcgtccagcagcgagaaggactcctcgccgagcgtgagcagccgctgggcctgcaacgcctcggtccggaccttcgccacgaccttttgcttggagctttcgatctgttgctcgcggccctccggcacggagaagttgatccccgcagccccttcctgctgcggtgtctccttcgtgccgaatatccgccacatgaacagcgtgaagggtacgagcagcgcggcagccacgagcaggacgttgaccttcggccgcctgcgggagcggatttcatcttttggttctttcatcttcatcggaatttgatattcaggataagacgccccgcagcagcatccacatatcggcagcggcgaaaagcagcagcgccgcaagagcgatgcactgccgctggcggggcgccagacggtcgtgtcggcggcgcagccaccgcctcgcataacgtgttcgtacgcgcagcctgtcaacggtcataagttgcgaggtccttgttttcgatgacgttcagattctccagcagaaacccctgggggttgttgtccgagcgcacggcgttgatgaggcggcaggtcgttacgagcgaccgctcggtgatggtgctctcgcgcatgatgcgctgccgggcgtaggtcgtcacctggtagggatagctgtcgaagttgcagcgtatgctgtcgatgcgtacggtctgcgagatgccgccggcgatcaggcggttgaagaatcccttttcgctcagggccttatagtacgacagggccgatcggtcggccattagcagcgcacggttcaggttggactcgatggccgccttgtcgggcgagagggtgaagaagagctcgtggaagcgccgcacgtgctcgcgtgcctccacggggcggttttgggagaggtcctgcgagagtgcgaccatgagcgaccgtccgccgtcgaggacgtagatcttctgccgctgccgctcggcgaaggcataggagaagcctacagaggctacggccacagcagtgcacaatccggcgaaaagggcgcagcagatgcgtatgagccggaagttgctttcgatatttttaagacttttgaattccatacagcgaatgtaaagcggttattgacgtgttccccggagttttccggcaacccacctgacgccgtgccacgcggccttgccgccggcgtatccttttcctgcggccatgcccattaagccggccgccagtgtcgtggtgcgggctacggtatggttgaagctcgatatgcctccggtctgcacgatccacgtagagatcgaggggatgcacatgtagccgcagatgccgatgaccatgaagatcagcgtgacggccgtgccgctcgtcgtctcctgctggagcgcgagtatttgcagacgagcgatgatggccgagaagagatccgagatcggcagccacaggtagatcgagacgtacttggagagccagttggtaagcgagctctggaatccgtcgaagactgcgatggcgaatgccagaggtccgaggatggagagcacgaccagatagaaggtcctcagtgcgtcgatgacgaccgctgcggcggcgaaggccaactccagtatgtaggctaatcctttcatcagccagcccttgaacgaccacgaggaacgttcttcgtccatcttgtcgagggtgctgcgcgtctgctcgtccagccccagggcgtcgagctcgcgctccatttcgggatcctccgcgtagtaggaatccgcaggcagccgctcgcgctcctcgcgttcgagcgcttcgcgctgctccatgtagcgttctatattgaaggtctggccgaccataagcgagtgcgtggcctgcaccacgggcgaaaggattccgttgagcgatcccagtacgagtgtggggaagaacatgatgcagatccccagtgcgaagggccgcagcagcggaaagagatctatggcctcgccgcgtgccagcgattgccacacacggtaggagatgtagagcagcgctccgagacctgcgatgcccgaggctacggaggtcataccctcgcagagcgtcatcatatcggtatagagctgacggaggatgccgtgcatgttgtccatcgatagcagcatgtgaaccatcaccagtagcgttgttcgtccgtgccgtagagcgccaccacgcgctccatatcgcggtgtgtgcgtgcgcgcagcagcgaaacgctgatgcagcggcgcgtgaagtaacccgcgaggcgccggtggcgcatgagcgtgccatagacgcgctccaccacgtcgatacgatccttgtccgtgagactcatatccgtggggttgatgatctcgccgaggtccttcagctctccggccgcttcctcgatgatgcgtttgtaccctatggcgatggccgccagctcctcgaccgagaagttcgtgtcggtgacgatgcggcggtagccgtcgacgtagatgtccgagatctcgcccacgagcagcatacagcgctgaaccttgcgggcgtcgcgcacgagtttgttgaccttgcgcagcgcgtcgtagtactttttgttttgctcgtatattttcaccgtctgctggaagttctgcaacatgctttgcgccgtcgaggaggtgtgtaccatttcattggtggagttgacgataccctgtgcgaggttcgaggggtcggagacgacccactgggcgcgggctgcccctgcgccgaggagcagccacgccagaaggagtgccagacgtctttccatagctattcgacgggtgtttcgaactcttcggcggcgggatgcgtagcgtcgtcgggcaggaacaggccgtagcatcccagcgtgagccggtcggtcgcagggtcgtactccacgcggttggctccgcagtcctcctcctcaccgaagagcagacggtggcgtcgcagcgtgacgaccgcatcctgcaccagccgtcggtagcagagcgtgtggtcgtagacgagcatccggtaggttgccgtaccgatgcggcgcagggaggccgtgagcgttccttgtgctgcgagccaggccccgcagatgcggtcgctgtcgagctgttcttcgagcgaggcgatgtgttgcaccacctgctgacggcggcgtatgtcgtcgcgcagagccgtgacgacgggattcattttttccatcatgagtcgtgttttttaaggttcgtaattcttcgatagctgccgcccggcaggagcagcagccgattcgtcgtcggggcgtagagctccacgcggcgccccgcatcgaggtagtagatgccgcgccggtagcgcaggcggaaggtccggccatggcggaagccctcgccggggcgtcgcagcgtgaggatgtagcactccggcccgcgacgtatgtcggccgtggcgccggggtgcagcaccgaggcccagcggcctgcgaggggtgcgatgcgtcgttcctccatatccacagtcaggagcagcaggcacggcaggacaacgagggcgagggccgtgccgacaatcccgaaggcatatcgccgcatggcactacgcctcccgctccctgcggcggcgttcggccagctgccggatcgccgcctcgatgtcgccgtccagcttctcggccagagcgtatacctccatcttctccgtctgctccgtcgtaaacgctaaatattcctcgtccgagacctccgtagcatagacggcggactgtaccccgccgaggctgataaagacctccttgtagcggcgcgcggggtcgttcgagagattgatcgacagaacctgcgcacgctccttgtccgtcagtcccagcaaggtctgtatctggtcgaacttgttgcggtacttgcgctggtcgagtagaatcttgcagtcggcgttgttgatgatcgactctttgacaatgggcgacgagatgatgtcctcgacttcctgcgtgacgacgatcgcctcgccgaagtacttgcggacggtcttatgtaggctaagcacccggcgccttaccgtatttctacggcaggtttccaagaactcgcccccgaaccggacttacacctctcggcgtatccggctctccgctaatttttctcagtctaaacttttcccagatgccgcagcctgtggcaactcggacacaacgcaatggtcttgcgtctgcgggctgacatgagccattcccaactctctttccctttcaggtctttgaggttgcggacatggtgcataatcagcttgcccgttgccccgcacaattcgcatttttccgctttgagcctgtccgtcaaattggttcggctcacgtctgcgatagagtacggttcgatgtcgcagcttccgttgaaggccgttgtccggcgtttgaaactcgtcttgtaaaaggttcggaacttgattacccctttctgctcgtactttacggtgaacagtttgttgcagcggtacttcttgttgatttttcgtaccgtgctcctgtatttgcccgcaaatgttttatacatactgtactccatgatatatctgaagttgtgcagtaccacgcagttgttggcgatcaggtaataattgcaaaatcccactgtttcccgattgtatcggtcgaggatttcaaggtcgtcgttgaatatcaatcctgaacggcatttgggtttccaaacctctttcccgttgcggagtttgatttccatagctccgtattccagaagtttgtcccgcagcgttgccatgctgacattcagccggacacgcttgccgtaggtgcgtcgcagacaccctcgcacatcccggcgttgatgattgtcccgtgttaccgtaatctcatatccgagaaatttcgccgatttacccgtatgggttatcagcgtcttttcttcggacagttcgagggcgaggcttgcggataggaatgatttaatatcttcctttatccgctgtgcatcctccttactgccgattacgcccagaataaaatcgtcggcgtaacggatgtatttgagccttcggtagcttccgtccatttcatctccgcttggaaatgcggcacgttcctgttcgatggctttgagccttgcgaccaaagccgccttctcagccccgtcttttacctttctcagtttccgcacagtccgtttccgttcgttagtcaaatcgttgctctctttgcccggcctgcgtttggttcccttgtcgaagtgtcggatatactctttcacgtacttatccaatttatcgaggtatatattcgccagaatcgggctgacgatacctccttgcggcgttccgctgtatgtgttgtgaaacgtccaatcctcgacgtatcccgctttcaggaatttccgtatcagacggataaaacggtcatccgaaatgcgctcccgcaggatttggacaagaacatcatggtcgatgttgtcgaagaaccctttgatgtcgccttcgataaaccatttcgccccgttgaacgtcttttgaatatgaagcaatgcggtatggcagctccgtttgggtcggaagccgtgcgaggtggtctcgaaatgtccctcgtaaatggcttccagaatcatacggactacctcctgcaccagcttgtcttcaaaagccggtattcccagagggcgcatcttcccgtttttcttcgggatatgcaccctccgcgacgggtggggctgatagctttcgtctttcaacgaggctatcagcgtttcgatccgggccaggctcatcccgtcgatgctgcgaccgtcggagcctttggtcgtgctgccttcgttcgatgcgatcttctggtaggcaacatagaacaactcttcgttgaacagaagccggtaaaggcgttcgaacttgtagctcgaatccttactgtgttcgttcagactgtttaatactctttccggacttctcataatgtctctcacattatccattaaatcgtattaaagaaaattagctgcctcccttcgccatgtacaggccgttaacctgcccggactactacggaggctccgttaccgtgccggatattcagaggtctgcacctcatagccttacggcgttccggtttaggcaatccccgtttacttgcttagtaactgttggcgtgatggattgtcggatgcgatttccgtcctttaccatttatcatgggtgctctgcggcaagttcttgctgcatccgtatcttttcaccggagcagtaccgcagtatgacgatttcagctaccttacgtcatagccttaaagtagggcaactcggactgtcgttcaaacaattcggttttcatcctcatatccatcgtttcatcttgccgttcagtggcagtctggtaactgactgacttacgacgttcccgacatgctacactccccgtccagtttccctttcggataagtcgggtgatgataggtttttcaaagaacacttacctgatcccttgccagtgggatatttactaagcagcctgtacgggcgcacagagatattttacataggatgccattccctccttggcgatggctttccacgcttcttccagcagcaggaccttgcgcacgccttgcagccgccgcatcttggcaaggaaggtttccataatgatgatcgtcaccacgggcagcagcgtgcggttttcggagatgttatccagctcgaagacgatgaaccgcttgtgcagcagatccatctgacggttcgagttgagcaggtagtcgtactcgccgccccggtagaagggttcgaggacgttcaggaagttcgcccaatcgaaatccttctcacgaaccttcttttgttgcagcagccgtcggtagtcggtggcgacgaactcgtagaaggtgtcgaacgaaggtacgacggcgggatcgctcttgatcttggtaaggtagaggtttacggcgttcgacagcgccacctcctccgagcgtgtcggggcctcgtcctcgcgtttccacagcgtgaggatcagcgtcttgatcgactcccgcttctcgacgtcgtacaccccgtcctcgacgtagaaggggttgaaacagatcggtgcttcgtccgtgtaattcaggtaaataccgtcctcgccccgtgtgcggcgatggatgagttcgcacaatcctttatacgaatttcccgtgtcgataagcagcacgtgcgccccctgctcgtaatagtggcggatcaggtggttcatgaagaacgacttgccgctgcccgaaggtcccagcacgaatttgttgcggttggtcgtgataccgcgcttgatcggctcatcggagatgtcgaggtggagcggtatgccgctcagacgatcgacgagcttgatgccgaagggcgacggcgaagaacggtaggccgtctcttcagcgaagaagcagagggcctgttcgaggaatgtcggaaacgactcctcggcgggaaactcgccctcggcacccggtatgccggcccagaagagcgccggcacatcgaccgtattgcggtgaggcgtgcagcccatgagcgcgagctgcgagcccacgtcgttgcagatgcccttgagcgccgtttcgctgtcggcccatataaggacgttgcagtggcagcgcacggagcggtacccttcggtgtgggcttcgttcaggtagaggtcgatccactccttattcacggagttggcacgcgagtaccgcgccagagagttcatgttgcgggctctcgcttcgaggcttttgagcgtctcggcgtggttgtccagaaaaacgtattggttgtagatgtgcggatgtccgagcagcagccccgcaggtgcagcgaacgagaggcggcagtcggagcgatccgtcgagaaccgttcatagcggctgtccgtgccgacggcctgcggcacgtagtccaggtccgaaagcgtgtacatggcaaggctgcgattcccgatgcgtatctgtccgtcgtcgagccgcaggtcctcgttggtgacgatgccctcggtgcccagtgcgaagtagcgggctataagtccgctgtcgtctgcggtgccgacgatctcatcggccgtaagaggttccagacgtatgaagcctgcatcgcagaggatgcggcgcatctgctccgcagcatccagaaacagtgttacggactccgtgtcccggatctcctggggcacgatgaaaccccggcagagggacgagaagtcgctgcggcgccgcatctgttccttcgaggtcttcgtgatgaagagatagcacgagtgccgcaggaagggtcgctcgttgaagtgacgctcgaaggcccggcccagaaagctctcgtccgaggcgaggtcggggcggtagtgctcctcggtgaaatagtcctgtttatgtacgatcgtgtagtcgggcagcacacgcagggctttgagccaggcgccgtgcagggcctcgtattcggcgcccgtgagcgtgaagagctcgggcagcacgacacggtaggccaccgttacctcggcgttcttcgacaggatgcaatcgtgttctacggccagcagcgggaagtaatgttccagtgcagccgttttcagtgttcctcgcatagtttagtttcgtttaacgatcagatgccggatgctccggcggtggatgatgcggcgcggatgccgccgcgccgccaggcgtttcatcagcccgtgagggccgtagcggcggttcatgcggaacgtcccccagaccacgagcgacatgcagaccagcgccacgagaatgcagagcgtgcggtcggctcccgccatgtagagtaccatcgtcagcagcagcgacgcgagcatcccggcggcgaagaggaagagatattgcgacgtgagacgtaggctaagaacccggtgccttgccgtatttctacggtaggtttccaagaactcgcctccgaaccgtgcttgcacctctcggcgcacacggctct

SEQ ID NO: 10432 - DNA, 5995 bp, Unknown
  gut microbiota DNA sequence
ataattttaagcctatttcgcgactgtccctaattaacgagaaataacatgagccaattttatgcattgatgtccgataatacagtaaaacacatttctcttaaagaagagatagtaacagagattaaaaatatatttataaatggaggtgctatatttaaaccagaaggtatagaagaagatgttttcgatggcaatatcattagccggaacggggagaatataacatatgtacattatgacttacctgaagattttgctcgcataccatataatcaggctgatatgtctgaatacaatataaatgaagatatgcctaaaagtatcttttattacgatgacggaaaattctattttcaggtctttaataagacatgttacaacgaaaaatggtcttgcagtttgaatgtggaaatatatttgcaaaaatgaataactctgcttttattgttgaagataagattcatgcactatatgaggaggggaaactgtattttcaaagttatacagtcgcaaatcaaatattctcactaatagattttgttaccgaggctacaaatgctgaaattgaatcctttggagaaatagatggaattaatgtaaatactgaaagtataaagcatattgcaaatataaagacgcgtcggcttataaagttgttatcgaatacagacaatatttcagcttttatgagaaaagcacctcgaacaaaaactagcctattaaacaaatacggagttaatgcacaaataaatgaaaataaagaattggttttaccgacaaataatgttgcagatttgaaccgtgttttagagtttctcaatgaggatatatttaggggtgtaattaccgacaggctttatcgttcaaattcaaagaaaaaagataatcactaattatgatgaacaaagaaaaccaaataatactctatcaggacgataacgagataactcgtgtgtctgtgcgctttgctgatgaagacttgtggctgactcagggacaattagttgagatataccaaacaagcaaatcgaatgtaagtgagcatatcaagcatatatttgaagatggagaactagcaaaggaggcaactgttcggaaattccgaacagttcaaatagaaggttctcgtaaggttgaacgagaagtagagcactacaaccttgacatgattattgccttgggctatcgtgttcagtcgcaagtggctactcgtttccgccgttgggcaacacaacgacttcatgagtatatccagaaagggtttgctatggatgatgaacgcttaaagcaagggggtaaccgctatttccgtgagttgctgcaacgcattagggatattcgtagtagcgagcgcaatttttatcagcaagtcaccgatatttatgctacggctacggattatgatccacgcgatgagatgacaaagatgttctttgccaccgtacaaaacaaactgcattatgcagttcatgagaatactgctgccgaagtgatatacaatcgcgtggacaatgaaaagccgtttgtaggcatgacgaacttcaaggggaactatgtaactaaagatgacgtaaagatcgctaagaactatctgactgcgattgaactccaacgtctgaatctgcttgtttccggtttcttggactttgccgagttccaagcattggaaatgaatcctatgacaatgaaagattggatagaggcactggatagccaaatcatagcacacaagcgtaaggttttgattggcaagggaaatatttcgcataaacaagcgattgagaaggcagaaaaggagtttgccatttatcgcaaacgcgaaatggaactgcttgaaagcgattttgataaagaaatcaaaagattaaagaacaagaatgacaatagttcaaactaattcactacctttgcccttggaaaccttcacgcaaccttgcgcagaacaacgcaagtcactggtggagcaaacggaggagattacggttgagttgcttttagaaagtaatgatattcagctatttggaaataaattacgattcctggtggcaccacagaatgagagagagttgcagcaatgcaactctttttttataacattgtgtatttgctgcaaaacggtcggcaggaatagcaccccggactatgccgccggacagacgattcgcccccgcaagcggttcccggccttccgctccggttcccggaaaaaatacgaagggaagaccggaatcggattaaatgattatttttgcatcggaacaaatcgccgcaagcatgaaaaaacgctggatcgtcttcaccgtattacttatcgtcgccctgaccgcattcctctacatccgcttcttcttcgtcttcggcgagggcgtcaaaagcggagagttgaactatgtcgtctataaagggctcgtcttcaaaacctacgaaggcaagctgatccaatccggcatacggtccaaaacggccggtacgatccaatcctacgaattcgaattttccgtcgaaaacgaagcgctcgcccgcaagctgatgctgctgggcggcaaaaacatcgaactccactacaaggagtatttcggagcgcttccctggcggggattctcgaaattcgtggtcgatagtatcgtcacaaaaccgatcggctccctgccgatcgactccgaaacggaacgataacaaactactccgaagtcgcagcaaacgactccggccatttttcccgaaatattttttcggtccgactacccgaatccgcagacagtacccatgttgcatcgtttccgacactccatcgcttcgttctcgcttccgacgcggctcaacaacccattccactacaccccgcatccgctgtgcgaattagcggcccgggagctgcgagcctacttgtgcgaacggaaagagtggaccgaagaactctctgcgggtaaaatgttcggggtgctggtcgtgaaggatccagccggaactgtgggctttctggccgcattttcaggtaatctggccggcagcaacagccacgaatactttgtcccgcccatctacgacatgttgcggcccggtgatttcttccgcaccgaagaggcctccatttcggacctgaaccggcaaatcgaaaccctcgaaacggccggccgctacagggaacttctccgaaccatagaagaaacggaaacagaagtcgcccgggaaatcgcagccgcaaaagcccggatgcgaatcgcaaaaaccgcccgagaagcccgacgcagggagcacccggacgaaaatacgcagacggctttagtccgggaaagccaatacgaaaaagcggagctgcaccggttgaaacagagttggaaaaatcggctcgcatcgcttcacgcgcaacgaacctccatcgcggaacgaatcgaatccctgcgctgcgagcgtaaggcccgttctgcggctcttcaggcaaaactatttcgcaagttccgtctgctcaacgccctcggagagatacgcgatctggcggaaatattcgcaccgactccgcagggtacacccccggccggtgcaggggagtgtgcggcccccaaactgctgcaatacgctttcgaacaccggcttacaccgctggcgatcgccgaattctggtggggagcctcgccgaagggcgaaatccgccgtcacggacactactatcccgcctgccgaggtaaatgcggcccgattctcgcccacatgcttcggggactcgacgtcgagcccgaacccgatcgcgcctgcccgcagtccgccccggagctcctgtacgaagaccgctggatagccgccgtcttcaaacctgccgggatgctctccgtccccggaaaatcggaagctccgtcggtcctcgactgggctcgggagcgttatcccgcagctacgggaccgctcgtcgtccaccgcctcgatatggacacctcgggtgtactgctgctcgccctgaccaaagaagcgcaccaggatctccaggcccaattcaaacaccggaccgtccgaaaacgctacatcgccctgctggaggggcggataaccccgccgaaaggacgtatcgaactacccctgcgaccggacctccacgaccgtccccgacaggcggtcgatcccctgcacggaaagccggcgatcacggagtacgaagtgttggaattccggaacggccgcacccgcatcgccttctacccgctgaccggccgcacgcaccagttgcgcgtccatgcggcccatccatcgggactcaatgctccgatcgcgggcgaccgactgtacggaacagccggccggcggttgcttctgcatgccgaacggatcgaattccgccatccggcgacaggcgatcggatagcgattgaaaaaccggcggatttctaatatcaataagaaaaagcggagacatcacgtgcccgcttttcccaccatttaacttttattaaccccaaccggaactatttcatccggtttatcatttgttacttgtaattcctgactgaagccacatgcggagcgattttcattgtcccggtacgcacgccctgggattcaggtgccacgaattcggaaacaggagccgcgcccgccttggtgaaggtatggctctggcgcaacagtacgcccggattctcgtccgcagcgacacctacggccagaatcgtatgctccgtatcccatttgcacaggtagagcttgccggtaggacaccacgtaccgccgaccaataacgtttcgataacctcgtcgtcggaaatcgcactggtcggatcgttcggatcctcggcgaccatcgttccgtaccactccttcgcattctcggccgcaaaagtcaccatgacataggcctgcccccggcaatccgcgtacttctcgttatcgagtgcatagaggtcgtcgccgttgaagtatttgtcgatagtcgccgttaccgtcgcatcgctcacggctttaggcagcgtcgtaataggatcggagatataaacatccgcttgaggcttgccgaactcgtcgatgctggccacccatacataatatttcgttcccggttcgagcaccttcgtatagctgtaacccgactggccgcacacccggttgttatcgagattgtcgatgtcctgccccacatactcggtcacgtaagccttcatatcggccttgtaccgctcgtaatcggcctcggagatcagatcgaacatataaggtaccgtatcgtccgaaggctcgatcgatatattcattccgcgcgaagtaaggtcagaatgggtcaccgtgaactggcacgccgccggatcgatattgggtttgctcgtgcggaacgggaatttctgaatcgaagtggtcggagcaccggctgcccaaccgaagatcagcacccaatattcggtatcgggcagataaactccttcgttcttgtattcatatacgcccggagcagccatgaaatcgagcatgaagctgtcctccgctatgattgtctggagcaaagcatcgtcgtcgagtccttggtagcggaacgccggacggatggccgaataatacggaaactcgagatcggacggagtaatcgtaaagtccgctccgttataataacaggtgaacttcacctcaaaagtagctcccgcagccagctccttggttttgaaagtcttactctcgattttggtattcacttcgcccgcagcatcgagccccgcagcaaaagccaggtaatcggtattcggatccagcccctcgaatgcatagttcgattcgccttgagatcccaactttttgagagcctcttcgaccgagccgtaattcttgaccgcttctgccatcatattcttcatatatacggccaaatcgcccgagtggtgctgatcgaggatctgcttggaaagaacgtcgtaatagtaaaccgcatcgttgtccgaaggcaccactttcatattcactccggtcggagtcggctcaccgagcgtaatttcaaatgtagttcctgccaggggggggg

SEQ ID NO: 10433 - DNA, 21265 bp, Unknown
  gut microbiota DNA sequence
cgtattctcctcggccgtcaccgtgaaatgagtgccgtccgacttttcgactttacaccatgtctgattcgattccacctgccatgtagcctggtcggtcttaacctcgatcgtcctggtaccgccgacagcttcgaaaaccaggtcggtcgaaggatcgatctgcaacaatgcagtcgcattgtcgtcatcgctacaacttgtcgtaaaccccaacagacagcataatatcccaaaataaatttttttcatattttagtgcctaaaatttaactatataagagaaatatattataaagtaatttttcctttctaaaacaagattaaaaaattattctgtaaaagacaaattttgttcccgttttgaaattacaataacgacaaaaagaacaaaaaatatccgatttaatctgttttcggtcaaaacctttcttcgatcaacctgtctgccgattcccatacctattttataattgaatcccaatcgattcgacagaaaagtacggaacatcctccaccgtgaatgcaatttagtacctttgtggcgtaaaattcgaatcaatatattttaatcatagaatccgctccgatttttccacggccggagaggtataaaacgaaatcgcaatgctgcctctcatcacactacgactgcaaaaccagttattggttcggccgcctttcgactctccgcaacaagtcgtagagtggatgggagccatacaagcccaggactaccggatggccaagtgggccgtcggctgccgcaccgcatcgaccgatgccacacagatcgaagccgccctgaacaggggcgacatcctgcgcacgcacctgttgcgcccgacgtggcatttcgtctcctcgaaagacctgcgctggatgctctccctcaccgccgaccgtatccgtaccgccaacgaatctttcgcccggggcaccgacgccgaatttacccccaggctcctgtcgcgttccttggagctgctgcaaaagacgctggaagggaacaaacaccggacgaaagaggaaatcggagaagcgctgaatcagcggggcattccgctctcgcaatatgcgctgcggcatctgctgatgcgggccgaaacggacggcatcgtctgcagcggcgccgacaagaagggcaccgcgacctacgcccttctcgacgaacgggctccgcacggcgaagaaccttcccgtgaagaggcgttggcccggctggcccgaatctatttccgcagccactcccccgccacgctcgccgatttcacctggtggtcgggactcaccgcgaccgaagcccgccgcgccgtggcgagcatcgccgaagaactcacgaccgaacatttcggcgacagggaatttttcgtattccgcaatgctgcggcagccgctccgtgcgacacgacgcatctgctgcccgcctacgaccaatacctgatcggctacaaggaccgttcgggcgtccttgcaaaagagcacacctccaaagccttcaactcctacggaattttccaaccggtcatcctttgcgacggacagatcgtcggcaattggaaacgaaccgcaggacgagggaacgtcaccatacaaacgaccttatgggaagataccgcccccgagtcgctggatgccgccgtcgcgcggtaccggttgttcatcggcggaacaaagtcggaaaacagtccggaggctttgtgaaataatgattacttttgcagggaacatcacgcaagattcctccgaaaacaatgaaagaaaactggaaaccgggaacgctgatctacccgctaccggccgtactggtcagttgcggcgccacccccgacgaatataacctgctgaccgtcgcctggacgggtacggtctgcaccaatcccccgatgtgctacatctcggtccgcccggagcggcactcctacgacatcatccgccgcacgggtgaattcgtcatcaacctcaccaccgaagagctggcacgcgctacggactggtgcggcgtacgttccggccgcgaccacgacaaatttcgggaaacgggacttactccggttccggcgaccgtcgtcaaggctcccgtcgtagccgaagctcccctgtcgatcgaatgccgcgtacgacagatcctaccgttaggatcgcacgacctgtttctggccgaagtggtgaatatccaggccgacagccgctacatcgactccgaaacgggtaaactggagttgcagaaagcccgccccatcgtctattcgcacggcgaatacttcgcactgggccgtatgctgggctacttcggctggtcggtccgccgcaaaaagagaatcaaacgggagcgacaacccgacaaaatgaaaaaatagcccctgcggacggaaaatttccgtccgcttcctatttcggtacagccggaaacgcctatcttttttccgacaaggctgcggcccactccggctcgcggaatccgaccaaaatcttgtcggaagcgatcagcaaaggccgtttcaccaacataccgtcggtcgaaagcacgcggatcagctcttcgcgcggagccgtgcggaccttttctttcaagttgagcgccttataacgcagaccgctggtattgaaaaatctattgaccgcaagaccgctgcgatcgatccactcttcgagctccgcttcggagggattctgctgcacgatatcgcgcacttcgacttcgatcccgcgctcctgcaaccatttaagggctttctgacaagtgctgcaacggggatagcaaataaacaagggtttcattttcatcgtatttcgaaatacaaatatagtgaaaaccgagggctgaatcaaatttgcacgaaccgacgctcgaagcatgcgccgaggacgctcgtgaactctgccatgcaaggatgagaaaactgaaaattaagtttggcctaccgcttgtcttccattatctttgcagaagataggatacgcctcggaaaactgagagtaagctcccgttttcttctcgactttcactatctttgcaaaagatcggaagcggttcgacaatcttcgcgtgcaagtcccgcacgattgctctcacctttccctgtcttggaaaaacggaaccgaagaatttatgctgcaacaaaccatccggagttggatcgaccaactgctcgtttacatcggaatctctgcggacagcgcccgcggcatcgaccaatgggtcatcctggccatcatcgtcgccatcggcgtagggctggacttcctgatccgcctgctgttgttgcaggtcgtgcgacgcgtcgtcaagcagaccaaagtcacgtgggacgacatcatcttcgacgacaaagtcctgcggcggctgtgccacatcgtcaccccgatcctggtggtggtgatgctgcccatcgcctttcccgatcaaaacggcctcgtcgtcctgatcacgcggctggtacagatagcgatcgtcatcgccgtcctgcgcttcgtcaattccctgctggaagccatatttcaactgatgggccgccgggaggagtggaaaggcaagccgctgaagggcttgatgcagaccggacaggtcatcgccttcctggtcgccgtcatcctcgtcttctcgattcttctcgaccgctctccggcgatgttcctcaccggtctgggcgcttcggccgcgatcttcatgctggtcttccgcgacagcatcctgggtttcgtatcgggcatccaactgtcggccaacaacatgctcaaagtcggcgactggatcagcatgcccaagtacggcgccgacggcacggtggaggaggtcacgctcaacacggtcaaagtccgcaactgggacaacacgatcgtcaccctcccgccctacctgctggtgagcgactcgttccaaaactgggaaggaatgcgttcctcgggagggcgccgcgtcaagcgctcgatcaatatcgacatgaccagcatccgtttctgcacacccgaaatgctggagcgatacaagcgcatcgacctgctgaaagattacatcgcccggacccagcagcgggtcgaggagtataaccggcaacacgacatcccctccggtgaagacaaaatcaacggactgcaccaaaccaacatcggagtcttccgaaactacctgaacctctatctcaggcagaacgaacgggtcaatcaaaacatgatggtactcgtccggcaactgcagcccaccgaacaaggcctcccgatggagctttacttcttcaccgacacggtggactgggtcccgtacgaaggcattcaggccgacgtattcgatcacgtgctggccgtcatccccgaattcgacctgcgcgttttccaaaacccttcgggcaacgacctgcggacgctgaccggaaaaaccgataccaaccattaagacgctatgaaaaaactgctgctcgccctcttcctcgttttcaccctgcccctgtcggcagaggaacagcctgccgtaccgacagccgacgaacaggccgccgctctgatcaacgcccaggagtggttccggctcgaagcatgctacccggagatccgcgacgaactgtcgcccttcgtccggctgctctgcgaagcctctctgggcagtcatttcaaccggctgccggagagctgcaatgccatcgggacgctgctcaacgactaccaacaggaactcttcgccgatcccgaaggctcgatgctcggctggctcctctccatgcttatcggcaacctgcaggagctgggcgcctacgaacaggcggccgacctgctcacccagttcgctgccggacagagcgaggaagagagggcttcgaccctggcgacccaacggtggttccaaaccatggcccgacatccgcgcacgtcgctcacgaaacccgacggcgaaatccggctgccgctgaccgtcggaagcgaaacggtcaaaagcccgctggacggcacggacaaaaaggtccataacttctataccgacataacgatcggcggccgcaccgagcgcttcatcttcgacacgggttgcagcggcgccagcttcgtttcggcggaattcgccaagcgccacgacctcgaaatcatctgcgattcgatttccgtgagcggtatcggcggcaacggattcgtgaaattcgccacgaccgactccatgcagatcggaccggtcacgatccgccacccctacttcatggtcttcgacaacgacgaggcttcggaccaaatcggccatatcgaagccgtcctcggcaccgacttcatgcgtctggccggccagatcgagcttcgccccaaagagggtttctttctcctgcccgccactccggaaccgacccctgcaagcgggcgaaacctgatgcacgacacctcctcgggacaatatattctcaacacgctcgtcgccggaaaagacaccgtcccgatggtcttcgacacgggcaactcccgcacgggactttcgccgaactactacaccctgcaccgcgaagagatcgaccgcagcgggaaaaagcgggaaacggccgcaggaggtttcggcggaattttgcgaggtacgggttacgacctgaagaatataaccttcacgatcggcaacggctcccgcaccctgaaaaaggtgaccgtcacagctgacttcggccccgcatccgaacaaccctatttcggttcgctcggaatggaccttttcgaaaagttcgaccgcatcgtcttcgacttcggccggatgttcgttacggcggaataaatccaacgctttttcgtcccgcaccctgcacgaccgaactacccgtcccttcctaaaaatttttcgcaagacgatgaacgcaacgacaaccgtccttcagacagacagtctgctcttccgcccggcacttcccgacgatctggagcgtatctgcacgatcatccgccaggcccaggcgcagatgcgcctgcggggaagtcgccaatggcagaacggctacccggcggcggcacatataacggacgacatcgaccgcggatacggccacgtactatgtactcacacaggactcgtcgtcgcttacggggctgtcgtcttcgacggcgaaccggcctatgccgaaatcgacggcacgtggctcgaccaagccccatacgtcgtcctgcaccgtctggccgtcgcacaggaggtcaaaggacagggcatagcgaccgaattcatgcgccgcaccatgacattggcccgggagcgcggcacaggcagcttccggatagacaccaacttcgacaaccgttgcatgctccgcctgctggccaaattcggcttcgtccgctgcggagaaatacattacgccggagatcctcgcatcgcattccagaaaatcctctgaccggcacatcctgccccgcaaaacgtcgaaccggtcgttttctcccacaaatatccggctgcttccagacacccgaaaatgccgacggacggtccatccgaccgtatttattcgtacctttgcctccgctttaggtacttcgcccgacaaaatgccgataaatttaccttgcacgcggctttttccgcacctttgcaagaggattcttttacgatgaaagcaggtctgcgacaaattccgatacagggtgcagcaccccgtctggccggcaacagggagtgggacggccttcccatgccgacccgattctgggccatcctcgccgtagctttcggcgtatcgctctcggtcatagacggagccatcgccaacgtcgctctgccgaccatggcccgtatgctgggcatctcgtcggccaattcgatctggatcgtcaatgcctatcagttagccatcgtggtttccctgctctcgttttcagcattgggcgacgtgatcggctaccgtaaaatctacatcgggggactgggtatcttcatcgtcgcctcactgggctgcacgttgtccgactctctcgccacgctggtcacggcccgcgtctgccagggattcggggcggcagccatcacgagcgtcaataccacgctgatccgcctgatatacccccgccggcacctgggacgcggaatgggcgtgaatgctacggtcgtagccgtctcctcggtggccggccccacattggcttcgggcattctctccatcgccacctggccctggcttttcgctatcaacatcccgatcggactcatcgcgtgtttgttgagctaccgattcctgcctaaaaatccggtacgcatccggggccgccacttcgactggcgggacgggttgatgaacgccctcaccttcggattgctgatcgcttcgatcgaaggttactcgcacggcctcaaacccagctatatcggaataagcgtcattctgctggtcgtcatcggcacactgttcgtgcgcagccagctccacaaaccctatccgatcctccccttcgacctgctgcgcatcccgatcttctcggtttcggtcatcacctcgatctgctcgttcatcgcccagatgctcgctatggtcgcgcttcccttctacctgcaaaagacattcggatatacagaagtacatacgggcctgatcctcactgcctggcccgctatcattatggtcgtggctccgatcgccggcttgctggtcgaacggatccacgcaggagccatgggcggcgtaggactgcttatcatggcggcgggcgtggttctgctggcttttctgcccgagcaaccccacgtcgccgacatcgtctggcgactcctgctctgcggcctcggattcggcctgttccaatctcccaacaacagcatcctgatcgcctccgcaccgcccgagcgaagcggaagcgccagcggtatgctggcaacagcccggctcacgggacagacgaccggagcggctctggtagccctgctgttccatatcgacccggaaaacggctgccatatcgccctgttgcttgccggagggtttgccctggccggttccgtcgtcagcttctcacggctatcgctcgccctgccgcagggccttacccgaagcaagggaaaagcctgaatcccgcctccgacacactgttttgcggatcctcccctcccttttccctatacccaaaagagagaaaagacaacgccaccggcatcgctcgtgcccggcaacaaaatccggaagtgtgctacgaacgaacacataaatatcaccgctttcccgaacaccccgggacacgcaccacattgacaaaaatatcccgaccgataaagagcccacttatcaccaagaaaaaacaggcatattgcattattccggattatttgcatcagactgcaaggtccgaaaatcctcctgcgacagtatatccggaatcccgaatccatttccaaaccgcgtcagaaaagagaagctgaacctctcaacgaaaaaggagaatccataccaacccattcattcaatatgatcgcaaaataaaaaggatcgacccgtaacgggtcgatccttcacatatcttgtcagatcaaagatatctattacaaatatccctggttctggctaccgaaattcgggttctgcgtcatctcgctattcggaatcggccatacgaacttcgggctactagcagtctgtttcatagtctgcaaataagacacattgtcaaccaaaggagcaagactcgtattgacattacgctggaaaccctgcccccaacgcttcaggtcgtaaagacgcgtaccctcggcaagcatctcgcggccgcgctcttcctgaatagcattgaaaagtccagatatcttcgtgccgtcaagcaacgtaacatccttctccacatcgctcatagcaagagccgccagaccgcgggccgtacgcaactggttcagcggatccaaacctttagcagggtccaaacgatactgcgcctcggcatcgaccagatacatttgggagatacggaacatcttaggtctgttgcgataaaccaacgtagtcgtattggtctggaaattcttgttaccgcggaacttaccaataagaactccgacccccttatttccactgatcgtaacattggcattcttaacaaggaaaatatccgtacggaaatcggcatctttgaacaacttgacaatatgctgctccggaatataggtaggagcatagaagtatacccccgaattcggctcccagctgctgttcagatagctaccgaacgagttcacagtcgtcatggtcgtacgaagtacctccagttgcagaatattctcggtagaagtatcctcgcgccacattctttcgagaccttcagccgttgtcaccaaaggataagttccataaagagactgggcatactggctggcctccgtgtactggtggagatgcagtgccagctcggcgcggaatgcggtaatggcatctttggtcaggtaaatctgatccgtcggagtaccctgagcagtcacggttttttcagcttctacgaggtctgcctctacgttctcatacaactttgccaacgtaccgcgagccagtttcgcttccggctcccactctttcggatagggaagacccaactgatcagcggccttgtccggatcatagtcctcacagaaaagcagcgcggcacggtgcattacataggcgcggaagaaatacatctcgcctttgtaaacatccactttcttttgctcgtcgggagtaagatattcataagctgcatccatatgacggatcgcatagttgatatgcatcatcgtcgtataataactggaccagaacgacgttacatcctgatcagtgggatacaaacgccagttgaaagaatagataccctgattaccgctaccgatgcaaacattcagaacatccacataaaggtccggtgtcgagtagaaaccaccggaaaggagcgctttcaggtccacataaacgtaacctctcacaccctcgcaatattccatggtgtacgcatcctcgggccggatcgccgtttcggggtccatatccaagtcgcacgacgtcacagaaaagagggtaacgaatgccaaaatcgaatttattatctttttcatagtctaagccttgtatttatttttttataatgaacactgaaaattagaacttaaactcaaggccgaaagtgaactcgcgcgtattcggataagtatcgacatcgacacccttctctgcagcctcaggatccaggccgttatagcccgtcacagtccagaggttacggccaccgacccaaaccttaaggcccttgatgaacttcgtcttctccataatatggctcgggagcgtataagccaactggatatacttcagacgcaggaacgaagccttctcaagcatacggctgtcaaaattgatcgcctggtccagacggggatatctcgcctggtcgccttcctgctgccaatagtcccatgccaggtcgcactggttgaactgggaagagagtcccatatcggcattagcaacgaaatacatcgtattgttgagcgcgtagttgccgtgaacccaagagaagtctgccgtcaggctgagtcccttccatgcggctgtcacaccgaaaccgccggtataaggcgcataaagcgaagtacccagattcaccaaagcagcctggttgaaattggaagtaatgccgccgtctgccgtagtccaggtatccagaccggtttcaggatcgacaccgcgccactcctgcattgtccaagtcgggaacggatcacctacgctgtaagcctgcagaccgttgcccatataaacgaattcaagacccggttcccaaagatcggtcagctggttcttgttgtagttgaaagtcgcgtggaaattcacgaaccagtctttcgaagcgtaaatatcgtagttcaacgaaaggtcgataccggagttgcgcataccgccgacgttaccggcacgaccgctgtaaccacctgacggagccaacggaatggacatcagcatatcgttggtttgacggcgatagtattcaatcgaaagagagagttttttccacaactcaatattggcacccacggtcagtgtattctggctttcccacatcaggtcggggttaccgataccggataccatccaagtcgtgtaaccgccgtaagccgaacccgcagccatatattgacggtggttgtagtcaccgataccggagttaccctgtgtaccgtaagacactttcagactcaaatcactgatagtctgattgtcgcgcaggaacgtctcattcttgatattccacataccgccgacagcccagaaaagcgcattgcggttgttctcaccgaaacgcgagcttgcgtcgttacgcaacaaaccgctgatgaaataacgctctgcgaagttatattcaagacggccaaatacagaattcgaagctgactgtgcgatgctgtaggtcggcagaccgccggaaacttccgtacccatcgcgatattcaggaagcgcgaagaggtgataccgatcgaagctacagagaagctgttgttattccgataaagagtctcctcaccgagcagcgccgtaaagttatgaacctcattccaagtatgcttgtactcggcggtattggtccaagtccattcatagaaacgctggaacagttcactggcactaccagtaccgaacttacccgaaggagtaggagtttcagggctggacgcaccgtgtgaacgccagtcaaaagcatccacagcaagagaggagcggatcgtcagccccttcaccggagtcagttcaatgaaagccataccattcatcgtaatacgattctgccagcgaggcatatagtctgcagtcatcaacgggttgatggcttgggtagcatcaaagaaattgagcatctgaccgttatcgtcatagagaggctggtaaggaggcgtaatcaacgatgccatcaccgggttcgatacatacagactgcccatcgattcattcgtatcagcaaccgaactgtgctgataacccaaaccgaggttcaagcccaaacgcagccagttgttagccctggtatcgatattcgtacggaagttgtaacgatccaactccgaaccgggcagaataccggtcttattggcatagttacccgagaaatagtaagaggtcttcgccgagccgcccgaaaccgacagatcgacctgatacatcggcgcatttctctcaagaatctcgttccaccacttgtagtcattcataggattatagttctcatccatgaacttagccagaccgaaattacggataaaatattgacggccggacgcaatcttatcaggagtcgtcaaggcatcgcccgacaaacgaacggcaacagccgcaccgatataatccaacatctcgttcgcactcatcatattcaattcaggcgctacggcactcgacatggagtattgtcccgtaagcgtcacatcgacactctcctggttgcgacgaccggttttggtctgcacatagataacaccgttggcagcacgcgaaccgtagatcgaagtcgccgaagcgtccttgaggacgttcaccgaagcgatatcgttctggttgatcgtctgcagcgtcgaagcctgaatcggcgcaccgtccaacagaatcagcggcgacgtatcggcacccatagaacccagaccatgaatacggatcgaagaagtcgaagtcaactcaccgttaccggtcataatctgaagaccggctacctgaccctgcaaagcgtccacgacgttggtgctgggacggttttcgatcttctcggacttcacctgatctacagaaccaatcaccgaaccgatcttcttacccgtaccataaccgatcaccacgacatcctcgatgcccgtagcctcttccccgagagtcacgtcgatatgcgtcttaccggctacgctcaccttctgggtttcgtaaccgataaaagagatcgagagcgtcgcattggcgggaaccgtcaatgtaaactgcccgtctcctccggtcgtcgtaccggcagacgtaccctctgccacaaccgtagcaccgatgataggttctcccttctcatcggtaaccgtacccgtcacctgcttgttttgcgcaagagccaacgaacagaaactcagtacagtaattaacgatagtacaattttcttaatcataagcgttaatttaaaaattgagtttgaaataaaaagttccgagcaaatatagaaattaattgcttcataagcaaataaccgtattcaaaataatcaaaaaaagcacgtatattcggatttatctcctttcaaatcccatattgaccaatttaagatctgaccggcgcggaaaagccatttgcccgacaaagcagcggaaaaataccggttttacaccccgctcttattcgacaccttataatatataaaattcggcagcaatggatcgaaacgatttttttcgtatcttcgcgccgaatcaaaacctaaacaatttatggcttttacagaaatattacccggaatacactacgtcggcgtcaatgaccgcaccacgacccgtttcgaatcgctgtggtcgcttccttacggcgtttcctacaactcatacctggtcatcgacgaaaaagtcgctctgatcgacacggtcgaagtatcgttcggcgaacagttcatcgacaatatccgcgcgatcctgaaagaccggccgatcgattacctggtggtcgatcacatggagccggaccactcctcttcgatcaaaaccctgcgcctgctctaccccgagatgcagatcgtgggcaatgccaaaacccttcagatgctcgacggatattacggcatccataccctcacccgggaagtcaaagagggcgaaagcatttcgctcggccaaaaaaacctctcgttctatatggcgccgatggttcactggcccgaagtgatggtcacctattgccccgaacacaaggtactcttctcggcggatgcgttcggcacgttcggtgccctgaacggcggtatcctggacagccagctttcgctggaccatttctgggacgagatgcgccgctactacgcctgcatcgtgggcaaatacggcgcccccgtacagaaagccctccaaaaactgagcggccttcccatcgaaacgatctgctcgacgcacggccccgtatggcagcaggaaatcgggcgcgtaataggtatctacgatcagttgagtcgctacgaaggcgaaccgggtgtggtgatcgcctatggttcgatgtatggcaatacggcccagatggccgagaaaatcgctcgggagctgaccgtacagggtgtaaaaaacatcatcgtttacaacctttcgtatgccgacatttcgaatgtcatccgcgacattttcaaatacgacacgctgatcgtgggttctccgacctacaacggcgaactcttccccgaagtcgggtccctgctgcaaaaaatcagcgaacgttgcattccctgccggaaattcgcctatttcggctcctatacctgggctggagcagcggtacgcctgctgggagaattcgcccagaaaatgaaatgggaggccatctgccagccgacagaaatgaaacagggatacgacgatcagggggcacaatgctgcacggcacttgccaaagccattgccgaaaaaatccggtagaaaatcccgattcgtccgcaataaacagggacggtgccgtcattggcaccgtccctgtttagtttctatctctttctgagtcttgcgaccgcggcacaagcccctatttcatcacctttacgaccgcctttttgatccgtccccgaccgatcatcggagcatgggcgtcctcgggaccgaaaacgacgaactgtccgggcctgatcccgacgaaaagctgcggccggtctgcaaaaaaccgaatgtcttcttccgcatcgaaaggcccccgggggacacggcactcccgacgctcccgccaacccatcgtttcgacttcgccggcaatcaatacctgtacgtcgatatatttatcgtgcacctccagcgaagcctcctcttcccgtttgagctccccttctgtcactttcataaaaatttcagctccttcgatctcgtaccgccccggctcaagagtattcaaatcggccgcagcgaggtattccaacgcccgcttcaaccgggaatcggccccgcaataaaaagcccagtttctcaatgaatccaaaatcataacaacaactatcttttgaccggcctcaaccggaccacgaccggatagtgatccgacaaatccacatcgtacaaaacctggtaatcgagacactccaaatcttcggaatagaggacgtaatcgatccgcaaaacatccatgaatccgcgaaaggtataggaataccccttaccgctcgcccggaaagcatcgtcgaggtcttgtgccatcacccgataggtataggacataggcgtatcgttaaagtcaccgcaaacgatcttacagcccggagtcgcagcgatcgcccgagcgatcgtgtccgcctgtgccgcccgcaacatgctgttgtcgcggaacctgcggaagatattcttgattttcgctccgccagcggtatccgtaagaaactgatgctccgaaagatacttatcgtcatgcacggtaattgcggtcgaatgcaagtggttgttaaagatccgaatcgtatcgtcccccaccagcagatccacccataccgactgcccgtcctgcttcataggacccaatatcgaatgagattttccgaggatccggtatttggtataaagcgccagcggaaatacaggatcccgtctgttcccctccataaccaccgtacgatcgtaatcggataacagcgaatccaactcttcggccttgctcgaggtacggttgaactcctgtaagcagacaatatcgggattcacacggcggatcacctccgtcaccccgtcgaaactccactgtccccggtcgttataaaaactgcgaacattgaaagtcagcagggtgatcgccccccggccgaagctcgtctcttcaccgtaatgacggcgcaactccggcttcaggaagagcggcaccttgaaaaggcccgccagcaacagtacgacaagcggaagggcaatgcgccaccgccaccgaatgatccagtacaacgtcaccagcagggtgattacataaaccgccggagcgaccaaccccagcaccggaaaaatccaggttcgccccgggtgcacgaacggtgccagcagcgttacgatcatggccgcacccgtcgcgaccgaaaggatcagcatcaccccgttgaacacgctgcccggcaaacttttccgacgtttccgggaagcaccgtgtctgtaatcgtcgtaatactccctgctcatcgatcaatagcggatcacccctttgtgtttccaataatagagcagcaggaatccccacaacataccgccgacatgggcgaagtgggcgacaccgtccatccggcccgaaatgccgaagaaaagttcgatcacgccatacacgaccacgaaccacttggctttcatcggaatcggcggaatgagcagcatgatgaccgcattggggtgcattacgccgaaagcaagcagcagaccgaacacggcacccgaagctccgaccgtcggcaccatcagggccatcataccgacattgccatagcggtattccagccagccgaccaacagttgcaacaccccggcaccgacgccgcacaccatgtagtaggtcagaaagcgcttcgaccccaactcgtattcgagcgtacgaccgaacatccacaaggcgaacatattgaaaaacaagtgggaaaatccaccgtgcagaaacatataagtcaccaactggtaggaatggaacaacggactctcgacgttgaaaagcgccagcgccccgacgattctgttcccgacaggcagcagctcggtcgcaagaagcatcaacgcattgatgataatcaggttcagcactacgggaggcgtcgaagaaaaatagcggctattattcatagacaaagtaagatttagatgcaaatgtaacgattatatcccttccggcaacctctcaaccaagtttattgcggatttcttccagtgtgatttcggccatgaccgccttgcccgaaggcgtgaagctgacattcccgccttcgcagagctgccccagcagagattcggcctcctccgtcgaaatcgtacgggacatgctgcgggctccgctgcaagccatgacagcggcgatcttctcgcgccgcaatgcctgaacgtccacaggcacggcgaactcctgcagcaattcgtaaatcaaccggtcgatcgtatcgtgcggaatgtcggccggaacgccctttacctcgacggctccgccgccgcaaaactccaggtcgaaacccaacgccgcgaaatcgaccgcattctcctcgagcaacgcatattcgttttccgaaaacgcgagacgctccgggaaaaggagctgctggctgaccgacgatccgttggtcaggagcagcaggtaattgtcgtacaacacccgttcccgcgcccggcgcaggtccacgaccacccacttgccgccgtacagcgccgaggcatacccgttgccgagcaccgtcacaccgctgaaacaagccgcaggatcgtccatcagccgttgttgcaccggttccccggcagaaggaatgaactccatttcggtcggagcgaacccggcagaagggatcatctcgtcgtatcgatcctccgcccccacaccctttccggcaggcatctccccgtcgtaaggagcgtcgaagcccgaaaaatccacgtcgggcatccgttccgacacatcggaagcgtaatccgcacgaaaagggttgtaactctcgttcgacatcgccttgggttcacggtaaacggcccctttggtcagcaccggaatctcgacgctgtccgtctgatcgaaatccatgagcggcaccgctcccgtcttggcgagagtttcccgcacggcagcgttgatgatctgccacacggcctcttcgtcagcgaacttgacttcggtcttctggggatggacattgacgtcgatccgcgaagggtcgatcgtcaggtagagaaaataggagggcgaacaggcatcgggaatcagcttctcgtaagccttcaggatcgccttgaaaaaatagggggagcggaaataacgcccgttcacgaaaagatactgttccgaactattgctcttcttggcggcagcgggacggcccacgaagcccgtcacccgcacgatcgacgtgtcggcatcgacttccagcaggttctgtttgatatgacgccccaccacatcgacgatccgcgaagccagcgaagcagcgggcaaccgatagagcggctgatcgttcatcagcaattcgaaccccacctgcggattgcagagcgcgacccgctgaaactcggacttgatctgccccgtggaagtcgtactcttttcgaggaacttacggcgggcaggcacgttgtagaacagattgcgcacataaaactgcgaccccacaggacaagccgcgagggtctgcgaaacgaactcaccgccattgaccgtcgtgagcgtacccacttcatcctccgcctggcgcgtacgcagctccacctgcgacacggcggcgatcgacgcgagcgcctcgccccggaagccgaacgtcttgagcgcataaatatcgtccagcgaagagatcttgctggtagcatgccggtcgaaagccatgcgggcgtcgatgggcgacatgccgcaaccgtcgtccacgatctgaatcagctccttgccgccgtctcggaaattgaccttcacgctgcgggctccggcatcgatcgcgttctccatcatctccttcaccaccgacgacggacggttcaccacctcaccggcggcaatctggttcgcaacgacctcgggcagtaatttgatacgatcagccattactcctcataatcgttagggacgaccgtaatcggagtgtagggattgaactcctcggtctgcggggttttgggtttctgcatgtcggaaatgaacgcgaccacacgcggatagccgaacaccaagaacaaaagcaccagcacgaccagtacgaccatcatccacatacggccggagcctcgcgacatctcttcgcggcggcgggctgcccgggcctggctttgcgtacggatatactgtcccggcttatactctttgcccgcatcctcggcccgttcgccgcgcagctcggcacgacgccggtcgcgctcctctttctcgggatcgtagtagcgcggcaggtagttgaatttattggcgtgtttcttaaacggcgtaaaaccggacataaaattctgttttttaaggtgaagacagcagcggcccgggcgaggctccgaacagacgaattgcatcggcccgcttcatcgtcatccgcaaaaaatacggggcccgcaacacgtcgtgttacgcccgatcggaatgcagccgtccaaaccggttatttcttcggtaaagatacgaaaaactcccggaataaccagccatgtcactccgggagctctcacttttcgaccggaaattaccggaagaaactcttcatcctgtcgaaaatgttgtgtcctttggacgcctcggcccgctggaaggaaggctgtgcggccagttgctccaccaaccgcttctcctcggcattgagcttggcggggaccgtaacatccaccacgaccagtatatcgccgcgtccgtaaccgttcacgtcgggcaagcccttgccggccagccgcagcaccttgcccgcaggcgtacccggtgcgatcttgatccgcgcccggccatcgaccgtcggaacctcgaccgaaccgccgagcaaagccgtcggaaccgtaatattcaaattatggatcaggtcgttgccatcgcgtaccagttccggattgtgctcctcctcgatcaccacctgcaaatcaccgttcacaccgccgtgacgagccgcatttcccttgcccgacaccgtcaataccattccatcgcccacaccggccggaatccgaatctccaccacctcggagcctttgatcgtcccttcgcccttgcactcgtcgcagggattggtaatcaccttgcccgtaccgccgcacgtgggacacacgctctgggtctgcatccgaccgaaaaaggtattttcgacacgattcacataccccgctccgttgcaggtcgaacaagtcgaataggagttggcgtccttggctcccgtacctccgcatttaggacaggcgatctgcttgttgatcttgagcttcttgaccgttccggcagcgatctccgccagggagagcttcacccgcacacggatatccgtaccacggcttacgcgacggccgccgctcgaagaggtccgataacttccgccgctgaaatggcccccgaaaatatcgccgaactgcgagaagatgtcctccatcgagaacccgccgccgaatccgccgaacccgccgccggctccggccgcaccgctcattccggcatggccgaactgatcgtatctggctcgcttttcgggattggagagcacatcgtacgcctcggccgcctccttgaacttctcctcggcctccttatcccccggattcttgtccgggtgatacttgatagccgcctttcggtaagctttctttatctcatccgcgttggcgttcttcgccacgccaagcacttcgtagtaatctctcttttctgccatagtattcgaatgccggacttcgattccggctcaatattctttttcaatagtcgtattttcacactctacgctcggcacaatagtgcgcgacggagcaactctgcgcccgttaaacgaaaacgcccgttactctccgacgaccactttcgcaaaacgcaacaccttgtcgcccatcttgtaaccgggctgtaccacatcgacgatcttgcccttcttctccttcccggcatcgaaacgggccaccgcctcgtggtgatcggtatccaactccagtccgagcgcctcgatctccttcacattctgtttcttgagcgtttcccggaacttctgtgcgatcaatttcacaccctcacgaagcgcctccaggtcattgctcttctcgatcgcttccaacgcccgctgcaaatcgtccatcagaggcaggaaattcttcacgcattcggcgcttccgctctgcaccagctccatcttctcccgcagcgtgcgcttgcggaaattatcgaactcggcctgcaaacgcaggtatttgtcctgccactccgcaacctccgccgcgaaatcgtgctccgggacctggt

SEQ ID NO: 10434 - DNA, 1707 bp, Unknown
  gut microbiota DNA sequence
tagggatagtcatttaattccttcaatttgagttaaccagcagactttcccttatttttccgatcatactcatcgttttttatatcatcggctctgtttttagggccgattttttcattttcagtcacgtctggagctaccactcccgtaaagtcgtgttccatgcgtggaacatcaggctgcaagagctacttggactgactctcgtcttgcaaggtttaccacatttgctgtgtggataccgaagaagatcagcatgatctctgtcgattttatccttgcagcaatctttcgcagaccataatgctccttctgagttccaaaagagccttccattgctgtagctcgaacgcgtgcaagttctcgtttagtagcgttcttaacttcattctttccagttcgtcctttctgagtgaatgaggtttcaataccattctccttgcagaaagttctgttgtcattacccgagtaaccctggtcgccacctatcttttttacatcaacgcctgtaagtttcttcgacaatgacacacagtgcttaagtctcgttccttcattgaatgcattgaatgatagcttctcaataaacgatattccgtcaatcaatatgttgttgcacttcgctccaaattcgactatcttggtctccttgcctctgactatcggtctgatgtaaggcttgctgagacttacaatacggttagggatactctcacgagagtcaccactcttgaagtggttcttctgctgacgatatacccttgtgacagtctcaagcatatccaactgcttgtaattcaatagttcttcatccggatggacgcgcatctgtctgcggatttctcccagtatcttgcccagcaatgcaagcagtctcattatcatctttctggtctgcttatgagtatgtttgcgctgcttcctatatgccaggttcgccttgtcgatatcattgtactttgttctcattcgatgctcaccaagctgagaactgataccgcacatcatcttgtatgctctatctacacattcccaaagcaacttcacgtcagttggaaagcgcatcaggctttcatagcagctggcatctgtatagacagtatcaaggttcttcatgtacggcttccatgcatctgcaagtaccttctgctgctcctgaatcttcagtttcttggacaattctaccagaatgctgtcgatcagcttgtagtttgtcaactggttctcaggactgatcctgatcccgcagaagatctgataatggatgtttccattcaacgcatccatcagcttcggagctgacaatcctgtatacatcttcaagaacgccaacgccaccttgccctcaggtgtgaagaaggactttcgtcctcgcttcactctcaaactcttcggcttctcttctactaaaccgaacgatatcgccatctctcgaagaggaagaagtgacttgatccgtccaagttccgatgttttgaagctctcttcgtatcgctgataaaaatcaaactctgtaaatgcaatctcttgctgaatgtcagataaatttcgtacttttgccatgagttatttttgctcatttcctccgaaagtcacttttccagggtgttcggaggaatttttaattcctgtagctaagatatgaaatttttatcacattgacaatcaatttgttataattttaagcctatttcgcgactgtcccta

SEQ ID NO: 10435 - DNA, 2900 bp, Unknown
  gut microbiota DNA sequence
acttgcatgatgattcggatttttcagtggttgttttcttgttgttcttcttctttctctttttccggacgggcgatcagccggcggtcgtaatagacatggttgccgttcccgtcgtaatactgccgtccgtcgtccgcctcttccggggggggctgcgtttacccggccggaaatacaaggcggccagcgccgcgatcaggagcggcatggctccggcctgcatgtagaaccatttcatacgctacgccttgatgcctttggagttgtttttcttgttactgcggtaatttctcctttgcgccggagtggcctcctgctgtccctgcttgagcggctctttcacacctttgaccgcttcgacggtcttgccctcggaattgacggcgacctgggtacggctttcaacggcgggtttgacctccgccccctgccgtttcgcacggtcgggattccagcggaagaagtccatcttgttacgctcgaagttgggcttgacccaggcgttgaacggctcaccctgcccgtccttgaccatgcccttgatgtagaaagccttgacatccgcccgcttggaggggtcgttcaccgcttccgtccactggtcataagcctctttgggcacggaggctttgaggattgtccggtgaatcgtgagcgtgggctgtcgttcggaggccgtagtttcctgccgtccgtttttctcggcggccttctggcggtaaatctccttgttctcctgggcgtagcggttgcgatccaaaccgtcgtaggtaaaggaatagttacgttcggccgcgtcgatttggatataggcatcccgcttataacccgcgcgggtggtatatccttcgagcaacaccttgccgccgccgtagaaatccatctgcttgccttccgagaggtcggcctccttgatgcgggcacgtttttcgagtagcgaaacgggcatgggttccagcgtgttcgtccatttgtctatcgacacgtagcagggcgtgagcttgcccggctccagctccaggtcgatcactttcccggcatgacgggtgttcatcaggttcgttttcgcctcctcgtcgagcaacaccccgtggaagggggcgtcgaggtcgggccgttcctgccagtaatgcggcacgacgcgcagcgagccgtccgcctgctcttcgagcgacacgcgccctttggtggaaacacgcatcccgttctccagttcggggttcatctccaccagcccgttggatttatgtccgtaagacatggctttcaggtgcggctcgatgtcctccatgcggatacctttcttctccatatccgccaggtctatctttgtgacgtccagcggctcgaactgccgctgctcctgcgtctgaagccgttcggaggggtcgatacggtaattttccagaatctccgggtcgaagtcgatgcggataagtttgttcagggcattctccgtcatgacgaagatacccgtgtggacggggttctgggcctgttccatgaactttttgaagaaggcttcgagggctgaatcctgcgtattcacgttcagcaggctcgccacgttctgatccgtggggtcggcggtctggatattgccgtcccgatccacgccggtaacggcttgcagtcgtccgtcgtcggcattctgaacgagcatgacttgtttagcgtcgttctttacgttttcgtccataattacgagtgtttttagttagcaccaatagcgatgcgggaacgaaagtaaggggaaccggctgaacgtaaaagagttggaaaggctatggaagcatcgggcacagaagtggccgcttgtggcgcagggcagaggaaatcggagaaacggagtgccgggaaggacggatttggcagagggtattttcgtggctcctcaccttatttgtcaggtagtcgggatctattgttaaatgtcaataaagcgcatggataacccgtgtttttttataaatttgcgaaaacgggtttcaatatccgacaaaacgtgaggcatggaaatatataccccaaaaaccaagatcaaactttctccggtgataagaaacgggagagaatttgtcgaagtgactttcggtaatgacaatgacatccgcttgtcgctgtcgaaggaagaaaacgtactgcttgtcggcggcagggcttatctgcctgcagagaatttcgtgcttgccgagttcttcgaccgctatgtaaaaatggcatttatagactattccgccatcaaggaaaccgcaccccgtaaagaggaagacaaacggccgccactgccggaaggctatctggaaaaacttcagcaagtgcgttacagtgaccataccgtaagggtatatacctcctatttccgcgatttccaacagcatttcgaggggtgtaagattgaaacggttacccccggcgagataaacggctacctgctgtatctcatccacgagaaaaacatatcctcctgccagcaaaaccagcgtatcaacgccatcaagttctattacgagaaagttctcggtcaggaacggcggtgttacaaggtgaaccgtgccaaacgggagaagacgctgcccgacgtgttgagcaaggaggaaataaagaagatactcgacgcgacggtgacagacctgcgcttcttctgcatgttctccatactctattccgcaggattgcgcatcagcgaactgctggaactgaaacccggcgacatcaacgaatcccgctccctgatacgggtgcggcagggtaaaggaaaaaaagaccgctacaccctgctatcaaaaccgttgatgaaaaagctgacggaatataacagactatacaaaccgaaagtgtggctttttgaacacagaccgggcgaacctttcaccgagagtatcgtgtcgaaacgg

SEQ ID NO: 10436 - DNA, 273 bp, Unknown
  gut microbiota DNA sequence
aatactcgacgtgacagtgacagacctgcgtttcttctgtatgttctccatactctactccgcagggttgcgcatcagcgaactgctggaactgaaacccggcgacatcaacgaaccccgctccctgatacgggtgcgtcagggaaagggcaagaaggaccgctacaccctgctgtcaaaaccgttgatgaaaaagctgacggaatataacagactatacaaaccgaaagtgtggctctttgaacacagaccgggcgaacctttcaccgagag

SEQ ID NO: 10437 - DNA, 23689 bp, Unknown
  gut microbiota DNA sequence
aaccaaactatgacaggatttttcgatacggatcgctggaacgaaatctggcagacgatctcccgcaaccgcaggcgcagcatcatgacggcgctgggcgtcttctggggtatcttcatgctgatcgtcctgctgggtgccggcacggggctgggccgcatgttccgcgcccaactgggcggcacggccaccaacgccattttcatcatgtccgaccgcacctccgtcccttacgaaggtatgcctacgggccgcagctgggaactggactgggacgacctggaagcgctccggaaactaccccgcatcgaatacatctcggctgtttgctggggcaatcaacgcaacatgagccaccaagaccacaaaggcgaattcggactgatgggctactcgcccgacatgcagcagatcgctcctcaacagattctcatggggcgttacctgaacgaagtcgatgaactgcgccagcgcaaagtctgcgtaatcgggcttcaggtctggcgcgacctcttccccggcggagaagatcccacaggcaaaacgatccagatcggcagttcctacttcacggtcgtcggcgttaccaaacccctgggcggtatgatggccttcagcgacccggagcggaccgtcgtcatcccggcgctgctcgtacagcaaatgtacggactgggacggacgatcgacatgctggcactcaccggatatgcggacgaaccgacccaagaggtgatccaggagtgccggcaaagcatcgccgcacgacacctgatcgcccccgacgacaagaaggcgatctattttcaggacacctccgagatgttcggaaagatcacggggctcttccgaggcatctccctgcttacgtggatcgtaggtctgggcacgctgctcgcgggcatcgtgggcatcagcaacatcatgctggtactggtacgcgaacgcacgcaggagatcggcatccgccgcgccatcggcgcttcgcccctgacgatcctttcgcaaatcctctccgagagcttcatcctcactttcatcgcgggcatcttcggtttcggtgcgggcgtaggcgttctctccatcgccgacagtttctacgcgcgggccgcccagatggaccaacacctgcccgatatttcatggcagatctccttcggtatggggatgctcgcgctgggtatcctcgttctgggcagcctgctggcaggcatcatccctgcgacccgggcactgcgaatcaaagccgtggacgcgatccgcgaagaataaaccccgaaactcgcaacaaacgcaaaaaaccgacataatatgaaaaagtttctgaagattttcctgggcatcctgttcctcgcactgctcgtcggcacgttcgtcttcctctggaacaaaacccgccccgtaaaggtggtttacaccctcgcaacccccgtgcatgacacgatccgtcagtacgtcatcgcctcgggcaaggtcgaaccccgcgacgaggtgctcatcaagccccagatctcgggtatcatttccgaggtgctctgcaaggccggcgaccgtgtaaaacagggcgacgtcatcgctacggtgaaggtcattcccgaaatgggaaccctcaatgccgccgaatcccgcgtgacggtagcccggctctcgctcgaccagacccgcaaggagttcgaacgcaccgaagccctctatgccaaaggcgtggtatcgcaggaggagttcgagaaggggcagaccaccctgcgccaggccgaagaggagttccagaatgccgaagacaacctggaaatcgtcaaaaccggtattaccaaccgatacaaagatttaagcaacacccagatacgctccaccatcacgggtatgatcctcgacgtaccgatcaaggtcggcaactcggtgatccaggccaataccttcaacgacggcaccacgatagccacggtcgccgacatgggcgacatgctcttccggggcaatgtcgatgaaaccgacatcggccgcctgcacgccggcatgcccgtcgtgctgaccatcggtgccatgcagggtaccgtcctccaagccacgctggagtacatttcgcccaaagccgccgatgtgaacggtatcatcatgttcgaggtgaaggccgccgccaagatcccggaatcggtcttcgtccgtgcaggttacagcgccaatgccagcatcgtgaccgacagccgcgaaggtgttctcacactgcccgaaagcaccatccagttcgaagagggcaagccctgcgtctatatcctcaccagtcctgaggagagccccgaacagaccttcgagaaacgggacgtaacgctcggtttgtcggacggcgtgaacatcgaaatcgtatccggcgtcaccgaaacggacaaagtccgcaacctccaacaacagtccatctaaatccctgccaccatgaaattcggaactcttttcatcgcactgctgctcgcgggcagcacggcgcaggcccaaattccgactccgacacccgaagcagacccttggagcctggacgactgcatccgatacgcccacgaacataacatacagatccagcaacaggcgctgcaagtcgaacagcgctccgtcgaactcaacacctcgcgccacagccgcctgcccgacctcggtgccaacctcggtacgaacttcagcttcggacgaagcctcatcagcaacaacacctacgccgacaacaaccaggtgttgggttcgctcggcgtttcggcctcgctgccgctcttcatgggcggacgcatcaaccacgaaatcgcagcgggcaagctgagcctgaaagccgcggcccaagacctggaccggattcgtgaagacgtatcggtcaatattatgtcgtattacctcgacgtgctggtcgcaaaggagttggttgacgtcgcagagcaagcgctcgccttgagcacacaacaggtggaacgcagccgggaacaggtgcgaacgggcaaagtcgccgagtcggtgctttacgaaaacgaagccctgctggcggcagacgaatacaaactgacccaaagccgcaacgacctctcgctctccctgttggccctgagccaggccctgaaccggacgagtgccgaagggttcgacatagtcgccccgactttcgacagcctcaccgtagagtcgatgcgtcacctgcgtaacccggccgaagtgctctcctacgcgctggacaaccgaccccgcatacaggccgagcgcttccgcctcgagcaggctctccgggcagtacggatgtcccgtgcggcttactacccccagatcacactgacaggaggatacggcaccaacgtctatcactcgttcgctacgggtgcggtgaatcccgctttcgggcgccagttccgcaacaacagcaccgaatacgtaggggtggcgatcaacatccccatcttcaaccgcatggcgacccgcaacagcgtgcgaacggccaaactgggcgtgcggagccagcagctcgtcctgaccgaagccgagcagaccctgcaaaaagagatcgaaacggcctactaccaggccgatgccgccctgttgaaataccgttcggcggaaaaagcgctcaattccgcacaggtcgccttcaggtacgaagccgagaaatacgctgcgggccgctcgacgaccttcgactacaacgacgccaagacccgcatgcagaaggccgaatccgaccagatccaggccaaatacgaattcatattccgcaccaagatcctcgatttctacgcgggtttccccctgacgctttaagcggcaagcggaacccgaagactccgggcacagcagctacaagagaagctcccgggaacgatttgcgttcccgggagcttctcttttcatataaaatctctctctgccgatatttccggaagtccccctccaggcggaaaagagaggtaatccggcggattcgtcccgcagccttactccacgatcgaaaggtcggcgaacgagaaaacttcggtcgaaacctcgcccaacggaccgctcttggcattgacccccacctgtactttgacgaagtcgatgtacttcagttcgacaggcgttccgtcgggctgcatggcattggcgattcggaatccgttgctctgtccctttccgtccaccgcatcgccgcccgcaagacagtcgcttccgtaattgtcggcatagccccagtcgtaagggcggttgatccaaaatcccctgtcatcgaccatattccgggattcgagcagcgtaccgcgcaacgtataagtatcggcggcccaagccggataatagaaatcctggtcgtgaaattctcccttatactcgatcgtgccgctgtgaccttccgaatcagtccactgtacgtccatcccctttccggcaggtcggtaataagtcacggcataaccggagacagtcccttccttgcccgtttcgctgccccgcaactcataccactcgtcatcgggctcgccgttgccgttcacgtcctgcatgacccacaccacacccggctccgagctggtgtcgaacgcattcccctgaatggaaaaatcgtagccgctttccattcgggcgatactgtggtcgaacccgacgatcagataaccgccgaatcccccgagcgaaacataactccgcgcctccagcctcccggctgcataagccacggcatcttcatgggtacgctcattgcccgtatatccggcttcggttttttcaccgaccaactgcccgggagcaggcagaaattcgtaaaccgcatgctggaaacgactgctcgccgcactcgccgggcgtcggcgctgctcctcgtccgcaaaggcgtggacgacgatctcggcagacagcgtagcaacccctcggacgatgtttcgcgtaagacgctcggaagcatcgccgccttcggtcacatcgacccgaacggtatagtcgcccggcccgtcgggtgtaaacttaaacacggcacccgtttcggctacgaccggttccccatcgaccgaccaggcgaactgtggatcggcgacataagccagcgacggcgcaagatagaccgcacggccgacgaacgtactccgatcggtcgtcttacagtaatgagagagcttttcgaagcggacctccgaaggcatcttctccacgacctccacgacaaattctttgacggaagttccatcgtcgttcgatgcctcgatacggatcgggtagcttcccaccgtctcttcccggaaggtatagctcatctgcgtagaaacgacctcgccggcacagagccaccggcagcggaagtcctcctggtccgaatgctgaatatcgggagcgaaggtatattcgacacccggcagaaccttgagcccctcggcaggcagtgcgagcgaaatgacgggcggagtaagctccagcacatccacccgcagctccgcttcggcttttccggcagccgtttcgacacggaaagtgatatacacttcccccagttcggtaaagacggccgtataggtcggttcggaacctgccagcttgccatcgacgatccatgagtaggtagctccctcggcatactccaccgtcggagcgatggtcagctcccggcccgtcttgacggtataaacccccgactcgctgtcgagcgtaatgacgggagcatgatcccggtcgtccaaaatcacttcgtccttgttgcaggcggtcgtcaacagtgcagccaacgccatccaaaacaggaaatgtcttttcgaaaaaatccacatagcacgttacatatattcgcgtttacggcacgcggcagagcggaaacccgccctgccgacgcacacaaaaacgatttatcttcaaaaaccgtcgcctccgcccggtgcagtccgtcacggacttttccgcaagtcggaaacgatcgccgaaatcggtccggaaactctccggaaaaacattacagctcgatcgttatgtcatccagagcataataggccggcatcgagaagccataaccgttatcggggccgcccgtcatattgaaacgcaccttcgccaccttgcccagcgaagagaggtcccatttggtccactccttaatcagcttgtccttcgatgcgaaagtcatcgtcacggtgccggtctccttacctgcggcatcgtagcccgtagcatgaatcagtacatcctggccctcctcaagcgcaggtgcaagggcattgcccttggctgccacactcaggaaataacaggtcgaattgatatagcagctctggatcgtacgcgccacaccgtcggcgaaagcgaaaataggacggctgtcgccatagtcgggatgcgcctcgtcgtagttaccgtaaccgataaggaaattatccgatccgtcgtggccgccgcccgtagtagcatcctcgttccgggcattgtacaggtaaaggtcaagctcgtaggagttgaacttctcgatatccttggagttgtaggacgataccataaacgggtatccccaaccttcgggacagggcgaagtcagctgcgtggtctgatcggtccaggtgtacgccttatcttcgtaaactacggacatcgccttaccgccgttatagttcgccaccaccagcggcgaccagtcgtcgccctcgaaagtgatcgtataggtctggggtccttcgtccggcccgtcgtcgtccttcgaacatccgacgaaagttaccgcagccgcagccagcaaagccaaaaatactctttttttcataatcttttattatttaataaattgtatgtttcctcctgtacgaaagatcgccgcaaagcatacgcttcgggggctcatggcaacaccgggtccggaaaaatcgactgaatggggaaatcgagcaaacagagcaaccgacattcgtgattccatcccgtgacccgcaggtgtaaaatcttcgtgcaaaggcaggtcttctgactcatcccgtccgtcgcgccttcccggcttcatggccagtggcaaaagagagcgatcgaactattccccgaaaggaaacaggacttacagcagcgagcactgttccggattcgcaccggattccctattactccgcacgcttcgaaaaaacatacggataccttttgcgggtgcaaatatacgaataatatttaattcgaaaattcaaaaaaacacgacgacctcttgacttcgccttttcgtcagcgtatatttgcagacgcgcccttcccgtttcccgaaacgggcgcccatcctttctctattttttcgatttccgcctgtcgccggactcttccggacggcaatgacactgtttcatccgactaaaaaacacacgacatgccccgaggacgcaacaaagccctgatcgcccgacgcgacgaaatgctctgccaccgctatcactactggaccgaaacgcagcgtctgcgcttcgacgacaccctgaaaatcctctccgaagaggaattctttctctccgaggagcgcatcctgaccatcctccgcgccaacggcgacacgctccgcgaactcgccggccggcctactccgaaaatgcgaagagagcgcttcccgacaaggcgccatacaccctctccccggaaatgatccgacggatacgcccgtccctggcaataaggatattcggcccgttcattcctgcgatccggcaaaaagaggcatccgcacatctccattcggaaaaaacagctatttttgcagccggaacaatcccggaacgaaacaaaatggactggtttacggatctttttacccaacattcggccattcaagccgtcgtcgtgctctcgctgatctcggtgttcggcatgatgctgggcaaagtgcgttttttcggaatttcgctcggcgtgacgttcgttttcttcatcggcatcgcagcgggccatttcggactctcggtcgatccttcgatgctggctttcgccgaaagtttcgggctcgtactcttcgtctatgcattgggattgcaggtcggccccggtttcttcagttcgctccgctcgggcggcatccggctggtttcgctcgccacgctcatcgtcctgacaggttcggcactggccgtagggctcggctatgcgacccgtgttcccatgagcgacatggcaggcatcctgtgcggcgccacgaccaacaccccggcgctcggtgcggcacaacagatgctctcgcagatgcagttggacagcaacaacgccacgctgggctgtgcattgacctacccgctgggtgtcgtaggcgtgattctgggcatcatcgccgtacgcaaactcttcgcccggccctcggacattccgcaaccggacgccgaacataaaaagaatatcttcatcgtcgaattcaagatttccaaccccggcgtcgtcggtaaaagcatccgcgacgtcgcggcatacagccaccaccatttcgtcatctcccgcctttggcgtgccgggcaggtttcgattccgacttcggactcgaccctcgaatcgggtgatctggtactggtaatcacctcgccggacgacgtgcaggcactggaactcctcttcggcgagcgggtacagaaagactggaatacgcacgacatcgactggaacgcattggacagccagctcatctcccggtcgatcatcgtcacccgccccgaaatcaacggccgcaaactcagctcgctgcgtctgcgaaacctgtacggcatcaacatcagccgggtgcatcgttcgggcgtacaactgctcgccacgcccgatctcacgctgcaactgggcgacagcctgacggtagtgggtgaagcgcaggcgatcgaaggcgtcgaaaaaatcctcggcaatgccgtcaaacagctcgacgaacccaacctgattccggttttcatcggtttgctcctgggcctgctgctgggaagcatccctttcgcggtaccgggtatcagtctccctgtcaaactgggactcgcaggcggcccgatcatcctcggcatcctgatcgggaccttcggcccccgcatccacatcgtcacctacaccacgttgagcgccaacctgatgctccgggcattgggactgtcgctctatctggcctgcctggggctcgaagcgggcgcccatttcgtcgaaacgatcatgcgccccgaaggaatgctctggatcggactgggattcctcctcacgttcgtccccatcgttatcgtagccgccctgtcgctgcggttcttcaaactcgatttcggacaggtagccggcatcatgtgcggcagcatggccaacccgatggcgctgaactatgccaacgactcgatccccggcgatcatccggccgtggcgtacgcgacggtctatcccgtatgcatgttcctgcgggtcatcatcattcagattctgatcatgtgctttatttagcggtcgccggacggcagaccgccctgcgttccgaagaggcgcagcgaacggaaccggggactcaacgcccgacatccggcagctccgccacacggcggatctcgccttcgaaattgggggtaaagatcccgccgcccactccttcggcgatctcgcgcagtgtccagaagcgacctccgtccaactcgccgctcggtacgacaggcccatcgtacaccgtcttatagacatagaccaactcccgttcgcgttccgactcgaacaggtaggtcagcacgtgctgcggttcgaaatccgtcacgccgacctcctcgcgcacctcgcgccgcagagcagcgagaggctcttccccccaatccacatggccgcctacggccgtatcccaccgtccgggctggatatccttccacgccggacgtttttgcaggtaaagctccccgcaggagttgaacagatgaaggtgcaccaccggatgcaacagcatcgacccgccgtggcactcgccccgcgtggcccggccgacgacacgtccggcggcatcgaccaccggaaacagctcttcccgattatccgcgcatttcattttccgacaatattctatgagttttattccgaccgtaaagactgcaatagacggagaacatgacgaagcccagcagggccatcgccgcaccgggcagggcggcatattgaggccccaggccgaaactgatcggcagaccgccgaagtaggcgcccaaagcgttgccgaggttgaacgcgatctggatcgacgcggcgccgagcatctccccgcccggcgcattctccagaataagcagttgctggggcgatgaaaccccgaagagcgaagccgtcgtcaggaacatcagcggaatcacgagccagtcgatccgagccgcgaagaagatccctacgagcaacagacaaatcatcccctgaataaagcgggcgacccgttcgggagagaagcggtccgacagatgcccgcccgcgagattacccaccagcattcccagccccgcgaccatcatcacggctgtcatcgcctgcccggggatgcccgccacacgcgtcatggtcggagtcacgtagctgtaccagcagaaaacacctccattggccagcagcgtagccaacagaatcagccagggagcccgcgaaccgaggaaccggaattgccccttcaatcccgtatcgggcagcgccggcagggcaggcacccagcgggcgatcagcagcagagccataattccccacagcccgaccatcccgaaagccagccgccacgaaagatagctgcccaaataggtacccaacggcacacagaacaggttggcgacagtcatcccgaggatcatgatagacacggcctgggttttgtgtcccggatcggccacccgctccgcaacgatcgaacctacgccgaagaaagccccgtgaggcaggcccgacacgaaccgcatcgccaagagcatccaaaagtcgggcgccagcgaagcgcagacgttacccaggacaataagagcggcaagagcgagcagaatccccttcaacgcccgcttacgtgcgatgagcaccgtcgcgggagccccgacgcaaaccccgatggcataggccgaaatcaggtccccggcccgggggatggaaacgcctaaatccctcgccacatcgggcagaatccccatcatgacgaactcggccataccgagagccaacgtgccgaaagccagggcgatcaaactctttttcataaatcgactctttttaccgacggctccgcactccggagtacggaatctctttcgcaactttcgcattcttcggaccgctccgcagctcgacaatacggcgcgtccgaagcacggtcttttgattcggagaacaaaaatagcgcatatcttcccctcttccgcctaaaacgaaagaatttctcaccgacctgacaaaccggccctcccggattctccctaacgggatgaatccgggagggccgattatatcctatccgaaagcccaaagagagccgtatgactgagatcaataccccagccagtgaagccactcgagcgcttcgggcgtcagcttgtcatcgcggtccacccaggttccggactcgatgagcaactttttatactcctcgatacggcgcgtgatcggaaaatcgggtcgcggcagcgcactcttctccgcacgctccgaagggcgaatcgtccggtcgaaaacctcccgaagcgccgggcgccggtgtccctcccacttgaaatcttcgagaaaaagagcctgcgtctccggaatcttatccatcgggaaaatcgaatagaccggctgattgcggtaggtaatgccttcgaccgtattgttgtcgatatagtaggtagccgcaccgctttggatggacatcaaccccaccggttcgggcgaatcgtcctcctgcatataatagatggtctgcacgttaccgtccacgtcgttgcgatagatcttgttattgcggaaataggcagtaatcagcttgcccgtcacctggttgtaagtcatcgtgtcgatctcgctcgacataaccggacggccgacgaattccgctttctggagtttggagttttcggtatagatcttcatcacgtccgaagtgatctggttgtcctgattccaaagcacgggatcgatatagagcaggatcatcgagtccgtggaaacggccaccagggaatcgcagaccgcctggaagtcgttgcggaagatctttacccggcgataccccttgaccaaccggtagagggaatctccagcaggtgcagcgatcgaatccccccgcaaagagtccgctgccgcaaccccggccttgagcgaatcgagctgcatggaatcgcgtcccagcgaatccgcagcaagagagtcccggaacaaagaatccaacgcggcaaaagccctggcctcccgcagggagtcggcgaccagcgaatcgagagccgacgccggaagcttgcctttcaggatcgccttcccggttttggcacgccgcttggcccagattttctccatacgttcggcgcggcgctccaggttctttctgcgcaatgcctcctccttctgtttcgcagcgtcgagcttggcagtagcccgagcctgacgtgctttggcgatctgcgccagcttctccttgcgggccgctgccgcctgcgcctttttcacggacgctatgctgtcggcctgtgcccgcaattgagctttcaagctgtcggcctgggctttccgctcccgcttggaaagaatatgcacggaagaatccgcaggaagcgattttggaccggcctgcgcaaggctgtcggaaaaaagcgtatccaccgcagaaacggcggccacggaatcggcaggggtcattccgccccccacccgatcaaggctgtcggaaagaagcgtatctattgctggggcggcatccagagaatcgccccccgttcctcctttttcagccggaacagccgctatgggttctgcagcggaaccagaaccggcatccgcagtttcggacgaggtttcgacggctccggccgcagcctgcggagcagcggcatccgcctgcgatccatcctgcgaggcttttggatccgcagcactcggtttcgcagccagtgaatccacagacgatccccccttagagccggccagagaatctgccgcctttgccttcaccttcgccaacgaatcggcacgtgcctgctcgctcttcgagatcgtataaagaaacatcgaatcggcacacatatagagcgaatcgctctgactcgtatcgtagctgaccaccgaaggtcgctgcgtgagcagagcattgcccggctccttccaatattcgccgtaatcgccgaaagcgagcactttgtgctcggcgtcgtcgatctggatattccggaacaaaagagcatgcccggactcccggtaatagtcgaggctgtcgctccacagctcctgcttttcggtcatcacatacccgttgcgagtcagcacgtaaagctcgcgcggcttttcgtaacgtccccggtcggcataaatgtaatcgccgccttcgttccagatgttggttcgctcgaagaaatgagcctggtcggtatccgtatcgtacaccaccgaatcgcccttgagttcgtacttgtcgttgcgcatctcgacacgatccacacagataatctggtgcgtatcggcataatagtagccccggtcggattcgaggtgattctcgcggttggtcagcataccgcctccgctgaaagtaccaatattgtccagcgtattgaaccggaaatcataagtatagagcgtcgcatccccatcgacgaccttcaccagcggagcatagacccgcgcctcgttgatctcaccgttgtagtcggcccggtcgccgtaaatgtatgtctcttttttattgatcagtacgttgccgaagcactcgatgcgcttgtcgttgtagcggatcgcgctgtcgcaggtaatgaccgccccgttgtgctgggccgcgaaatgccctacgagcactgtcgcggtcgtatcgccgtaaggaatgggatatccccggtcggcgacgaaatcgaccaccttgttcgactcggggtcctgggccggagcacccggagccgacggggtctgaacacccgcaacgggaacggccagcggcctgttccccgcgaggatcacacctccggcgacacctgcgaccagcagtgcgcacactatttttcgcaatcccttcggcatcggacgatctctattttacccagttcttattttcgaactctccgtcccgaaattcgggatcgatataaatgtacatgccctcgatcttcttgtcgagccactccttgaacactttctcgcgtttggcgttcagcgccagctgttcgacgcgaatatagtcctcgtcgagcgaaaccttgtgcggagggatcaccttcacgagcttgacgatcttgctgagctggttgcccatccagtcttcggtctgataggcgtcggaaatttcgccctccttaagattgcgcagggcattgtagtcgtcgaggctcttgccaccggcccggccgaaatcttctttcatgaagcgtgtttcggtataacttgcttcccacctttgagtaagttccagcaaatcgtggttggtcaccacgccgccgttcatcttcgaattatcgtcgtcggaaaacttccgggccgcctcctcgaaagtaatcgaatccttacggatcaggtttgcgatactgtccagcatacgggccggagccgccagctcctcgagcgtataggagggtcgcaacacgatatgacgcgcatggtacatacgccccttctggtcgatcaactgaatcaggtgataaccgtattgcgtttcgacgacctcggaaacctgtcccggcttcagatcggccaatgcgtccgcaaactgccgcacgaacccgtccaaaggctgggggtccagttcgccgccactgatggccgaaccgtccatcgaatacatgcgggccatgatgtcgaaacgggtctgccccttgatgatgcgctcgcgcatatccagcaaccgctccttggtgcgctgcttggcctccttgatcgacgccgggaaacgggtgatctgggcataaacgtactgttcggggatagtcggcagactgtccggatcggtcttcttgtagtaacgctccacctcgccgggaatcaccttgattttccctactacggaactctgcatagcctgggcgtatgcctgctcctcgtaacgctgacgcagcatttcgcgcacgttgaagatcggcatatgctgtttggtttcgagcgcggcgatagaacccgcatcgtcgatgagcgcctgcaaatgggcttccacccgctgtgcgatgcccgaatagctgacatccaccgaatcgatgagcgcctgattgaacagcagcttctgcatcagcagttgttcgagcgcttcgtcgtggggatcgcggtccgaagtgtaaccctgctggcggcgctgttccaccagctcgcccgcatattcgtccacctccgaccagaggatcgacgatccgccgacgacggccaccacgcggtccagcatcacctgccgcttctgggcggcccctgcaaaaatcgccagcaccaacgctgcgcaaaacagaatcttcttgctcatcagttctctattttttcttcttcatggatcttcactctcccctcctcgaccgcttttcggtaaacctcctcgtcgtaggcccgaatgatctcgttctgccgctggttgtagaggatgcggcgcacgatcgcctcgctgcgctccagcggttcgggatcgcccggacgaagcacgtcgcttatttcgaaatagtagcgcgaatgaccgtcgctcatctcctgtacggcccgcgaggagagcagggcgtcgtaactctggttgcgcaatgtgggcagatagcccagaaactcggagaaggtcacccacgaagaggagaaatcgttcagtacgaaattgttcttggtacagatgtcggcgaactcttgctgccgggatgagccgggctgcgtcatcaacttgcgcagcttcggcgcctgccggttgttggcgtcgaagcgaacgatccgccccttgaccagggtttgattgaccttgaaatccgacgcgtgttcacggtgataggcagcaatctgatcggcggtaacgagcgtatcgatgcgctcctcgatcagatgctggtcgaacttacggatcaacaacgcctggcggtactcctcgaccagcgaatcgatgtcctgctcggcatcggagaaaagttcttcggcctcgtgcaatttaagctgtttgtgcacccacttttcgacataacggtttacgaaagccacgctgtcctcgccgaccactcccttcggaatcgcagccttaacctctcgcgcgtacaattttctaccggcagcctcggccaacacgacccgacctccgccccaatagcggggcacttcctggcaccctaccgcaagtacgagcagcagaacagctcctattttggcacaaaaactcataactacaagggacaaagataatgaaagccgagagcctaaccaaatttatttgagttaagccgaggcgcatcctatcgtctaaaaaagatactttttacccgaacctaacgtaccgtgcatcccgaatattacattacgccctaatttatcgtatcgaaaaaaccggatgctccggtgcagataatccggggaaaaccggcacagacaatacttctgcatgatacccgccgacgatcccgctcctgcggtacgccgcaaaatagcccccgaccgtcacaacaggttaccggatcgtatttttatccaactttttcacccgggccagcaaacggtagatcatatagcccgatgcggcgaaaagcacgagcgcaacgacgtaaacgatcgtataaagtgtatcgctgccgataaccgaacgtatcgtggccccgtccagtccgaccataatcaacaggaaagccgcaccgttgttcatggcatggagcagaacgaccgaaaagatcgaattggtctcgatgtagatgaaacccaggatcaggcccatcacgaaagcattgaccgccagcgccggatgtccgtgcaacacggcgaagaacgccgacgagaggaacaaagccgctacgacgccgtacttggcccgcaccgactcgagaatgatgccccgacagaggaactcctccaacagaggagccataaccaccagcgtaatgatcgcccagaagccccggccgtaaactgcggacgaaggcatcggaagcagctccaccaccggttcgataacgataccggcagccagcatcatcaccagtccccaaagcagcagaaccggattgaggccccgcgccgaaaagcgcagcgtcttgcgcgttccgtgccgcaagcggcgatagaacagcgtgaaaagaatcatcagtcccatcgtcaccaggtaggtgaaagccgtaaaacgcgccagagcgtcctgttgttcgggcgtcggagcgacgttgccgcgcaacaagtcccagtccggaaaatcgaacccggcgagacgggcggcaagcagtccgacgaattgcagcaaataccagattcctaccagagccaacaggtcgataagggtcggaaatcgatatttatgagccggttgcggcgtttgtccccgatcggatgttccgggagtatccccaacaggagcttgcggacggacatcggacggagtcgtggaatcggtatgtaccatagcttctatgttttatcttcggtataaagacctgttttacgcttcgaagataggcatttttcgggtatcgttatggtttttcccgataaaattcgtatttttggccgattataacccgttaaaatcagcaaacatggcaaaggtcatcgcattggccaatcagaaaggcggcgtgggcaagacgaccacggccatcaacctctcggcgtcgctcgcgctgctgggcaagaaagttctcctgctggacgccgatccgcaggccaacgccacgtcgggactgggcttcgatatcaacctggagggcatttacgagtgcatcaccggagcgaagacggcggccgacgtaatcctccaaagcccggacgtaaagaacctctggctgctcccctcgtcgatcgacctggtggccgccgacaccgagctaccgaagatggagaacggacaccacgtgatccgccgcatcgtggagagcgtgcgcgaccgttacgactatatcctgatcgactgctccccctcgctgggctatacgacggtgaatatccttacggccgcagacacggtgctgattcccgtacagtgcgaatacctcgcgctcgaagggctctcgaagctgctcaacaccatccgcatcgtcaagaacggactgaacccggcgctcgaaatcgaaggcttcgtgctgacgatgtacatgcgcaaccgcctcaacaaccaggtggtgaacgaagttcgcaaccacttcggagagctggccttcgacacaataattcaacgcaatatccgtttaggagaagccccctcgcacggaaaacccgtcatcttgtacgatgcttccgccgtcgggtcggctaattacctcacgttggccaaggagctcctgaaacgcaaccgcaaaagcaatcaaaaagcaaaatagcattatgaaacagaagggattaggacgcggtctggacgccattttcgggagcgaacacctggatgccaggctcaaaccgatgaccgaaatggcggagatctccgtttcggcgatcttccccaaccccacgcagccgcgcacggagttcgatgaagaggcgctcgaagagctggccgactcgatccgcacgctgggcgtaatccaacccatcacggtcaaacgcaccgacgacggacgctacctgattatcagcggcgaacgccgctggcgggccgcccgcaaagccggactggagtccctgcccgcctatatccgcgaagtggacgacgagaacctgcatgctatggccctggtggagaacatccagcgcgaagacctcaacgccatcgaaatcgccctgggaatgcagcggctgatcgacgaatgcaacctcacgcaagaggcgctctcggaaaaggtcggcaaaaaacgctcgacggtgtcgaactacatgcgccttttgaaactgcccaacgaagtacaactcgccctcaaggaggggcttatctcgatgggacacgccaaagcgatcgccggagctcccgaagagttgcaactgcgcctgctcaaaaagtgcatccgcaagggactctccgtgcgccagatcgaggaactggtccgcgcactgaccgaccctgcggcaaaacccgcagctccggccgaagacgaggagtatcccgaatcgtatgcgcggctggtggagcagctcgaaaaattcttctcacaggagatcagcatcaaacgctcgaaaaacggcggcggtcgcatcgtgatcgacttctcggacgaccgggacatcgaccgcttcatcgaaaaattcgagaaaagaggcgcttccgccgaaatccgcaacaataaatagatgaaacacacccggggatatatccgtctgttggtgcttttcgcctttctcgcattgtgcggagcaggcgaagcatcggcccaggttccattggaccgttaccgtagcgcgaaaactttcgtgcgcagcggtctgatgcccaaaccggacagcctggccaaaaaccatcttacggactctctgctactgatgcgggtggactctctgcttcaggacagtaccctgcgcgattcgctgctgcgttcgggcatcgattcgctgcggctccgggattcgctggctgcgagactgcgcccgcaattcgtccccgactcggccctgcttctgaaaaccgactccctgcccgcagcactcggagcgcccgactcgctcgcaggccgaaaagacctccgcccccggcgcgataccatctcgctgtcgggcgtaagttggatctcgctggtagcgcccggtttcggacagatctacaacaagcaatattggaagctgccgatcctctacggaacggtaggtgcgggactgaccctcttcttccacgaaaacaacacctacaaacctctcaaacgacaatacaacgccctgctggaaaacggtacggcccgcacggaggagttggacgacgtacagtcccgtatgatccgcagcaatacgcgcaggcagatctatctcgggcttacggtcgcctcctacctttacttcctgggcgatgcggcggtcaactaccgctacgacgcctcccccgtaaagaaagccacgacactggccacgatcttccccggtgccggacaagtctataacaaaagttactggaaactgcctttcgtcgtaggcggactggcaaccacgatctataccatcgactggaacaatcgcggctacaagcgtttcaagaaagcctactccgatcgtagcgcctacgacaaagccctggaagagcaccagaaagacccggagcaccatcccgacccgcctgtagccaagggcgaattcggtactaagtactcagcggaatttctcaaaaacctcaaggataattaccgccgtaaccgagacttgtgcatcatcatcactgccggactctacgtgctgcaaatcatcgacgcccatgtggacgctcatctgaaaagttacgatatttcggacgatttaagcgtagagttcacgccggcggtgaattacgtctattccccgaccgccggcggacaccgtccgaccttcggattcaatctcaatctgaacttctaattccaccatgaaaaaactcctcgcctgcaccctttttctttcgctcttcctcggctgtgccaccgcaaccgcccagagccggaaagagcgccgtgccaagagaaaagccaagaccgaaaagcaggcttcgaaatcgacccatactcccgtttcggtcgaaccggaaaaaacaacggcagaaaaaacagaggtacggacaacggaaccctactgtccggaactgaaccgcaatctcaccccggcccagatcgactcgctcgtggctctctggcgagaaaagcaggccctgcaatcctacgatacgtttttcaacgactatatcgatatcgacagcctcgctttctcgggtgacacgacccccgattcggtctatgccaatcgcctgcgggcactcgtatcaccggtgcaactccccttcaatccgatcgtcaaaaactacatccgccgttacgtcgatacccgctacggaacaatcaaccgggtgttgagcctctcacgctactatttcccgctgatcgaggaagagctcatcaaggccgacctgcccgtcgagctgcgtgccctgccgatcatcgaatcggctctctcgaccacggccacctccccgatgggtgctgtcggactgtggcaattcatgcccgcgacaggcaaaagttacggactggagatcaattcgttcgtcgatgaacgtcgggacccggtgcaagcgacccgcgccgcctgccgttacctgaaggatctttacagcatctaccacgactggacactcgccatcgccgcctacaactgcggtccgggcaacgtaaacaaagccctggcccgcgccggcggagggacgaccttctgggacatctacgaatacctgccccgcgaaacccgcgggtacgtaccggccttcgtcggagcctcctatgcctatgcctaccaccagcagcacggtatccagagcgaaaacccgcccatgccgctggcgaccgatacgatccgcgtgacccgcctgctccacttgggacaagtggcctcgacactcgacattccgatcgaaactttgcggacactcaatccgcaatacaaaatggacatcatcccggctacgatcaaaagctacacgctggtactcccccagcattacctctgccagtacatcgccagcgaagaggagattcaccggaaagactccacctatctgaaagagtacatcaatccggccaacatcgaaaagaagaaactcgcggacgccacccccgcatacaccacctacacggtcaagcgaggcgatacgctgggtgcaatcgcccgtcgttacagaaccactacggcacaaatcatgaagctgaacaagctgaaaaacgccaacaagttgcgggaaggccaacggctcaggatcccggtccgccgataatcttctccgatgaacgtcccgaccgataccatcgtcgctcccgccaccgcttcgggcggagccatcgccgtcatccgattgagcggtcccgaagccatcgcctgctgcgaccgtatcttccggggacgcaagccgctggccgaagccgccgggcacaccctgcattacggcgaagtcatagacggggacagaatgatcgacgacgtagtcgcggccatctatcgtgcaccgcactcctacacgggcgaagatgccgtcgagctatcgtgtcacggttcgcactacatcgtctccgaaatcatcgcactcctgcttcgctccggcgctcgtatggcgcaaccgggcgaatttaccattcgggccttcctcgcaggccggatggacctcgcgcaagccgaagccgtcgccgatctgatcgcttccgattcccgggcttcgcacgccatggcctcgacccagatgcggggcggatattcggcggcactgggtgcgttgcgcgacgaactgctgcaactggcctcgctcctcgaactcgaactcgacttttcggaagaagacgttcaattcgccgaccgcgcacgcctgcgggagatgatgctccgcatcgaaagcgaaatcacccgcctgacggattccttcaaactcggcaatgccatcaaaaaaggggtggcagtcgttatcgtcggagaacccaacgtcggcaaaagcacccttctgaaccgtctgctgggcgaagagcgggccctggtatccgacatcgcaggcaccacacgcgacacgatcgaagagacgctcaatatcgacgacgttctgttccgcttcatcgacaccgccgggctgcacgataccgccgatcgcctggaacaaatgggcatcgaccgcacgcaggagatgatccgccgcgcacaaatcgtacttcaggtcgtcgatgcgacctgcccgatacctcccgccatacagattacgcccgaacagactcgcttgctcatcgtcaataaatgcgacagcccggatgcacatatcactgaatcgaaggtatcctccggctgcggggtcgaatacagagtatcgtcggcaaaccccgacactcttttcatctcggcaaaaaccggcgaaggaatcgaacggctccttgccagactccgcgcgactttcgacaccggaagcatctacgacggcgatcccgtcatctcgaacagccgccatctggacgccctgcgccaagccctcgacgccctgcaccgagccctcacggccctcgatgacgatcgtccggccgacctcttaagcgaagatatccgccaggtcatccaccacctgggcaccatcacaggcgaaatcaccaacgacgatattctcggccaaatattctcgaaattctgcatcggcaagtaagtggtgattaccaacggttagcatatatcatcaacgattattaaggcgttcattttaagcgtttttctttttagccttataagcgatgattatcgtttatagggcttttccagctcatttttgtaccgtatttgttgctcgcttgttaaagccttgtttctcaccatc

SEQ ID NO: 10438 - DNA, 3465 bp, Unknown
  gut microbiota DNA sequence
caaatggagaatgggcagtgaatcgtatatgccttatggctttccttcactgtctcctttgacggattgttacttttacacttctacaaatggagaatgggcagtgaaccgtatatgctttatggctttccttcactgtctcctttgacggattgttacttctacacttctgcaaatggagaatgggcatgtaaccgtgtatgccttatggttttccttcattgtctccattaatggattgtcacttctacacttctgcaaatggagaacgtgcatgtagccgtgtacgccttatgttttttcttccttgtctccattaacggattgatatttttacacttccacagaccgataattcaagaatccgtatcaggacggatgcatgctcccacacctgcccataaggatttgaaaggggcggtggacaaggaacggaatcccgccgcttttccacgccgctacggacagcaggattctgacgtcactcctgcatgggaagaaccatccggatggaaccatatgttcgtccccccgtcatgtgtatcatgacaatccccgactttggatgactataagtgacaggtggttccgttccgtcctgtcctcttctttttttattttgtattccgaaacaatgccagttgtgtaatttaataatttaagattttaagacaatggattcagaaaaggaaaagaaccggctttccgatatcgttctcgagagggtcggactcacgggaaaccttctgtcagctcccgtttccccatccccggaaccggcggtggatatgccgggtcatgaaaggcaggtccgtgcagggaaagtgacagccccggaagaatacaagaggaggtttctggttcccgctcccaagtctgtggagtggaagaccgcgtatattgacgggaggctgcaccgccggatcgccatgctggtcagggccgccggttgcggcagcatctccgggtttatcatccggctgctggagctccatatggaggaacatagggaggatatcgccgccctgctcggtgaggtctaccgtccctgggatgaggacgggcagccgggagaaccggcccgccgataaaatgttgtcattgtccaagaagatatatcatgacaggaaagaacgtaaaagaccggatgggtcccggcgggatggacgcggaccgcatccgtgagatcatgggggaagcacctgcctgtccccggaagggacgtggaacgtccggtaacgacataatgcgtcccgcaaggaaaagcggccccatgcagccgtccgtctatggggaggaatacctgcatggcattgcgggcgtgcagcgccggtcactgcatattcctgccgccctgcaccggaaactgtccatcctggcgggagcctcgagaaatggaacggtcacgctggaggggttcatcaaccaccttgtatcgcggcatctggaagaatacagggaaacggtggagatgattctggaagagtccctgcccgaccggtcataatagtgtttaacatttaatgcaagaagtatgatgaaaaaagaaaaagagttgttggttgccgtcgccagccagaagggtggcgtgggaaaatccgtctttacggtactgctggccagtgtgctgcattaccgcaaaggcctgcgtgtggcggttgtggactgtgactacccgcagcacagcatcgccctgatgcgtgagagggacatggagagtgtcatgaaaaatgacgacctgaaggtgagcctttaccggcagcacgagagaatccggaagcctgcctatccggtcatcaaaagcgatccggaaaaggcggtggaggacctgcatcgttatatggacgaaaagggggaaactttcgatatcgtgcttttcgaccttcccggaacgctccgcagcgagggggtggtctatactgttgccgcgatggactacattttcgtcccgctcaaggcggacaacatcgtcatgcagagttccctgcagtttaccaaggctctggaagaggagctggtcgccaggaagaactgcaacctgaaagggacctggctgttctggaacatggtggacaggagggggcggaaggacctgtatgacgcctggaaccgggtcatcgacaagatggggctgcggctgctgtcctcacacattccgaacaccctccgctacaacagggaggcggaccctgtctgcaagggtgtcttccgttccacgctgtttccacccgatccccatcaggagaaaggctccggccttcctgaactggtggaggagatatgccgtaccatcggcctggaggaacccgataccgaccggtagcggatgtcagggtatagacaccttaaataaggacttttagcctaagataaagtaagctaatggcgtgataataaggatcttataattacgatatctcctgtaaaagcattaccttagtagtgtaataataaaggaggtaataaattatgaacgagcaaatcagaagcattttagcacaagaaacgacaaagacgagcaagatccggcaactatatcttctgggtgttccccgtgcggaaatcgcacgaatggtgaccaacggaaactacggctttgtagtgaacgccctgcgccgtatgagtgaatgtgagtgcggtccgaacatccaaccgttggcagccgcaccggattacactttcaaccgcaagttcggtatcgagatcgaggcttacaactgttcccgcgaacggctcgcacgcgagctcagggagtccggtatcgaggttgtggtggaaggttacaaccataccacccgtccgcattggaaactcgtgacagacagtagtctgaacgggaatgacaccttcgagctggtcagtccgatccttgtcggcgaagccgggttacgtgaactggagaaggtctgctgggtgcttgagctgtgtgatgtgaaggtgaacgggagctgcgggcttcacgtgcatatcgatgccgccggtttcagcatggagacctggcgcaacctggccctgagctacaaacacctggaaccggtcatcgacaggttcatgcctgcatcccgcagggacaactactattgccgtgggctgggccatgtctctgacgggatgatacgttccgcccggacggtggacgagctgaaaggaaggatcggtgaccgttaccacaaggtgaaccttgaggcctactcacggcacaagacggtcgagttccggcagcattcgggaacgaccagcttcacaaaaatgcgaaattgggtgctgtttctccacaaattggttacctttgccacaaggggacaggtgcctgcgggcaccgcgctccaggacatccccttcctggatggtgaacagaaactatattatagggacagtcgcgaaataggcttaaaattataacaaattgattgtcaatgtgataaaaatttcatatcttagctacaggaattaaaaattcctccg

SEQ ID NO: 10439 - DNA, 35339 bp, Unknown
  gut microbiota DNA sequence
tcccaggcccagccgatcgcctccttcttgaaatagtcgccgaacgaccagttgcccagcatctcgaacatcgtgtgatggtaggtgtcatggccgacctcctccaggtcgttgtgcttgcccgacacgcgcaggcacttctgcgtatcggcggcccggggatagggacggggaatattcccgaggaaaatgtccttgaactggttcatacccgcgttggtgaacatcaacgtcgggtcgtttttcaccaccatcggtgccgacggtacgatcacatgatccttccctgcgaagaaatcgaggaaagcctgacgaattttgttggattccatatactgtgttttcaattctttgcgttgttcataagacacactccgcagattccggctgcctgcgctcaggctgtcatccgctcgaatccgcgaaacttaaagaagttacaagattgcaaaattacatattttaccttaattttgcatcacttccaaggagtttttcagatcatggcacgaaaaaagcagacgttcgatccccacgccctgacccgtgaggtggtttcggccactcatgaggtggtcacggtcccgttccgcctgcgcacctaccgtgtcattcgcaaaatcctcatcatcttcatcgcagtatcgatcgtcaatgtcgtcttcgcaaatgtcttctacacgccgaaaatgtaccgcatcctgcgcgaaaattcggagctggtcttcaaataccggctccttcaggacaagatccgcgcggagcagcgtaaactggacgaaatacaccaccgcgacaacttcgtttaccgggctttgttctcggccgacaccctgaatatcggagggatctacaccccctatccggcgtccaaatacgcggctctggcgggcgacgaatacgccccgctgatgatcggcacgtggcagcagctcgacgctttcggccgccagctctaccgtacctccgtttcgttcgacgagttgcaaatcctagccaagaacaaggagaacatgtccacggcaatcccggccatctggcccatcgaccgtcaggccctgcgcaggggtatcgagccgttcggctaccgcaaccacccgatctaccaccgacgcatcctgcacaaaggcatcgacctggcggccaacatcggcaacaacgtctatgccacgggcgacgcgacggtacagtccaccgacctgggacagccccgcagaggatacggcaagcagatcctcctgaaccaccagtacggctaccagacccgctacgcacacctgagccagatcttcgtcaaacccggcgagaaggtcgtgcgcggacaactgatcggcaaggtcggcaacacgggcggcgtgaccggcccccacctgcattacgaggtgattcacatgggacaggtcgtcaatccgatcaactatttcaaccgcaatatgaccaacgaggagtacgagcgcctgatggaacagatgcaggagctcaacctcgacaccttcgacgaataacatggcaagaacccgcagaccgatcaaatacgccacaccgcgcacgcccaaacagaaggcgatccgcatcacgtttcacgtgctggtgtggttcggcgcagccatcctctactacgtcgggttttcgctcttcttcgacacgcccgtcgaatacgagctcaagcactccaccgatcagttgagggacgaatacacccggctcgaagcccgctacgactcgctgcgcacagtgatggaaaatgtttccgagcgcgaccgcaacgtcttcaacatcctcttcgaatccgatccttacgatttcgacaccgaatacgaaaccaagcggctcgcaacgtacgaaagcctgctggacaaatccgaccgtcagatcatcctggaactcaaagagaaggtcagacaatccgaagcgacgctgaccaagctcaacgaatcgtacctcgaactgcaacgtctgctggatacggtcggcgacggccgcaaccggattccggccatacagcccgttatcaaccagcagctcacgctgctcaccgcctcctacggcatgcgcatccaccccttctaccgcaccctgcaatcccatcagggcgtcgattacacggtgcccgaaggttcgcgcgtcttcgccacggcggacggccgcgtgaaggagatcgccacgcgctctacggcgggccgcaccatcgtcatcgatcacggcaacggttacgaaacctcgtacagtcacctgctggcggtcaatgtccgccgcgggcaggaggtccgtcgcggcgacatcatcggactttcgggcaacacgggactttcgatcgcaccccacctgcattacgaggtgcggcacaacggcatgcgcgtcgatccgatccactacttcttcatggaactctcacccgtcgagtaccagcggatcatccgcatcgcccagtcgggcatgcagtccttcgactaatttttcgaatcgcgaatgaaaaaagaaacggctatctatcccagccaccgcaaattgctgggcacaacgctcgccgcagcgatcatgacgaccctctcctgcctgctcgtcatcgtacagccgcatggaaaggtcgggctggtcatcggtatcgtgggagcggtcttcttcggaggatgtatctgcatcttgttcatcgtgctgctgaaaaatttcttccgaaacaggccgactctgttgctgactccggacagtctgcggatttacgtaccggcaaaagggatatacatcacgatcgagtggcagcgcattgcggatttcagcgtattccgaacctacgggcagaaattcatccggatcgaactccacgatcccgaccgggcgatcgacgaggaaaaaaaccggattgccaaagggcttatgcgctggcaaatgaaatactttggatccccctacgcaatcacggcttcaacagtcgatatcggcacggcggaactcgaaaaaatcctgcgggagtatttacaggcatcccgcgaaaaatccgctgcgaactgaccgaccctcccgcaaaagcggttctccgagccgatcccgcatatcgtcggaaatacgctcgcaccgtccgtcaatgaatcggatcaagatatgagacgctctatggccggtatttacaggctgcagactgattttccgaacgtgattatacactttcatatacacctcttcgggagcgcagtagcccaagctccctccgaagaggggattctggagcagaattatgaacgcggccaccagccgcgaaaagcgatcgtcggacaaggggcagattgaaaatgtaattgcccttccgaaaagacgacacggagaaaatcgctgcggcacgctcgcgtcagcgtttgcagatctcgcggaaatcgcaatagcggcaggtgtgctcggcatcctcgcactgacggaacggaatcgccggatcgaacatctcggcaagggtttcgcgcaacagccgttcgaaaggctcgcggtattcggaatagcgtacgcccgtgcgccccaactcccgatcgacgagccgggacgaatagtcgtcccggtgcatggcccgcacgtaatagagcgtcggctcggcatccaccccccgcgaatggaaaagcatcatcgaatagagcaacgtctgtaaaatattggattgacgctgtttggcctctccacgaaagagcgcttcgaccccctggaaatcgaggtgcggttcgccggtcttatagtccacgacccgcagcgtaccgtccggcaggcggtcgatccggtcggccaggcccccgaagaccacacgcagggattttccggcgctttcgaacgcaaactcctgcccgatccgctcctcgagtccttcgaccgtaaaatcgtcatgcgcggcgtcgtaaggcaatacgccgccccgaatatagcggattacaatatctttgaccaacaacagattaccgctataatcctcaaccgtcgcttcaacatcctgcaaatagttttcattgatggccgcaactaccgccttctccacttcggacgaacgggtcagcgcacgcaacgcctctccgtagccggtcttcccgacaaagggagcatagagccgctgcaaagccgcatggagaatcgtaccgaacatcggtgcatcgacctcctccgaaatctcgtcgtctggctccaaccgggccacggagtgaaaatagaagcgcaggggacaagccacataccgaaaaaaagccgtaggcgacagccgcacgggatcgtccggcgcgaggaagcgggccaacttttcggcggtttccccttgcttggggacctcgatcggcagggtttccatccgattgacatcgataccgacctcccggcggaggatctcgaagggagtttcgtactccagttgatagatgtaacggctctgttcgccggtggtcttgtcatcggcatgagcgcaatagagcatccgcacgttctcggcccgttgcagcaaacgataaaaatagtaggcgtaaaccccctcgtgatgctccggcgtaggcaaggcataggccgcccgcaggttgtagggaatgaacgaagtaccggtcacgacgctgccgggaaagttgtcgtcgttcatcgagagcaaaatgacgttgcggaaatcgaggttgcgggtttcgaggatacccatgacctgaattccctccaaaggctctccctcgtagggaatacgcagggtttgcaggtgtcggcgaagaagtgaagcatagatcgatatagacaattctatttcacaattatccagtgaattgcgaagttttatcacctcttcggaaatgacgttcaggaactctacgcggcggcgtgcctccgtatcttcgtaaggcatccgggcgatctgcgcgatcaccgccagcaggtagtccgaaaatccgcgccacccctcgacgctccggaacagcgtagcaagcaacggcgtgcaggccagccactccgccgcgaccgtgatacgccggtttcggacgatctcctcctgcatacggacgatccgggaggggtcgctttcgaggatataagggtgcgacagaagtcccagcacgtcggcgtggtaaaaaagcggtttgccctccttctgccgggcatggttttgcagttcgatcaatcgttcaacaaacgaatagaaaaggctctgtttcagcggatagcccatcgtcacattcacctttccgatctccgcaggcagagcgtgcagcaagggcagcaacaggttttcgtccgtgagcacgacggcagtctccttccccagcggcccctgttcggcagccagatcccgcaggatcgaagtcacgtacttgcattgcacggcgttcgataccgtagaaatcgcttcgattcgcttcggcgaccggaaatgatcgtgcggaagttcgcgccgggcgggaaacaggatccggttctcacgcaggaacataccggcctcctggtcggcattgtccgtataataagtatcgtaatcccagtagaaatcggtttcggcagccgtggagagaaacttgaaaagccgtttctcgcactccgagagcgcgttgaagcccgccacgacgaaccgccgggactccgggaatgcgaaaccgccggccttgatccgctcggcggccgcccggtgcaccatccccgtataggccatccccagcgaccggagccgctcgcggaaagtccgatataccgggcccagcgtctgccaaacggccaggaagcggcgtttctcctcggaaagggaggtttcgtccgtgaaattggcccagaaagcgatgattttcaactggacggggctcaaatacgatacgtcggcctccaactccttgatgtcggccaggttgcggaaaagcatatcggcgtcgatcagatacttgtcgatcgtatcgaagtccgtgaggagcatctccccccagaaatagaacttgtcgaaggattcgggatgaaattccgaatagactttatacagttcggtcaccagacgcacccggtcgccgatgcggagacccgaaatctcgctcatcaactcgtcgatagtcgtccagcggggctgccacaaaggacgttcggcgatgccggacaaggcgtcgataaagaaaagccgcgcacgtcgggaaggaaacagaacagaaagggacgaaatatcgtccccgtatctgtcgtataaatcggcagcgacctcctgcaggaatcccggcatggcgagtgcgctatttgaaggtgatctcgcccccgatcagggagttcgaagtgtgcagcaactcgggctctccgatgcaggtgatccggcccttcgtaccgaccgacgcctcgaggcgctccggagcggtgatggtcacgtcggccttggaggtggaattgacacgcacggacatcacttcgacagcggcagcgtccacctgggccgtggaaacattcagatcccagtagcggaccttgcccgtcaggaccacgacgctcttgcccgtaacatccatctgaagatctttcacatcgagcgctgcgctgacgaccgccccgttggaaaaccagcaccgggcctgcggaaagtcgatcggctctccgaacgtggcattcgcccccgaaatacggatctccttcaggttgttgtaataaaccgtcacctcggtttcggaacgttcgcgggtgccgatgcgctcggagatcacgagcatcttattcttgttcacctccgccgtgaagcggctgtcgtaaacgcctttggtgttgaaaacgatcttgggagcctgatccataggcacccgctcgaaccggatccggaacaacccctcgacgatcacaccattgaaggaaggaagccactccattttctcgccgctcgccgctgcgatttcgggagccaactccccccgatcgatcagatcattctgggccgaagccgtaaatcccagcgtcaggagcgccaggctcagtatccatcttttcatagttttttctgttttttgctttttcgtaacgccaagatacgatatttttttgaatttctccgtccgtttcccattttatcgctacctttaccaaaagaacgtcggtttagccggcaggcatccggctccggcagccttcatccgccaccggcatcgatgcggccggaaaaaatgcccgggcagcagcaaacctgccgcaaagcgggattccaccggccgcttccatccgacattttgaagcgataaccaagtgagagcgagaatactgaacgccagcgccgggtcgggcaagacctaccagctggcatacaaatacgtgcgggacgtggtcgagcaacccacgctgtaccgtcacatcctggccgtcacgttcaccaacaaggccaccgaggagatgaaatcccgcatcctgtcggagatacatacgctggcctcgggcggcaaaagcggctacctggccagcctgtgcacggagctgtcgctcgacgaacggaccgtccgcacccgagctcgggaagcccggacccgcatcttgcacgactattcgcggttcacgatcctcaccatcgatacctttttccagcgcattctgcgggctttcatccaggagttgggactcgatctgaactacaacgtagaaatcgaaaccgcctcggtactctccaagagcgcggatgcgctggtcgaacagatccgcatcgacgaagaactgcaacggtggctcacggccttcgtgcaggagcgcatcgaagacggcaaacgctgggatgtacgcgaaggcatcctcgccctgggcaacgaaatattcaaggagagcaaccgcgaaaccctctcggcggagcgttccaaggccgaactggaccggatcgtcggcaaggcgacggggagggccaaggccgggaaaaaggagtttcaggaattgggcgttcgggccatgaacctcatgaataccgctggcgtcacgacggccgacttcaccggcaagagccgcagcttcgcgggctacttcgcggccgcagccgccggagagatcaaagcacccacagctaccgtgcgcaagatgagcgcgacgacggaaggctggtgcgccaaggactcgccggccctgccgctggtcgcggagcttcagccgctgctggccgaactgtgcgcccgttacgaccgcagcatccgcttctggaacaccaccgacctgctgcgcgagaactaccgcagcttcgccctgctgcaggacctttacggcaaagtacggcagatgtgcagcgacgagaacgtgatgatgctctccgagaccaagaacatcctctcggagttcatccgccacaacgacgccccgttcatctacgaaaaagtcggcaaccgctacgaccggttcatgatcgacgaatttcaggacacctcgacccgggagtgggaaaacttcctgcccctgctgggcaacgccatggcacagtcggaacagacctcggtgctgatcgtgggcgacatcaaacagtcgatctaccgctggcggggcggcgactgggagatcctgcaccgccgggcggcacgggagctgggagaagcgagcaccgaaacgatacacctgaaggagaatttccggagcttgccgctggtggtggagttcaacaaccggatgatcggcaaggtggtcgaaagcgacaacacggcactgaaccaactgctcgcccaggctccgccgcacgccctggggggaaaggcccgggaagagctgcgcgacaccctgcaggaggcctatcgcgaacacgcgcagagcgcccgcaagaaagggctgcatcccggctacgtcaatatcacccattacgctggcgagccgcccctcatcgaacgcatcaaagctctcgtgaacaaggggttccgcccaaaagatatgatgattctggtgcgcagcggcacggacggcaccaaagtcgcctcggcactgctcgacttcaagcgccggaacacggatccccgctaccggttcgacgtgatgacgcaggaggcgctcatcgtcggcacggcaccgatcagttcgttcgtcatcgcctgcctgaagctggccatgaatcctgcggattcgctgagccgggccatttacaaccatttctccgccaaaccctccttcgatgcggaactcacggaagaggaggtcgtctttctcaaatcgctgcggctgttcccgcccgaagaggcgttcgaacggatcgtcatgcggtacgaccttcaggagcgacgggaggagatcgcctacctgcaagccgtgcacgaacagatcatcaacttctgcgcgggccgcgtagccgacattcccctcttcctcaaatggtgggacgaacagggaagcggccgctcgctgagcgtcgaacagggcgaaacgaccatcgaaatcaccacgatacacaaggccaagggattggaaaaaaaggtagtgctgatcccctactgcaactggacgctcaatcccaaatcgagcggactctcggcgaacatcgtctgggccgaaggcacggacggggagctggagggaatcggccggtttccggtgcggtataaaaccagcatgggcgaatcgctcttctcggccgactattaccgggagatgatctacgcgcacgtggacaacatcaatctgctgtacgtagccctgacacgggccgtggaatcgctgcacatcttcatcccgcagaagggagccaagggaccgaacgtcggacaattgatcctgcaaaacatcgccccggaggacggcacggtccggctggacgggctggagggcagctactcccgggacgaagccgccgaaacctacgaattcggcgaatttgccggaccggagccggatacgcaccggaaagcgaaagccgcgcacgtcctgctcggggactaccccacgtcggagccgcagttgcaactgcggctgccgacagaacgctactacgaggaagagggtcgggccgaactcacgccgcgcgacttcggtatcctgatgcaccgggtcttcgaaaacgccgcgacgacggacgagatctacacggccatcgaagcgatgacccaggacggcgtactcgacgaaaaagaggccccccgcctgcgggagctggtcgaaaaggccctcgcggatccggtgacggcggagtggttcggcggcaggtggcaggtggtgcgcaacgagaacgaaatcatcctgccgggcagcggaacgacgcggcgccccgaccgcgtgatgaccgacggcgagcgggccgtagtggtggattacaagttcggcgaccgggaaaccgcacgccaccgcaaacagatccgcgagtacctgcgcctgctgcggcagatgggttacacccggacggaaggctatctctggtatgtacgtctgggacgcacggagcgggtggaggagaaggaggattgaaaaacggggagaacagaagcgaataccgaaaaaacagggacaaacggcgaatttttcgaacagataatcgtatatttgatacgtttttgggacgcatcccgcaacggaaagagcgagcgtccccgacttatacaaaaaatgcaggccggctcttgcgaacgacaatcgcagaccggtcccgaaaaacagcttcatgagatcaatcctgctggacatcatcccccgccgattccgccgccggagctacctggtttccggcacgatcttcctgcgggccctgctcaacttcgcaggactggctctgctgattccggtactgctgctgatcctcgacagcgagagcatgcacacgaacccctggctcgaacggctgtaccaagcgggcggattcgaatcggaccgggcgttcgccctgaccgtatgcggatgtatcgtcgcactgatcgcattcaaaaacctgctgaacctcttcctgctgcgctacgaacggcggtatatttacgacctctaccggtgtatgtcgcggcggctctatatcgaatatcacgaccgggggctgggattcatcaaaaacaccaattcggcactgctctcgcggaacgtcaatttcgtctgtctggcgttcgttacggggatcctcgtaccgctcgcgtcgatcacgagcgagagcatgctgctcgcactgctgttcacggcgctgctgttctacaaccccacagtcgcgggactggtcctgctggtattcattccgaccgtctggttctactacagcgccgtgcgcaaacggctccaccgttacggcgtacaggagaacgaagcccagcgcgagaaggcccgcacggtcgtcgagaccttccggggatatgccgacctggagatcaacgatgcctttccttcgatgctgcgccgcttcgaccgggcgatggacaagatcgttacgattcagtccagaaatatgaccgtcaatgccttgccttcgatcttcatggaggtaggactggcgatcggcatggcgctgttcgtggcggtcagcctcggtacgccgggcgatgaagcccgggtcctcttcggcgtattcgccgtcgccgggttgcggctgatgccttcggtacgcaacatgatgtccggatggtcggcactcaaatacaaccgctacaccatcgatatcctgcgggacatcgacctgaacgacgaaaagccggaaccgtcagccgcacagcctccgctgcccttcgaacgtgaaatcgccgtgcgcgacctctcgttccgcttcgacgacgagcgcggcgacaaagaggtgctgcacgggctgacactcacgatccgcaagggagaacacgtcggtatccgaggcgcatcgggggccggaaaaacgaccctgttcaaccttctgttgggattctatacccccaccggcggtgaaatcacgatcgacggcgagcccctgaccgccgccaaccgccgccgctggcaaaatgccgtcggctacgtttcgcagcacgtgttcctgctggacggcaccctgctggaaaacatcgccctgggcgaagaggaggagaaaatcgaccgtcggagagccgaggagtccctgcgtgccgcccggctggaagacttcgtgcaatcgctctccgcagggatcgacaccccgatcggggaggccggcaacaaactgtcgggcggacaacgccagcgcatcggcattgccagagctctctacaaacaggccaacattttattcttcgacgaggcgacctcggcgctcgacagcgggacggaggagggaatcaaccgttcgatcgccgaactgtcacaacacaacagagatttaaccatcgtggtcatcgcccatcgagaaagctcgctggagtactgcgaccgcatcatcacactcgataacaatggatagagaatatatcatcgccggattccgcatccggctggaacaggccgaccggctcttcgtaagacccggcagccacatggctcgggcattcgaaccgttcgccgcagaagcggacccggccgcgcccctgaccatgcgcctgattccggactgcacgataaataaaaaattaacaggaggagagccgaacagggaactcgacgtatttccgttcgacgatgcggaagccgactgccacttcgagcgtacgccgcgaggttacctgttccgcatggttccccgcaacggggatcgtccgacgctattcttcaaagcgttcgattcgccggatgtacagagcgacctgctcgccgacggacgcgaaccccatcaatccctgatgcgtttcgggctttggatcatgttcggcatcgccatctcccctgaagccattgcgatacactcctcgaccatcgaatgcgaaggccgggccgtcctgtttctgggagaatccggcacgggaaaaagcacccatacccggctgtggcaggagcacattcccggagcacggctgctcaacgacgacagcccgattatccgaatgtaccaggggcaggcgaccgctttcggatcgccctggagcggcaagaccccctgttaccgcaacatttcgcggccgattgccggaatcgtccggttgagccaggccccggccaacgaaatcacccgactgtcaatcttgcgggccgtcggatcgctgctcccgtcctgccccccggcattcgcctacgacagcgatttgcaggacagaatctgccgtacgctgtcggacattctcacacaagcccctgtgtggcacctggcctgcctgccggacaaggcagcggccgaactctcctacgccacggtcctcggagggaaacagagagcctgaaaacaattgatcatggaaaaaaccgtagcgaaccggatcgccttcgcccagacgagggacctgctgctcgaaggccaaaacgtacgaatctgcgtccagggacagagcatgctgcccttcttccgcagcggcagcgtcatcacgctgcggcccttgcgtcacggggatctgcgacgcggagcggtggtgatggccgaaaccgtacaaggcaatttcgtcgtacaccgcatcattcgggcgactccggaagaggtcacgctgctcggcgacggcaaccttaccacggaaacgatgcccccggccaaggtttatggagttgtggattgtagtgccactcaccgggtattggctcgggtatggctctggctgcgccccgtacgacgttatccgctctgggttctgcggcggatttacagaaaataactcccgaatcggattcgagcaagagttatgctctctgtttctttaagttctgcccgccccgaatctcgaaaataggattagagcacaataccgtttgcctttgcggtactcattatgcagtaagtaccgatggggttccaattgaatgtacggctattttgaatcatcaatccgaaagtattttttatggcaaatataaatatttgaataactgattatgaaaaaaataattctttcttgtttgttgctgggaattagcttgaccacgtatgctcaaacaagcctatttgatttatggcaggaggcgtcggagcacgtcaatatttatacttatggaattaaaaagataaacaaagatacaatatatcgtcctgacaattatcgtccaaattggaagcggaaaaaaggtgcgaaattggaaatttcttcccccacaataggactcttaaaaaagatgcttgaagaggtcgaatcggaagggtttcagttcaacccccaaaatgacacattacttttcaatgtaggtttttgtggttggtggactccatgcgatcttgttgttaaaacgtcggcagggatatctcattactacaagccaacagagagtcgtttaagattgatttctgttatgcttgctgaagacttttttataagttctatcttgtattatggcgataactccgcatttacagattttttccgacgttatgtcattcttgactcagattcatatgctgcggatactttggtttttcgtattatcttaaaagatgggaaaatcatgactccatctgaagtgtggaaaattgccgatgtatatatgtggggaggaaattattttactgaagacgatataatatttttgaaaaaattgagtcgttattacaataaatcggacctgaatcgattagaaaatttttcgcgcacaatattattgcagtaaattgttctctaatcttcagaaaaggcatttccatactcttttttcggcaccgaccgcaatcattgacaagcctccgttcatatcgaattcgactacttcaccccatcgaggggggggaacagaggaaatcccttcttagaaattcaagaacaccgacaccataaaagcaaaaaatagcgaaggaaattccttcgctatttttcgttatagggtcaccgattacgcttcgagcgcgaaacgcttgtaagcgataaccgtagcatccttgtccgccttgtggataaactcggcgatcgtctccttctcacctaccaccggctggttgagcagcgtattctcctcgaagaacttgcgcatcttaccctcggcgatcttctccagaatagcctcgggtttgttggcattcttcggatcctgcttcatggcctcgacagcgatcttgcgctcgtgctcgatcacatcggccgggcaatcggcctcagagatcgaaacgggagccatagcggttgcctgcatggcaacggtatgggctacctcctcgggaacgaccttgttgaagccgataagcgtaccgagcttcttgttgaagtgtacgtacgcatgacagtagggagcttcgatacgggcatagtatgccagctcgatcttctcgccggtctgacccgatttttcggtcaccatctcctcgacagtacggccttcggcattcttggctaccagcagcgcatcgcggtccgcagcatcggttttcacggcaacgtccagcatcgcgttagctgaagcggagtactccgcattctgcgccacgaagtcggtttcgcaagccaggcagaggatataacccttctgacccacgattttcgttacgacgacaccttcggtggccgtacgatcggcacgcttggcaacgaccagcttacccttttcacggatgatatcctgggcacgcgcgaaatcaccttcggcttcggcaagggcctttttacagtccatcataccggcaccggtcattttgcggagcttcattacatctgcagctttgatttccatagtcttggttttaatttcgttgaacttcgttctgcgtttccgtatcccgaccgactcggatcgctcgggcgatcttcgcacgggacggaaacgtccataatctccgtgcgaattattccgctttctgctcggtcgcagcgacaacctcggcaacggcagcctcctcggcatccacggaagccttcacggctttcttgatacgaggtttcgcatccttcttcgcaggagcatcgccctcatgagcctcattctcctgggcctccttctctttttcgagctttcgctcctcgagaccctcgctgatggcgccgcacacggcgtcgaggatcacagcgatcgacttggtcgcatcgtcatttgcagggataacgtaatcaatgtcggttggatcacaacaagtatctaccattgcaaatacgggaatattcaatcgcttggcctccttcacggcgttggactccttctgcacgtccacgacgaacagagcggccggcagacgggtcagatcggcgatcgaaccgaggttcttctcgagtttcgcacgctgacgcgcgatctgcagcttctcgcgcttggagaaattatcgaacgtgccgtcgttggtcatcttgtcgatggtggacatcttcttgacggctttacgtatggtggggaagtttgtcagcataccgccagcccaacgctccgtaacgtaaggcataccgatagctgcgatcttttcggcaacgatttccttggcttgtttcttggtggcgacgaacagcacgcggcgaccgctcttggcgatctgcttgagtgcgtttgccgcctcatcgagcttcagcacggtcttgtgcaggtcgatgatgtggatgccgttcttctccatgaaaatgtaaggagccattttgggattccacttacgcttcaagtgtccgaaatgagcgccggcttccaataatgtattaaaatctgtacgtgacattttaattcaatggtttaattttaattctcttttcttcaactctcccggtagtgaactgcggtcaatccggagagttttccgcgatcaggcaacctgtaagtaatagccgatataataataaatataggtagtcttgccggtttgtaacctgaatcgtgcttgccgaaattcggtcgtacgattaacgcttgctgaactggaacttacgacgtgctccgggctgaccgggtttcttacgctcaacttcgcgaggatcgcgcgtcaggaatccgttcttcttcagaaccggacggaactcggcgtcgatctcgcacaatgcacgtgcgatacccagacgagccgcctcagcctgccccttgataccgccaccgtccagattgatggtgatatcgtagttctctgcggtgttggtagccaacagcggctgcttcacctggaactggaggatgtcgagcggaaaatagacttccagcgatttgcggttgatcgtaatctcccctttacccggcttcacgaatacgcgagccacagcagccttacgacgacctacggtatttacaacttccataattcttacttaatctcgtttaacttaattgccttcgggttctgagcggcgtgcggatgctcggcgccggcatacaccttcagattcttcataatggcttcgccaaggcgcgttttggggagcatgcctttgacagccttctcgatgagaaacgtcggtttcttcgccaggtaatcggccggcgtagcgaaacgctgacctcccgggaaaccggtgtgtcgtgtgtagaccttgtcggtcatcttcttgcctgtgagcttcactttgtccgcgttgatgacgataacataatcaccgcaatcgacgtggggggtgtagctaggcttgttcttgccgcggaggatcttcgcaacctgcgatgcaagacgtcccaatacctcgtcggtcgcgtcgatgacaacccattgcttgtcaaccgtagcggcgttcgccgagatagttttgtagcttaatgaatccactttgtttacgtttaattaatacttatttatccaacctcccgcactatacgggtgcgcaaagatacgaagaaaatccgcaaaaagcaaaacacccgaacaaataacgtcaatatattctaaaaaagccatttacactttttacaacaaaaaaccgcgcccggcttctttcgtccgaagccaagcacggtttttttacgcatccccggcggtcaccgcagaaaatcgaccagtcggcagcgcacctgcaacaagataccgggccgacgcagaaagcgtatcaactaccgtaaggtttgaaattcttctgtccgttataacgtccgatggtcggatcgaccagtttttgcggacgcaccttgaactccacgggcagaacgtaagaaacccgcacgggataatccagaccggactccttgtcggtcatgatgcccggagtccacttcggagaattctcgaccacccgcgtaaccgcttcggtcagcttctcatggggcgaagcaagcacttcgtccacagtcacggatccgtcggtttcgacgataatccggacttgcaccactccttcgaccttctgctcttccatatcggcaggatactgtacgcgcgaaagcacccatttccaatacttttcgaaccctttgttcttaaacgacggggcttttttcaaacgtgcgacctggccatccgcaatgaccagtccctcggccggaggtgtcgaagtcgtcgtacccggggcatcggccggagtttgagccatcgcgggtaacaccagcaacaggctcacggcataaaacagaaattttttcatagcatctgtctgttggtttctacataaacaaaaatagtgaaagccgagagacaacgggaccttgttcacggttttccgaggcgcatcctatctaagactatgtcaaagatagcgagaggtaagagcaattgtgagaacttgttctcgaaaattgccgaaccgaatcctatcttctacaaagataggaaaagccggatgcaaaagcaaatttatttgcattttcccgaggcggaattttaagacgactcaaaaagttaggcgacagaaaacactcgaatatcaattatttattcgtttcatcgcaagaaacaggagccggacggaacaacgcaaccggaaccgccccggtctgatcccggaatccattacaataccaaaagccgcacgatcaaatttcaagcatggaatcatagctgttagcggagctttttggatgcgtaacggaccaagtcctttccgaagaaaaggagcaaggaagggggcgaattataaacgcgaccaccgacagcgaataagcgaccgtcggattcgtgctgcgatcgtcgaataagggtttcttaaaaaatataattaccaataggcacaccgcagccgatataggcgtcagcaaccttctttcccaggaaaaagaagaggaccgtctgcaaaacggccctcttcaatctatagaaaccccggactatcccaggaacgacagcagaatacctgcggcaaccgcagagccgacgacaccggctacgttcggacccatggcgtgcatgagcaggaagttgctcggattggcctcctggccgacggtttgcgatacgcgggctgccataggaaccgcagaaacaccggcggagccgatcagcgggttcatcttcttgccctccgggaggaagaggttcataaacttggcaagcagcaaacctccggccgtaccgagagcgaacgcaagcacacccagcaccagaatactcaaggtctggacattgatgaacgcttcggcggtagccgtagcaccgacggtaataccgaggaaaatcaccacgatattcatcagctcgttctgcacggtcttgctcaaacgatcaaccacaccgcactctttcatcaggttacccagcataagacagccgatcagcggagcggcgctcggcaggagcagcgagatgattacggcaatgatgatcgggaagaggatcttctcggttttggaaaccgggcgcagctgcgacatcttgatttcacgctctttcttggtggtcagcagacgcatgatgggcggctgaatcaccggcacgagggccatataagagtaagcggccacggcgatcggacccagcaattcgggcgcgaggcgggcggtcaggaagatcgcagtcggaccgtcggcaccgccgatgataccgatactaccggcctgagcaggagtgaagcccaacgcgtaagcccccaggaaggtcacgaaaatacccaactgcgcagcagcaccgagcatgaaactcttcgggttggcgatcagcgggccgaaatcggtcatggcaccgacaccgatgaagatcagacacgggtagataccgagcttcacacccagataaagataatcgagcaatccggcatcctgaatgaagcttccccagtggatatgtccgccggcgaacagttcggaatggaacatattcgctcccggcaggttggtcagcagcataccgaaagcgatcgtgaagagcagcagcggttcgaacttgtgtttgatggcgaggtacaggagcaggaaagcgacgagaatcatcgctatattcccccaggtcgcccctgcgaatccggtctgattgaaaaaatcgaccagactgtcggacaatgaaatggatccagctgttaacatcatatcacttattcgataacgattaacagatcaccttccatcacggtagcgcccttctggacgtggatggatttgacaacaccgccgcgttcggcatcgatgttgttctccatcttcatcgcctcgagcacgaaaagagtttgacggggagcgacgcggtcgccctccttcacattgaccgagaggatcgtaccgggcagcggagatttcacctgcaaaccgggaccgccggcagcagcctgtgcagctttgggagcggaaggcgcagccgtagtcggagtcaccgacagccctgcagctttcggagcgggaacgacctgcggtttcttcatcttgctggcctgctcgccgacgatttccacctcgtaagcgacaccattgacggtgacgttggccatcgtcgattcttcgttcacgtcctcaatcgaaatgtcgtattgatttccgtttattttcaatgaatagtctttcataacttattttctgtaatctggcatttgagttaatccgtgaattttcgagttccagggcgagtaagcccgcttgatgctcaaaatcgtaagcatctcggtttcccggtcgtgacgggcgctgccgaagagcttcagcgccgtcataatggcggctacggtctcctcgtccaattccgtctgcgacggtgactgcttcttgcgctgatgcgtaaagaaagaaccgaagcccttcattacaaagaccagcagaaggagcatgacaatcaccaggcagaacccgacgcatgtgatcgtaaggatacccgaccaatctatctgtgtcataattcgtcgatttataaaggaatattagagtgcttcttggccggattctgcaaacgtttggttgcgagcgactgcaaagcgcggataatgcggaaacgcgtgttgcgcggctcgatcacatcgtcgatatagccgtagcgggcggcgttgtagggattggagaacttgtcgcggtactcctgctccttctcggccacgaacttggccttctcctcggcgctctcgaaagcggcgagctccttggcatgcagcacctcgacggcaccgctcgcacccatcacagcgatctcggccgtcggccatgcgtagttgatatcaccgcggatatgtttcgaagacatcacgatataagcgccgccgtatgccttgcgcagcgtcacggtgatcttcggaacggtagcctcgcaatatgcgaacagcagcttcgcaccgtgcgtaatgacaccgccgtactcctgggtcgtacccggcaggaagcccggaacatccacgagggtcaccagcggaatgttgaaggcatcgcagaagcgcacgaagcgggcggccttgcggctggcgttgatgtcgagcacaccggccatgtacttgggctggttggcgatgataccgacgctctgtccgttgaagcgggcgaagcaggtgatgatattctttgcgaaatcggcagccgactccaggtattcgccgttatcgacgatagcacgaatcacctcggccatatcgtaaggcttgttcggattgtcgggaatgatctcgttcagagaatcctccagacggttgatctgatcagtgcagacgaccatcggcgtatcctccatgttgttctgcggcatataggaaagcaactgacggatcaactggatgccttcctcctcggtttcgacggcgaactgagctacgcccgacttggtcgtatgcatcgtggcaccgcccaactgctcctgcgtcacgtcttcgcccgtcacggtcttcacgaccttcggaccggtgaggaacatattcgaggaacccttcttcatgatgatgaagtcggtcagcgccggagaatagactgcaccgccggcacagggaccgaagatggccgaaatctgcggaatgacacccgagcacatcacgttgcgctggaaaatgttggcataacccgccagagcgttcacgccctcctggatgcgggcaccgcccgaatcgttcaagccgatgcagggagcgccattgcgcatcgccatatccataatcttgcagatcttgtcggacatcgaaagcgacagagaacctgccgtcacggtgaagtcctgggcaaagacatagaccaagcggccttcgatcgtaccgtaacccgttaccacaccgtcgccgaacgtatgcttcttctccataccgaagtcgtagcaacgatgcgtgacgaacatgtcgaactcctcgaagctaccctcgtcgagcagcatctggatacgctcgcgtgcggtgtacttacccttctcgtgttgcttgtcgatcgccttctgaccaccgcccatacgagccatctcacggttctcgatgagctggttgatctggttctgaatttcactcataatcgaaaatatgctgttaaattatttattcttgttctcgcaaagctccgtcaggatgccctgggtggatttcggatgcaggaaagcgatggtcatgccctcggcacccttgcggggcgtagcgtcgatcagacggatgcccttggcggctgcatcggccaactgctcctcgatattctcgcaggcgagtgccatgtggtggataccgatgcccttgttctcgatgaacttggcgatggtcgattcgggcgacgtaggctcgagcaactcgatcttcgtctggcccagcttgaagaacgccgtgcggactttctggtcggcaacctcttcgatcgcataacatttcagacccagtacgttttcccaatagggaatcgactcatccaggcttttgactgcaatgccaagatgctcaatgtgagatactttcataatttcaagagatttaattaagttgaatatcgttgaatttgaattttcggaatcctcaaaaaatcatacaaaaatagatgaaatatctgaataagccaacaaaaaaacgattttagtcggaactattccgactttccggcatatgcagggaaaaaacggaaaaacaaagcggttatccgtgaaggacaaccgcttgaaatcaagaaaaccgaaggccgaaaccccgccgcagattataaaataccgcgatgacagcacacgtcagcaattccgagagcggcatggcgagccagatgccggagatcccggccacacggggcagcagcaggaaagcgggaaccaaaaggacgaagcctcgaagcaaagcgaacgtagtggcggctcttacccgttcaagactctgataatacccgatgacggtcaggttcacgatgaaaaagacgaaacccgacgcaaacaacggaaacccttcgatagcgataagggcagccggcgtatcggtatcgaggaagaacccgaccaatatacggggacagcagacgaacaatcccatcgcggtcataccgcacacaacagccgttgccaatgcgatccgtcgtgcctgtatcacccgccccgaagcgcctgccccgaagttatagctaatgatcggctgtgccgactgcgcaatggcgttgccgaccatgaacacaaaaggaatgtagtagcaggcgatgccgaacgctccgacgccgtcatcacccaaatagcgcataaacacctgatttccggtaaacatcaaggtcgcaagagtcgcttcgcccaacaaggccgaggagccgatacgacactgataccccacattccgcaacgagaggcgcaagctcttgcggctgcccttaagcggacagagggacaacgaacgggcccggcacagcagataccacaaagcgataccgccgccgacggatacactgatcgcggtagcgaacgcagcccccatgacaccccaccccagcgggaaaataaacaaccagtccagcaacacgttgagcaacgccgagataacactgcaccacatcgccagtttcggcgccccgtccaaacggataacgaaaagtccgacggccgtccacatctggaaaaccaatgccggagtaaaccacaacaaataatccttcaccaacggcagcagatgctccgaagcccccagcaacacagccgtccggtcggggaaaagcagaatcgccgaagacagcagcaaggtcaccgccgtcacgaacaccatcgcctgcgtgacgttcaggcgggccgcccggatcttcgactgcgacaagtggatcgaagccaccaccgagcagccgataccgatcatgaagcccattccctgaaagaccatcagcagcgggacgtagatattcacggcggcgatgccgtcgctgccgacgccctgccccacgaaaataccgtcggccaccgtaactgccgaaatactgagcataccgcacaaagtcggaataaacagacggcggaacaataccgaaaccttcagcgaaccgaaatcaatagcatctctttccatgcacaatcatactaaattcaactacttgcacatttagcacaaaacaaaaaacaccggacaagcgattggttttacccagtcatcttatccggcattatattgccctccgatgaggattacaaaactttcaatgagatttttcggtgacaaaagtagcgatttaatccgaagcgtgcaactatcgatcggttaattgctcccgtattatcactccctggtccgcaagttatcgtcgggagttttccatcgttccacacgacgcaggcagcatccctgcacctgccgacgcaatccggaatcggacaggatcgcatcgagcgtatcggccagctcatcgagctccggacacgcgatataacgggccgcatcgccggcagtcagccgattgcggcgggtatcggagagcacggccggaatcccggcatagagcgcttcgacgacaggctgcacccgcccccgtttccggggcaggtaaaccaggccgtctgccatgcggaaaaaagcgctcaactcctcgggcgagtattcgtaaataaaattggtacgcagcgccagacgacggtcgcgagcggtgcgaagcaacatatcggcatagaacgaacgacgaccgcaaagcacgaggtccgcaccgagccgaccgccggccatcagatcgagcagcatccgctcctggccgagcgtttcgaccgtcatcaaggtcagaatataccgctcgggcaacatgaacttacgacgaatgacctcatccgactccccggtcgcgcagcgcatacgctgacgcacctgtccggccgctttcacagccgtcatccgaaaacgttcgtcctcctcgtgcgcctttctgttctcctcgcggaggctctcttcctccatatttcccgtcttacgttgcggtccccatatattctccataatataaatctcctttccggcagaaaaccggtctttatttattttttttcactatcttcgctaaaaattacgatgcctatgaaacgagttcttttactccttactgtcgttttttgcacgttgggcgcatcccatgcacagaacatcgtcatcggagagcgggcccccgaactcaaaagcgtcacttggctcgcatcccggaatccggccgcagcggatctttcgtacctcgtattcttccactcgtcgaacaaaggctgcacggcttcgctggacgcactccgggacctatctaacaaattaggctccaaactgcgcattatcatcataacacaggaagattccgaaaaaatcgccccgattctcacgccctacatctccgaacgaatcggtgtggcactcgatcacgacaaaaaagtattcggcagtttcggagtcgatttcgtgccgttcagcgtgctgatcgatgccaagaatcgagtgctgtggatgggaaatccgcagagcatgaccagttcattcatccagaaaatagttcaataaactccagtaatacctttaattccgtcatgtcattcaccaagataaaccactacgaaaaagagtatgccgacacacatcacgagtgcgccctgactgtaaccgaaggcgtggaaaaccaacccgtagtcaatccctatttcgtccggaagaaaaagcgcgcgctcaccaccgaggaatatgtcgagggcattcttcaaggcaacatcacgacgctttcgcaggccatcaccctggtcgaaagcagcaaccccgaccactatgcccaggcgcaggagatcatcgaaaagtgcctgccgcatgccgggaaatcggtacgcatcggcatcacgggcgtcccgggagccggaaaatcgaccttcatcgaagccgtaggcaatatggtcacctcgctcaagcacaagctggcggtactggccatcgaccccagctcggagcgcagcggcggttcgatcctcggcgacaagacccgcatggagagcatctcgtccaatcccaaggtcttcatccgcccctccccttcggccgggtcgctcggcggcgtagcccgcaaaacccgcgaaacgatcatcctgtgcgaagctgccggattcgacgtcatcttcatcgaaacggtcggcgtgggacagtccgaaacggccgtacattcgatggtcgatatgttcatgatgctccagatctccggtgcgggcgacgaattgcagggcatcaagcgcggcattatggagatggccgatatgatggtcatcaccaaggccgacggcgagaacatccacaaagccgaactggccaaaacgcaatatcagggtgcgctgcgtcttttcccggtcccggaatcgggttggcggccgaaagtctatacctgctcggcatacacaaaaacgggactcgaggaggtgtggaaaggcgtcgaagagttcctcgacttcattcaggcgaacggatacttcacgcacaaccgcaaccgtcagaacaagtattggatgtacgaaaccatcgacgaggtgttgaagaacagcttctaccacaacccgcagatcgaaccccgcatcacggagctcgagcaaaaagtgctcgacgccaaagtcagctcgttcgtcgcggcgcacgaattgctggagctttacttcaaaaacaagaactaacggaccacgcagcaaccgttcctgtcatacggcattgaaccaaacacttaatatcacttaaattcctaaacaatgaaacacgtaaaactattcgcagctctgctggcattcgtcatgctcggagcctgcaccgaatctcccgaggagggggggggctttcttccatcctgatcgacagctctttactggagcaaatctttgacgctgatcaaaccgctccgaaaaccatttcgttcacggcagcggaagcatggactgcaaccctcgaagagacgacgcgcacggaaccttcgtggctccgtctgtccgcctacagcggcgatgccggcaaagcgcagatcaccatcgaaatcctcgaatccaacagctcttccgaatcgcgcttcgccaaaatcacgatcgtctgcggctcttaccgcatcgccatcgaaatcgaacaaaagggacacggttcagacaatccggacaatccaaatgatccagatgatccagacacgcctccgaccgattacaaatacgtcgcccgggtggattacaaactcacagacaaccgcgaagagggagcgacgacgaccgtctcgcaatcattcgactacgacgaagaaaacagagtagcccgaattaccgaaaactaccactcgaccgacgaatactcctataaagacaacggaacggagatatatacattcgactatacgatcgccaacgaagtttcggtccggacaaccgatgaggcggagcgccttctctacaaaatttccgccaaaaccgacgcgaaaggacgcatcaccgaaacttcgagttacgactacgacaacgggacaccccggctcgaagggcaggagacctatacatacaccccggaaggacgtctctcttccttgctatccaagtattcctattcctcttccagcggcctgaatcaatacagcgaaaacaaattctactacacggacggcctgctgacgcgctacacctactacgacagttacgaggcctcctacgacccggactaccagccctgggagtattcgctcccggccgatgagtgctacccccaccgttatgccaacgaccggagcaacctcgatttctacatgtatgcaatgggcggtcgcatctcattcgaaaacacttccagcgctattttttccctgttacgcctgaccggaaactacggcgattgcctgcccgaaataaccactgccgccgacgaggacgacgaggtgggagtggatgagggtgcttatcccacaccaaatgtcacgctacacaaatcctacaccactacggaatccgcctgcggagaggacgaatacctgaaactgcgcatcgaaacggatgccgacaatgcggtaaagcggatatcctacgacgtcccgtatgaggagtatcaggtagaatacgacatcgtagtcggcaacgaagtcatcgatgaagctatgaaccaccccgagttccccgaagaagaaaaactttacaaatacgaaatcaaaaaccggacgaaaaccaaaatacgcgacatcgtaaacccggcaacgatcgagatcacctaccgatagttccggagaaattttcaaaagaaacaataaaacgataaggagcggattaccgctccttatcgttttacaatcctcgaaggtcgtcccatccctccggcgcaacccggcaaatcatgcggaaagagtttcgaaccggctgccttccgaccgcgagaaaacgacagacagaaaagctgtgattcaagagaattccgacttcaaccgctccgccagttcgggcataccctcggcggctcgtgaacggatatgggtgagcggattgcggatcatcgccgtatcgggatttcccggatcgaccagaaaaatcggcacatcgggccgcacgtaacgcaccagcgatgcggcgggatagaccgccagcgaagtaccgactacaaccatgagatcggctgtcccggcgatctcggccgcccgttcgaacatcgggaccgcctcgccgaaaaagacgatataagggcgaagcagggagccgtccggagcggttgcatcgagccgctgttcccagccgtcgatgggcacgatcaactcgggatcgcgcgacgaacgcaatttagtcagttctccgtgcaagtgcgtgacgcgcgaagagccggcccgctcgtgcagattatcgacattttgggtaattacctccacatcgaaacacttctccaggcccgcaatagcacgatggcccgcattcggctccttcccgagcatctcgcggcggcgcatgttgtaaaaatcgacgacctgcgcccgattgtcgcgcaacgcctcgggcgtacagacatcttcgattcggtagttggcccacagcccgtcggaatcgcggaaagtagccagtccgctgtcggcactcacgccggcacccgtaaaaacaacgatctttttcatcgggttaaagatagcgtaaatttcagaaaaatatcccgcatcgtcctaaaaatccgttccgccggagtgacaccaagaaaaacctcccgaacgggcgcccaacagccgagtgtcgaaaaccgcaggtaaggaccggcagggaaacaccgtacccgcgctgcgtatccggccggacgaagttaccgccgggctcgttccgccaaccaaacaggaacgatcacacagactaccgtcaatactttactgacgatttccgccgcaccctccaacaccgtacgttcgccttcgacgatccgtccgatgctcggagaaaagacggcatagcatatcgcagccccaccgcaaagaacccacagccaccatcgcaacccgcggggagcaaaccgatccccggaagcctgttccggattttcagcattcgaatccgcctccggatcgggtcccgttgcggcccagacgcccaatatccaaccgaatacgcataaaccgccggcgatcgacgcccgcaccaagctccgctccggagtcgattctccgccggaaaccagcagcagcaatacgactccgaaccctgccacgaaagcgggaggaagtccgatccacaatctgttacggataaacatgcgaaacctgacccgactcggcacaccgtttatttcgagccattttctccgctcccgaggctcccggccgtcgctgccgggacgccaccgcataaaactgattcgcatagattcactctttttcgggtttcggctccggtttcccgacccgtgattttttcaggcggccgcttctgcgcagagcttccatgatgatccactgcagttgtccgttggtgctgcggaactcgtccgcagcccaccgctcgaccgcctccatcgtagccgcatcgacacgcagcacaaaactcttcgtcgcctccttcgccatcgtccgatcctaatgatgcaacgtacctgcattgacgatcggctgtgcggcctcgtcagcacacagcaccaccaaaagattgctcaccatagccgccttgcgctcctcgtccaactccacgatccggtcgtcggccaaccggtcgagagccatcttgaccatcgtgacggctccctcgacgatcttctcacgagccgagatgatcgcatcggcctgttggcgccgcaacatcacggctgcaatttccggcgcgtaggccaggtagttgatgcgggcctcgatcacttcgataccggccatcgaaagacggtcgttgagcttggcttcgagctgatcgttgatctcgtcactgttcgaacgcagagtcagttcgtcatctgcaacgccgttgttatcatacgcataataccccgccacctgacgcagtgcggcatcgctctgcacgctgacgaagttttcgagcaccttcatacgggccgaagccgaaaccgcaagatcggtgccgcccatcgtcgaggcgtcgatgtcgaacacggcccggtagatctcgtccggacggattttccacaccagcaccaggccgatcatcaccggattgccgttcttgtcgttcaccttgatcggctcgacgttcaggttgcgggcacgcaccgaaattttcttgcgccccataaagggattgatccaccaaaaacccgtttcgtaaaaagtccccttgtatttgccgaaaaacataacgacacgggcttcgttgggttcgagcaacataaagcccttgaaacagaacatacttataaaaaacaggcatacgccgcaaaccagcatcgcagtccgcagcccaatgcgcggatccattacatcgctgccgaacacgcacagcgcgatacctccggcgatcaacaccagcaacccgacgagcgcgacgaagccgttggcccgccaacccgaatagacaaaatttcccttttccataaccatcctgtttttatgatattattttgatattacaaatatatcattctatttttaattacgcaacgatttttcgtaaaaaaagctccgcccgtctgaaaattcagacgggcggagcttacaatgcctcggtcacgggaagaggctaaccccgcaagccgggcgatcagcgggaatcccaacccaccgcatcggcaccgccaccaatcgggacagccctttgctgccgcatcactcaatcgaccttacgcagcacgatatccgacacagccacgttcaacttgactccatccatcaccactgaaggccggtatacaccgtattcgaactcggcacccgatacgtactgcttgatcgtaagcgtcctgcggtcggacgatacctccaccggaaacgatgccggcgcgagctggtacttatcgtaatccatgcccacgaaaagaagcggccagtctccccagttatacagataaacactcttcgacgaaggcaccgtcacctcatcgccctctccaatgtggaagaagattttggccccgtagtcacggtaagccagttcaggtgccgcgctgtaccaggaagattctctcatcaaatcggccggagaataatagagcggctcgcccccctggaacggatagccggtcagcaccagcatattccgagcacggtactccttacaagtcttatcatcgactccggcttcgatcttcacttcgacatccttaatctcctgaggcatatcattatagtccagataggaataggagatcgtccaggtacccggaagcacgtcgaacaactcggactcgacacgcgcctcggagggccagtcgtccatccgcaccgtcacccgtttataaacttccacatcctccaacgaacgtacggcgacgatgcagacatactccatgcccggatagaggaattccacctcgatatcgtaaccttccgccgtattgacctgctccatctcctggatgttcaggtcggtgcctacgtccgaaataatttccttgtcacccttaccctgcgcttcgtaattctttacctcggcggcggccaaaacggcgtaacgtcccagataagctatatcgctccgaatgcggagattcagcgtctcggaaggattcgtatcggatttacgggcctcgacctccagcagaggcacccgtcccgaggactcttcagtcgtgaacggtaccaactgaagattctcgcccccggaaaaatcgacgctcaccacgccgcagtaatattccttggagggtttcagaccctcccacacttcgctcgcgaccgcctcgtatttcctgcccagtcccgcatcggtggcatacttgatcatatggatcgccatcgcctcgcctccgttgttctcgatgatgttcgtataccactccttatcacggacatatacgtaatattcggcgacaccttcgccaggcgaggttccgaccttcaccgacgtagaggcgatttcggtcaattccacctccacttccgcaccgctaccctggcggggcagcgtctcgaaatccagccgctgaggctccccggtgatattgtacgatgcgtcgcagggcgccatcagaatgacgtacggaacacccgcgatgaccttcatggagaaagtcccgttttcggcggagaattcccctccgtcgacccagtcgtattcggcctcgccccggccgatgcaacccgcctcagtgaggtactcctcgatggtatacgtattcagcgtggccgtcggaatcgcggcgaaaaagtagggaccctcacaacggatagagaacgtaaaccggtcggagccgatgtccgacacctcgataatttcgttcgagttcacccctgtcgtaaaggcgagctccgccacttcgctatacagcgtctccgccttcacggccgcataaagcacataggaacagcccgtctccaaaccggtcacggccaccgtagtctctttattcacggtaccggtgtgctcgtcgaaaagcgatgcggcgtcgggcttctctatcccgtcattctgcgtccgtttcacgacctgataaccgtacgccccgtccacattcgtccgcaggcggaacgaaaattcggtctgacccgtcgaaacgctctccaaagtgatctcgggagccgctgcccccggatcgtcgttatcatcgctgcatgcaaccgccgccgacaggagcaacgcgccacacacaactccgcgcaaccagaatccaaagtgctcgaatatcgtttttttcatagcatgaacttcaaagaaaaatccggtccggcatctccccaccattattctccgaatctcagatgaaacagaaaacctgcattcgccgagaaataccggaccggaatatgtatccgaatgttatttattcaaaggtttgtactcggttttcgtgttgccatcttcactacggactcggaaaatgaggcaatatccctgtcctgcaacgaaaggaatgagcgcagtgacatcggcgccttcgggtgaacaaatgccttcgacatcggaggagggacgccaactgatccaaaagttcccccaatcctcagggccgtaaccattcgcgatttcctcatcgatttcggtctgcgtgtgagcgccgatgcgatacgatgtggccagggaggccttgacatgaaccgttacctcggcagtaccgtcgccgttgtccgtcaggttcttgatgtcgcccagcgtcaacgaaatttcggtctccggagtctccgtgcggaattccgccttcgtatatgcatagtcgtataccttcaactggtcttcattgttcgggtccacgtaaaacgccaagatcacgtaatcagtcttgggcttcagatcgccgtcataattgctccactctgccgtaccctgcttggcgatcgacttcacgtagtccgacatcgtcatctgcttatcaaccgcaatattgttcaggccataataaacgccctgaatatacgattccggctcgaaactctcataggtagatttcgtcgtaatccaggcgcaataccattcgtccgcactctggggtgtcacggtaaaggtcacccccgtggtcgtaggctggatgttcgtaatctggaactggtcgggaacgtccggagccttggtcgtcaggaactcataataaacgacttcctcatcctgagaaaggtcgtaagccgccactacgtacgagtagctcgacgaaagtcccgatagcgacctctcgtacacacccttctgggttttgttcccgatgtaggggtcctgtccgtaatattcgatgaactcccagccttcaagcatctttccgtcacgctcgacctcggatttgggaaacacgttcacgtagtagtccaccgtatcgtcgctgggcgtaaccttcaccttagccgaattgtgggtgatatcggttaccgtgatctcgattttgaaatcgcccggcgtcggcccatcaccctccttctgcgtcctgacggtcttcttgaccacagctccgacttctttattctgatagctgaaaaccaccaccgtataatcggtatcagccttcagcccggttgccgaaacatccttcttgcccatgtaaagacacttgtcgaaatccgaacgtgcgaccatttcggcaacaagctcctcgtcggcaagtccttcgacggaggaagattccgtcactcccgcaaaataggtcgttttgtcgtccgacggcgtaaccgtcacagaaacggaattagacgaggcttccggcgtcgcgatttcaaacgtaaccgtcggggggggg

SEQ ID NO: 10440 - DNA, 59518 bp, Unknown
  gut microbiota DNA sequence
tacaaaggttttagtttggttggtaaatagttttttttcatttgcccaaatatatcatttttattttaattatgcaacgatttttcgtaaaaaaagctccgcccgtctgaaaattcagacgggcggagcttgcaatgcctcggtcacgggaagaggctaaccccgcaagccgggcgatcagcgggaatcccaacccaccgcatcggcaccgccaccaatcgggacaggcggattgcggtcgcaaccatcaactctccccggctgcacgtgcagcggttcgacggggcggatgcaggatcgggtttctgcggatcagtgcgtaaatacgcggcctttctgcttgatctgcttctcgtatttgatacgggaatcggtcggatactccagcttttcaagctcggccacagcgttcttgatgtcgtcgataagcatgtcgatcatatcgcgcgacgtaccctggcgaacgaccacacgcattacgaccagattttccaggttctcaggcatcgtataggccggaaccatccacccgctctgctgcagcagagcctgcaggtcgtagagcgtccacttggccttcttgtcgtaatcgggattcatataccagatgaacaacggattgaccagcttgtcggcatagttgcggaagcacttcatcttgccgatctgatcgtggcaataggtggcgatgtccatcgaattctgctgaatctccttgtagccctcgaatcccaggcggaggaaattgtagtactgtcccagcacctgggccgccggacgcgagaagttcagaccgacctgcgtgatattcgcgcccaggtaattgacgctgaacgacatctcatcgggcaggtatttcttgtccttccaaactacccaacccaggcccggatacaccaggccgtacttgtgacccgacgtagagatcgagagcacccacttcaggcggaagtcccatttcacctcgggattcaggaacggcaggatgaaaccgccggaagcggcgtccacgtggatcggaatttcgaagccggtcttcttgttgtaagcatcgagcgccttgtcgagcgcctcgacatcatcgttcagacccgtccaggtaacgccctgaatcggtacgatacagatcgtgttctcgtcgcacatggcgagcgcctgctcgggatcgagcgtcgggttcttcagcgtcagaggcacggttcgcagttcgatttgccaaagctggcagaacttctcccacaccacctggaaaccggcgctcatcaccagattcggtttgtcgaacggtttgcccgcagcctggcgacgcttgcgccagcgcagccacgcggccacaccgcccaacatacatgcctccgaagagccgataccgagggcgcctgccttccactgcgccttctccggagtattccaaagattggcgatcatgttgatacagcgtccattcataacggcaatgcggggatactccgtttcgtcgatatagtttacactgattgcttcattcataagtcgggtagcgtattcgtccatgtaggtagtcacgaacgtcgccagattcaaccggggctgagtctggggataagtttcgtctttgacgatctgatatgcaatttccgggcgcatcattccctgggggatcacatcggtgggagcaggctcgagcacttctttcgatccgaaaactgtcgtcagcagttcatcattgtttcgtttctggttcatacgctataattattttggttcgtaacagaagaatgacacaaactatgccaggaggcaatcccgcctccaaacattttcagaagacatccggcacattcgcagataaaaccccgaaataacgaaattcaacaacccggaaacatactttcgaaaaggtcggacgcactcggcaaagccgccggacgcaccggtcggactctgttcccgtttttatcgcccccgcagaagacagggagcctccggcataaaaaaaacgaactcatttgttttattctgttctcattttcactacctttgtaataatttttatccaccctttataaaataggtaaaaacttttgcggcatggcagcatattttaacatttttttgatcgtcatggccctgctggccttggcggtttacatcgcactccattatttcgaggccggatacggctatctcttcaaccgtaaatacggcttcccgatcccgaaccggatcggctgggtgctgatggagtgtccggtattcatcgccatgaccgttctctggctcctctccgaccgcacgtgggaagcggcgccgctggccctgctgatcctgttccagggacactacctgcaacgggcgttcatctttccgctgctgatccggggcaattcgaaaatgccggccggtatcgtgggaatgggcatgctcttcaatacgctcaacgccctgatgcaaggcggctggatcttctacatctctcctgccgactattacgaaggctggttctccaaaccctatttttacatcggagccgcgcttttcgtcgcaggcatggtcatcaacctccattccgactacatcatccgccatctgcgcaagccgggcgatacacgccattacattccccggggcggtatgttccgctacgtttcgtcggccaactatttcggagagctgaccgaatgggtgggcttcgccatcgcttcgtggtcatgggccggggcagtgttcgcctggtggaccttcgccaacctcgccccccgcgcagcttcgctttacaaacgatatgaaaaagagttcgggcaggagttcacctccctgcaccgaaagaggatcatacctttcatctattaagtttccaattatgagtaatttgcaggattccgtactcttcacgccctatcgtctggggcaggttacgctccgcaaccgcaccatccgttcggcagccttcgaatcgatgggcaaagacttcagccccacgcagcagctcaaggactaccacgtgagcgtcgcccggggcggtatcggcatgaccacgctggcctacgctgccgtctgccgcagcgggctctcgttcaagagccaactttggctgcgcccggagatcgtcccggcgctacgcgacatcaccgacgccatccacaaggaaggcgccgccgcttcgatccagatcggtcactgcggcaacatgacccactactcgaccgccggacagattcccatcggggcttcgagcggattcaacctatacgcctacacccccgtccgcaaaatgcgccgggacgaaataatgcaggtttccaaagacttcggcaaggccgtgcgaacagctcatgccgccggtttcgactgcgtcgaggtgcacgccgggcacggctacctcatctcgcagttcctctcgccctataccaaccaccgccgcgacgaatacggcggctcgctcgacaaccggatgcgcttcatgcgcatgtgcctcgaggaggtgatgaacgccgccgctgcgacgggcacctcggtactcgtcaagcacaacatgtacgacggattcaagggcggcatcgagattccggagagcatcgagatcgcccgcgaaatcgagcgctggaaggtcaatggcatcgttctctcgggcggtttcgtaagcaaggcgccgatggccgtgatgcggggtctgattccgatctacaccatgagctactactcgcccctctggttgcgggccttcatccgctactgcggccccttcatgatccggcagttccccttctcggagtgctacttcctggaggatgccaaaaaattccgcgaagcgctgcaactgccgctaatttacgtgggaggtctggtgagccgcgaaggaatcgagcgggctctggacagcgggttcgaactggtgcagatggctcgggcgctcgtgaacgacccggctttcgtgaacaagctgcgcgaaggcgatgcggcgacccgcagcgagtgcgaccaccgcaactactgcatcgcccgcatgtattcggtcgatatgaaatgctgcaaacattgcggcgacctgccccgaaaaatccgggaggaactggcaaaactaccgtaatgacacgcaagggaacgatcgaaaaagggagccggaccgctctggtgacgggtgccggcagcggcatcgggcgctgcatggccaggcggctggccgaactcggataccggctgatcctcgcaggactcgatccggcgaaactggaagccgcagccgaagaactccacgaacaatacggattggcggtagaggtcatcccgatcgacctggcacgacccgaagccgcacacgaacttttcgagcgggtacaggctctcggccgtgaagtcgatgtcctggtcaataacgccggagctttctcgttccgcgacattctgcaaacacccgtcgagcggatcgaaagaatcctctgcctccatgccctgaccacgaccctgacctgtcggctgttcggcgccgaaatgtcccgccggggctgtggaggacatatcctcaacatggcctcctattcgctctggatgccctggccgggactggcgctgtacagcgccagcaaatcctacctgcgtggtttttcggtagctttcgccaaggaggtgcgcgaacagaacatccgtgtcacggccgtctgcccggcaggtgtggccaccgacctctacggactgccgccccgctggcagcgcatcgggctgcggctgggtgtgctcatcacaccggacagttgtgcccggcgagccttgaaagccctctggcgaggacgccgttgctgcgtacccggctggtggaaccggcttttcatacccttctgccgtctgatgccgatgtgcgtactccgggttgcccgcaagtacacgatgaagcttcaacgctaacacacagaacccgataaaaaagaagatagacggccatgaaaaaatggatcaagattctgctcgtcaccctcggcatcatcgcagtactcgtcgtgacgacgattctgctgttgcctcctatcgcgaaaaactaccttgaaaaacacagcaaggaactcgtcggccggcaaataaccatcgagaaactgcggttcaacgtactcaacggcaaactccgaatcgaccagatcgccatgctcgaaccggacgactcgacgacattcgcatcgctgggaaatttctatactcgaatacacctgctgcccctgctgcgtcagcggatacacatcgacgccgtactgatcgacaaaccctacctgaacgtctatcaggatggcaccagcttcaatttcgacgacctgctgacccgattcctgacccctgcggacacggtcgaaaaggccccgtcgaacccctggacagtcgatatcgacgacatcaagatacacaacggcgagctgacttacaaggacatgcagcgtaacgtcacgtggggcttcaacgagctcgacatcgacgtaccgggactgcacctctccggacacgaacggacggacatgggcatcgtgttcaacttctcacggggcggttcgctccgcacctcgctggaatacgaccaggcgacggccgactacgacctcagcctgctgctttcgaacctctcgctggcaggcacggcggcctatttcaatcaggtgatcgacatcggctcggtagagggcctcgtcacgctcgacctgcatgtgaaaggcaacgccaaccacctgctcgacctgcgcacgtacggcatagcggccgcatcggggctgaaactgcgcgacagccgcgacaaccggatcatcgacgtcgatacgctcaatttcgacctgcgggacggcaatctgggcacgatgcagtacgatattcgccgaatctatgccgccggcatccgcacccagttcgaaatctaccggggcggcggcaacaacctgctcgctctgatcaaagctcccgaagagcgtccgacggaaacggaagcgaccatcgacggtgaaacgaccgtaaccatcgaacgcgaagaaccggccacgacgcagctcaatttcaccgtcggcgaactgcttctggacaagggagagatcgccttcacggacaacacgttcgaaaaaccgttccgatacctcatttcggacatccggctgttgagccgcgacatcgatttcagcaaacagaacgaactgacgctcgacgccaaattgcaacgcacgggatcgggccatatccgttggaaaggctcgcttcagaacctcgacaaccacaacctcatggtcgctctgtcgaacatcaacctcaaggatttcaccccctactgcgaacatttcacggcctacccgctcacgggcggcaacctcacgttccgcagccaaaacatcatcgctgaccgttttctcaacggcacgaaccacctcgacatatttcaatgcgaggtcgacaagaaacgcaaggacctggagcctgaattcaagattccgctcaagctgggactttacattctcaaagaccgcaaaggacacgtcaagatcgacctgccggtgaaaggcaacctcgactccccggaattctcctaccgcaagatcgtgatgaaggcgctgggcaacgttctgctgaaagtcgtgacggcacccttctcgttcctgacgggcggaggcgacaatctcgaccgcatcgaggtcgatccgctgcaattctccctcaatacggatcaatacgccacgctggataaggtggccgacatactgcgcgacaagcccgaaatgcagataggcctcgcgcagcggatcaaccgcagcaaggccgtcggacggctggcagaactgaatctcaaaatggcctgctacaactcgacccttccggcgggcgagcggctgtcgatgatcgacttcgagcgaatccaggagaccaagctcaaatcggacgaagtgatgcgcttcgccgactcgctgctcgccctgcgcggcatcgacggcagcaaactctccggcagccggaaagccctcacgctttacggagaccaggccgtcggacagctcgaaaaaattctcgtccgccgcgacagcgcgatcgtcgaatacctgacccgatcgcagggaatacccgtcaccgcgatctcggtacggacgattccggcacaggaactcggcgattacacgggaaaagatatttatgccatccagctcggtatggaggaagagagcatcgacgtaacggacggcaatacggcaggcgatacggaaacaacggatacatcggcttccgcgacggcggaagtcctcgcgactgtaccggaacaggcggcggtacaactcacgcaaaccggaactgcgaaggaaacggcgactcccgaaccttccgctccgacggcaacagcgacgcagtccacccaggccgagactacgatcaccgaatccgaggccggaattacgacgataaaaaccccgacagcacatccggaagagctgcaaacgaacgaataaccggaaacagaccgaacaaacaaacgacgtaacgggcacgtcggacggacaaaccacgacagcgggacaacggtgctaagaacaaggccgccaccgaaaagctcctgcaaccgggaaaaatccgtcggaaatttcaacgaagaacatcgctgaaacccgaagccgggtcctgcccggtgcattcggccggataattgccgacaggccataacgacactacgaaacagaccgacatgctgcaaggaatcgaaaatatcgtattcgatctcgggggcgtgatgatcgacctcgacagagcacgctgcgtggaggaattccacaagatcggattcaccgaaatcgacgatttgatcgactcgtaccatccgaaaggatttctcggacggttggaacggggcgacgtgacgaacgacgacttctacgactacgtgcgtcggagcgcaggacgcgacatcgcggacgatgaaatccgccgggccttcacctccttcctggccggcatcccccgctacaagctgcaaatggtgcgcacgcagcgggaacggggattccggacctatgccctctccaacatcaacgacgtggtttttcctttcgtgcgagacgttctcttcacccaggaaggtttgcaactggacgactatttcgagaaagcctatctttcatacgaaatgcacgaattgaaaccctcccccgaaatttaccgcaaaatgatcgaaaagagcggtatgcgccccgaagcgacgctcttcatcgacgacaatgcggaaaatcttcacacggcgcaggaactgggattccacgtatatatgccccggccccgcgaagatttcaggtttctgttcgacgacggcccgggcagatgataccaaaaacggaaaaccgtcatccgaaacgaacggcacatcgctgcgatacggggaggacattcggaataattcgaaaccgactgcaagcggttcgcttgcaataacaaaacgttccgggataacggacggtacgtcgtggcacacgcgaccggatattcgaaatccggcctgaaaaggtcccgaaacggaagtcgggaaaaaggaatctctcttcgaaaagataattttagccggaaaagtttgttataaacaaaaaagaccttatatttgcactccgaaatcgcactgatttccgcaatcggcgggacacacctcgcaagaggtccccggattgggaacggggtgtagcgcagtccggttagcgcacctgctttgggagcagggggtcgtgggttcgaatcccgctaccccgacgaagaagcctccggaaaaagacttcttgcgtagaggctcgaaaaagagggaaatcagttacggtgaaaaatattgttcggggtgtagcgcagtccggttagcgcgccagcttcgggagttggaggtcgctggttcgaatccagtctccccgacaaaaatcaaaacctttgccttaaaaggcaaaggttttttactatgggcatacgacggctattcatcgccgaaagtaagggtacaagaaaaaaggattccgctttatcaagcggggtccttgatttttgtacacccaataagagactcgtccggaagcgaagcagagcgacgcaatccagttttcccgaccgagagaagggatacgaaaacattccttttttcatttccggacagcgacatgtcacacggcaaacgaacagcgataaaaaactgcctgcggaacagcttttgtttgtgtatttcccatcaaggagctatttgacaagtcgcgaagcaacgcaatccagattcttatttttattttccaacggcaattcgtttatacaaaggcggatgaagataaaaagtcattcgcgaacgacttttcttcgtttcgtccaagggttgctgctatcgggaaagtggagaaaagcgacgcaatccgaggcttcgaaaaatcagagtaatctttcctttacgggaatttttatcgtcgtaaactgccgttgtagtcggcgaaaggccacacggacacaaagagtttcatcagggagttctcaatttcaggtctgcccctcttcttccgaaaaccgccatatcatccggcttttcggcaaaaccgggactgtagcttacaggcaaggtttttcacagccacccaccgaacgcagcggctgcccgactgcgcatcgaccgtctatcggaaccggcggagcatcttcccgaaatccagtaatgcacggggcacaaaatttgcggattacccaaacacattctatgatttaccgatatgaaactgataaaaaccatcgaagaacgatggagcccccgctcatacgactcccgtcccgtcaatgaagaacaactggcattgctgttcgaagcggcacgctgggctccttcctgcaacaatgcccaggagtgggcatattactatacgactcgcgaatatccggaagctcatgcccggctcgcggagtgcctcaccggaggcaatcgagcctgggcgcccgatgctccggtgttgctggtttcctgcggatacaagaatttcccggggacggatgtctataaccggcactggatgcacgatgtgggcgccgcgaacatctcgatcgccctgcaagccgcctcgatgggaatgcaactgcatcagatggccggcttcgacgtggaagcctgcgcccggctgctgggcctcgacacggaaaagatcgaacctgtaacgatgatgacgctcggctaccccggcccggccgaccggctggcggagccgttccgcacccgggaaacgctgccccgggaacgcaaggaagtgaagagcttcgtacataagctcgaataagaccggaacatccgaaccggaaaaaaccgtccgcctcaccggacataacgcaaagagaggctgtttaacaagtccgattttaatgctccgtcggaatgatcctgacagggacgattttcaatttcagggacctgttagacagtctctctcctattgtgtttccgactattgcaatcgcttgtagtgacagtacatcagatgctcctggtcgtcgtgcaggtgcataccgccgcccagacagaaacgccacatcttgcaatcggcgcactcccctttgcgggcccattcgcggtcgcggaacttgtcgaagcgattctgccacacgtcccagaaactgtcccggtaaatattcccctgatggaaattggcccggatggaggtacagcccgaaatcgccccgtccacccggatcgaggcagccgaaaccccggcggcgcactggtagaaatcgtcccgcacctcgccttcgtaaccgcccagaaagccttcgcaggcgtaactcaagtcgatgcgtccctccttacgggtacgctttatgaactccagcacctcgcggaactgtgcgtcggtaaccgcgagcgtcggatcgtccttggcccggccgacagggaagatcgagaagatgcgccaatatttcactccttcggcgatcaacagctccttgaactcttcgagtcgagcgaccatcggcgaagtgacgcatgtaatcacgtcgtaggtgagccggggctccctcacgatcaaccggatcgcgtcgagcgccttttcgaaactgcggggattgcgccggatgtagttatgagcatcctcaaagccgtcgaaactgatcgaaatggatctcaaccccgcatccatcagacttcgcaagcggtcggcgtcgagcgccagaccgttggtcaccatcccccaggcatagccccggcgggtaacctcccggccggcttcctccagatcgctgcgcacgagcacctctccgccggaaaagatcaacagaacatcttccgggcggttgtggggcgtaacctcctcatcgagcaccttcaggaaatccgccaacggcatatccggcacgccgggatcgacccgacagtcgctgccgcagtgacggcaagccaaattacaacgtaacgtacactcccaaaagagcgtacgcaacttgtgttcggcgatcttctccgcataaagatcggaaaaaaggcgcagcccgatacgcttgcgcaacccgagctttcgtcccgtcatcggcgattattcgtttttggaagccggagcctctttctcacgggcccgttgtgcctttttaacctccttgcgggctgtcttctcacggatggcctgctgacgttcgacctcctcgacaggtaccggaggacgcacgccgtacatcaggcggatctgtctttcgacccgggccgaatccggagcctggtcctgcggctttccctgaggagcgttcttcactgtcgaacaagccgttgcaaaacccagcatcgtcaatagtgcccattttactttcttgcccatagctttcaaactttttacagataatacggatgaacaaatataactattttttcgaggaacaaaaaacgtgcaaaaataattgcgaaaaaattttgagaatcaacactttttacctttctttgctgatacatttttaatcaatattcatttatgacaggtcaagttaaatggttcgatagcaagaaaggctacggattcattacccgcgaagacggcaaagaggtcttcgtacatttttcaggcatcgtatccgattctttcaaaacgctgaacgaaggacagaaagtcgctttcgaacttggaaacggagctaaaggcgaacaagctataaacgtcaccgtaatcgagtaatccatttcattactcccgagaacgtatggaggctccctcgggaagcctccatattttttccggcacggacgaaataattgtattttcggcacgttaatttcgtgctgtcaaagagctataaaatcagatacgatatgaccaaacgaaacgaagcgatcgccattctcacgggcggcggcccggcaccgggcatgaatacggtagtgggcagcgtggcaaaaaccttcctgcagaagggatacagcgtcatcggactccacaaaggtttcacagggctcttccgcgaagcgcccgccacggagaacatcaccttcctcaaagcggacgaaattttcaacctcgcgggttcgttcctgcgcatgagccgcttcaaaccttcggacgaagatttcgagaagcgtttcaactggcagttcttcaccgagaacaacatcaagctgctggtgaccatcggcggcgacgacacggcatcgacggccaaccgcgtggccaaatttctggaagaaaagcgtcatccgatcgccaacatacatgtcccgaaaaccatcgacaacgaccttccgctgcccgactgcgcgccgaccttcggctacgaatcggctaaagacaagggtgcggtgatcgcccgggccgtctatgtcgatgcccgcaccagcggcaactggttcgtcatgtcggcgatgggccgcagtgccggacacttggccttcggtatcggcgaggcgtgccactacccgatgatcgtcattcccgaaatgttcaacaaaacgccgatcaccatcgacaagatcatccgtctgatggtttcgtccatcgtcaagcgccggatcgtcagcatggactacggcgcggcggtcatatccgaaggcgtgttccacgaattgagcgaggcggaactctcctcgtgcggtattcacttcacctacgacgcgcacggtcatcccgaactgggcaaagtgtcgaaagcctgtttcttcagcatgctgctcgaccaacggctcgcggagctgaaactcaacgtacagacccgccccgtggagttgggttacgaaatccgggggcagacgccggtggcatacgacctgacgtactgctcggagctgggtatcggcgtttacaagctcttcagcgaaggcaagacgggctgcatggtctatgtggacggctgcggcaacgtcgaacccctctacctgaaagacctgcaagaccccgcgacgggcaagatcctgccccgcatggtggacatctcgtccgaccgcttcaaagccgtagtagataatatcctgatggctattaccccgcccgactacgaagcggcacgccaatacctgtccaaccccgaggagtacgacttctgcaagatcctcggctgggacgaaacggatctttagctcccttttgtaacggcggaaaaacggaaatcatacacttcggcgcccggaatatcaatattccgggcgccagtctttcaggtcctgcggaccgccgcaagacatctttatcattcctcatcccggtctgcccagcgttcaagcgtctgacgcacggcctccttatagtccttgtcggtaatccggtaagtccagcgcacggcgttcgggcggtcggggaactcttcgagcacccatgccgactgatcgcgcggtgtgccgcgttgcgattcggtcatagggtcgaagaaagagtattgagcgcacgtatctacatctggggtaatggcatggtaattatcttccgttattgggggcacattgaaatataactgaacaaaacccaacgcatccagatttttcaccaacacatcgttatcgtctatccacaacattttctccatcatctgtccccatgtcccctgttctcccggggcgattctaatcatatcaccgctcgcactcattttagttgaaatgaagaaaatcgcattctcctgactggcgttctgcattcgaaaataagtgtaataacagtctggatattcttcgccgatattctcttccatcgttgtgttcttatccacgaactccggtttttcgggcttcggtgtgggctgttcttccgacggagcttccggtgaggtgttttccgctttgtcggaacagcccagcgaagccaagaacaggagcaaggctcctaacgataaatagacacgtactttctaggttaattattaagggataaaattcgtcctgcaaaaaatattgagatcgaacgccccctgaaacgaatttaacaaaagcgctgaaacaaccgattgttctgccgatcatcgaggaacatccgatcacttcagatcgaaatcgtcggcatcgcgccaggcgggaaatttctcgcggaaacgacgcagctcgtccatatcgagccgtgcggtcaaaagcctctgcccctcccctgcttcggcaagggtttctcccttacagccgatcacggccgaatcgcccgaataatgcagccgggggtcgtcccccgtacggttcacccccaatacgtaggcctggttctcgatcgcccgggcccggagcagcgtccgccacacgtcacggcggcccgcaggccacgaagcgacgtaaataatggcgtcgtaatcgttccggcagcggctccatacgggaaagcgcaggtcgtagcaaacctgaagcaggaaacgaatgccgccgtattcgacgacgccccgctcccgtcccggacaaaaattagctccttcgccgccgatggagaagagatgccgcttgtcgctctgcacccgctcgcccgaaggttttatgaaaagcaggcggttgtaatagcgcccctcctcttcgacgatcagactgccagcgacggccttgcccgtcgtccggacccagcgggtcatctcctgcacgatttcacccgacatcggttgcgcgacccgaccgggatcggtcacgaatcccgtagcgaacatctcgggcaaaatcaccagatcggcatccgcttcggcaaccattctcccggccgtccgcagattggccgccgtatcttcccacaccatgtcgaattgacacaaagccactttcagttccatatcgccattcgtttttttactaaaataaaatttcccgctactcgcttcttttcgttcgattatcctaaatatttgtcaagaagaagagcaacagctattgcaaatgtaacacaagctgctgttaaatttctaaatgttccaccgtatgtattagaatgatcgttccactctccgtgttctttgtaatatttataatccacattatagaatgttataagattaactatacaaataataaacaagagtaatatcatagtttgtttaattattgaataatctgtaatatattcaaggaggggagcaggcttgaaatattaattgttgtgaagcagtcattatgattaacgaaataaccacaaccccaatatatacttgaaaacatcacaccatatacagctccccatttatatttcaaatataataaaagtctggtacaaatgaaaattcaattccgaaccacatcgcatctcacgacaagacgaaatattccggaaccgaccccaccgcccccaggaacttcgctcaaaaattgctttcggcaaaaataaaacgtacttttgtcaagataaaacacccattatgctcaaagcaggacgcacacaaaccctcaccgtaaaccgcatctcggactacggactctatctgatcgacgacgaacagaacgaagtattgctgcccaaccgttatgtttctctggccaacaaggtcggcgatacgctcgaagtattcgtctatcacgattcggaagaccgattggtcgccacgaccgaaacgccgaagctgcgcgaaggagaagcgggattcctgcgcgtagtggacaagaacctgcacggcgcattcctcgactggggactcgcgggcaaagacctgttcctgcccaaccgcaaccagcagggaggcgtgttggccggacggaactgcctggtttacctgtatgtagattcggtaacggggcgctgcgtggcgaccatgaaattcaaaagctacgtcaataacgacgttatcacggtaaagccccgcgaagaggtttcgctgctcgtggcttcggaatccccgatcggctatcgggtgatcgtgaacaaccgtcactggggcatgatctaccgcaaccagctcttccgccgcatcgacgtaggcgaccgtctgaagggatacgtgacacgcatcacggaagacaaccgcatcgacgtcagcctgcaacagcagggagtcgccgaagtgcgccattcggcggaaacgctgctttcgatgatccgcgaaaacggcggttcgcttcccctgaacgacgacagcgacccggcggaaatcgctacacggacgcagatgagcaagaaagtgttcaaacgctcgctgggcatgctcctcaagcggggcgcagtggaaatcacgcagaacggtgtaaaactgaccgggcacaatggctaaaatactcacggcggagcgcgtatcgcgcgacatatcggacaactacgtattccagcgttcgcaattggcctatcacgaggcggcgcggcgaatcagcggcgacgtactcgaaataggtacgggcacgggttacggcgtcgaaatagtcgccccccacgcctccagctttctcacgctcgacaaaatcgaacctgcgggcgaacggcctccgtttccgcacgtggagatgcggcaagccgtagttccccctctcgacctgccgtcgggcagtttcgatttcgtcatttcgttccaggtgatcgaacacatcaaacacgacatggaactggtacgggaagtgcaccgcgtgctgcgtccgggcggcaagttcatcctgaccacccccaatatccgtatgtcgctgacacgcaacccctggcacgtcagggaatacaatcccgaccaactccgcaacctgctcggcagcgcctttgcgtcggtggaagccctcggtgttttcggcaacgaacgaatcatggaatactacgaaaaaaaccgccggggcgttcggcgcatcacccgtttcgacgtgctcgacctgcaacaccggctgccccggtggatgctgcaactcccctacgacctgctcaaccgcctcaaccgccgacgcctgctccgggacaacgactccctgacccgttcgatcaccatggaagactaccgcatcggaccggtagcggacgactgcttcgacctgttctatatcgcggaaaagcaacacaaataaatgattccggccggatcgacatccgccggcaatccggaaaaaaccattataagcagcagccggaatcctcatccattttaagttcattttacccgatccaatcttaaatcgttaattctccacgtatcgaacaccaactccaataatattttttgcctcgcctcaacagacgacttgttccaaccggtaaaattgtattggaaatcatttttgaatcgattcaaggctgtatttactccgatataaaatttactatcgagtaatttcgtcagacaaacagacgatttgccatactccgactgcttgtcataaaaccattgatctgtcgataaatcattataattattcacggcctgattaatcatgctttcgatcaacgtgacattacccaatcgatacacataggagtaatactcctcctcggacaaaaactccagtggaatacttccatttttcggtgattgaggtaaaatatgttctatttgcaaatcattataaaattgatgtccacagaccgggctgtgcaatttttccaacaccgtattttctatcttccccaatacatagcgcaaccgatacaagggattataaaccccatgactcaaagttatgaattcggctttaaatacccctaccttatccagcaaataaggtaacatcgttttctctatcacgcaggcaatttcatctatcgtcgtaagattacgtaatttctccgcccattggacaaacaaggattcattcgtcttggcttggatcctgagggtcgagctgaaaaagaaaaaactctctatttgtttggccaaatattcgattgccggcacatccgcattgcttcccaaagacaataacaggatcaaatgctgtctggatttgtatttattaataaagcctatatttgtcacgtgaggatacaagcacccatcccgctgtaattcagtggcatttacaagttctgaataccgtttggacatacagcgtatctcctttgcaaagtctaccggatgcttttcatattgcgtagcctgtttcccttcagaagatataatccatttataaatatcatcttctcgcaagataccattataatatcgggcactcagaaaatatcgcaaaaatcgtaggggtttttgatcttcagaacattcctgaagattttgaataatctccctccatatatcttttatcttggcaaaatccgactctttggtattactaaacagcaaatttttgaccaaatccatagcattcaatcccgcccctcgctgattgatcgtctcgaaaattttcaatgcactactcaaatcttgagattcgattacaacgagttctatctttgtcaagcaatatttcgcaaaatctatcaactcatcaatcccggcatataattgaaagtgtcgaagtattttcgtataggcatcctgcattcgctctatagatggggatcgcactccattgtaaggttgctcctgtatcaaggctgtcaaataatcatgactctcttcatactgcaattctaagcgtacacgggtctctcccgattcaatatcaaagttataaagtagattttctataatctgtaaataatttttctgagcgctgttcaatgtctccttttttaataaatctcggaaaacacacaaagacaacataatagttgtcaaacgctgttgtccgtccacgacatcgaaacatctatcattattgacaatgatgatagatcctaaaaaataattacgctgctcttttgcatcgggactatattcattttcaatatcgatcaaaaactgctcgacctcgtcatcgggtttccaaacatattctcgttgataatcaggcactaaaaagaaataatccttcaatttagatatagactgaactttagcatcgattttcatatcttatgatatagtttttgtaaattacgttatacaattagatattatcatcaaacgaatttttcaaaaaacgtctgggtgcgaatattctacaaatgtaggtcccataattttctacttcgcttcgtgaaaagcaatacaaacaatacaaatttaaataaaaaattggaaaacaatcgtcaatttgaatccggtacgatctaattccatacaaaaaagcagccctctcggactgcttcaggttagtataacaacccgatttgcgaacaattaatattcttcctcgttgaagagaaaatcatccttcgaaggataatccggccaaatatcctcgatcgattcgtaaatatctccctcgtcttcgatctcctgcaaattctcgagcacttccaacggcaggcccgagcgaacggcatagtcgatcaattcatctttggttgccggccagggagcatcctccagtttcgatgccaactcaagtgtccaatacataactgcaataatttaaatcattaactcacaagacaataagtccaggctgacatacagcttccttattattaggttgcgaatatataaaatcctgcgagaaatacaaatcaaaagaataaaaatttcttctgccattttttttgaacaaacatagcgataggaaacgatccgcacattccggcctcgaccgaaagagcggtttcgcaaagaccgacaatgttcggcggatccgcaaccgcacacgattatttccgaatcgcatcgaaagcggccatgtatcgacagcccctgtccgcatcacgaattcaggaattcgactgccgttatccgcacaccgccactgcctccgccggatcgtttccgacgcgtctttctcaacggcatttcaaacgcatcggccgagtcgggtccttacggcacacgaaaaaaaaactcctcggcagatcgtacgaaattccgaaaaaaaccgataaaatcccgtcacggaatccacagggtttcctccacgctgaaatattcggtcagcgtgcggcccagcagatagaaatagtccgacagccggttgaggtacatcagtacctccggtgcgacgccatacttcgcatcggcccgaagcgccgcccgttctgctcgacggcaaaccgtgcggcagacatgacacagcgaaacgacacgatgtccgcccggaatagtgaacttggtaatcggcttcacggaagcctgcatacggtcgatcgcctcttcgagaaacttcacagcctcggcgtcgattcctttcaccttgtccgctccgccttcgcccacagccagcgtagcagcaacagtcatcaactgggaggcaatgcgtgcgagctcccaaacacggggctccaaccccacatctccccgcaaatggtccgtaagcagggcaacgaaagcggtcaattcgtccaccgagccgtaggcctccacccgttcgtcggtcttgaacacccgttcccccccgaccagcgaagtggttccctggtcgcctgttttcgtatatatcttcataacttgaaatgttgtttcggcaaatgattgttgaataccagcaaatagccccggttatcgaccgtcgtcgaacgatgctcccgaacgatccgacgacacgcttcgccgcgtgcgctaccgtgatagggattcatcacacagagcgtcgctcctgtccgggcagcccgagccgcagcagcaggcaaatcctccgccggaaaattccgggtcaggatcaccatgtcgtacggacccgcacaattcaggccaaaagtcgaatttttcgtctcgttttccctccccggcgtaacctgcaaacaacctctgccctcgtcgatcacaaacgtcgaattgcctttttcaaactctgcatccggcaaagtccgaacaggttcggctttgccttcacatatcgcaaacgtccggtagccgcaatagagaaaggcgttctgcaactgcaccgcccgccggtgaaagattccgacccgacgcagggcatcgtaaaggcagtgctctccgtcgcgcagtctatgaaacataaacgcttcgcgcacaagtccgtaaacgaatggcgagtgcacgccgtgcccccggaaatgacgggcccgggagagccggtcggtcagccgggaaataccgcgaaggcggcggcgtagattgcgtccggtccgtttcactgtttgagcataccggccagacgaccggtcgaaaaagcgatctgtaaattatacccgccggtgttggcatccagatcgagcacctcgccggcgaaatagagtcctttgaccttgagcgattccatcgtatagcggttcacatcctcgcagctcacgccgcccgcagtaacgacggcatattcgaaaggcgcatagtccgaaatcggaaaaaccatccccttgaggagcttaaccaaccgttcgatctgctcgggcgtaatcttgcggatataatttttagaatgggcgccgacctcttcagaaagaggaatgaccagcgccttcggaacgagcttgcggagcagttcggagaagaactcctcgggccccatctccgccatctcacgggcgatgcgctcgcgcaacatctcctcggtcagccccggtttcagatcgaccatcagtccgacacccttgccgtcgatcagggcgtccaccgcgtcccggctcatgcggagcgccacagcgccttcgatgccgcgctcggagaaacccagctcgccgaactcttcgcgcacggcttcaccgtcgatgcagagcgtcgcacggacattccggagcaacagtccgttcatatttttgatccagagacaggacgacaccagcggcgtaagcgacggccgcaccggttcgaccgcatgccccgtatcggccgcaaagacgtagccgtcgccggtcgaacccgtagcgggataggaaacgccgcccgtggcgacgataacgcgcggacactcctccttgcgctcgaatccccgcttattgcggtaccgcacgccgaaaacccgaccgttgagcgtcattatttcggtcacacgggtatcataaacgatcttcacgccgttgtccacgcaatattccagcagtgcgttggcaatatcccacgccttgccgcttcgaggaaacacccgctcgccgcgttcgacatcgagcttcacgcccagccgctcgaagaatctgatcgtagccctgttgttgaactcggcgaaagcggtcgaaaaaaactcggcattggtacgcacctgtccggcgaactcctcaggcggccgggcgttggtcacgttgcaacggcctttgcccgtaatacgcaccttgcggcccgatttctccatcttttccagcagcagaaccctgtgtccgttccgtgcggcagtccccgcagccatcatacccgcagcgcccgcaccgacgacgatcacatcgtaaggcaggcgaacggcagccccttctttctgacttatctcttccatagggtacaaagatagtgaaagccgggagaaaacgggaacttgttcgcagttttctgaagcgcatcctatctataactatgtcaaaaatacgaataagccgggcgcaaaagcaaatttatttgcattttgccgaagcgaacaaggcaaagattcaggataaaccgaaagcgaagacaaattcattcgcactttgccggggcgaaaggtccgcggacatggatagcaaacaatcccgaattccggtctgcggcgggaaaaaccggcacgacaacgaatcggcccggcagctcctgccgaaagagcggacacaagattatttatgccccagaagcgcaaaaaggttgcggcaagcgctttttttcctacctttgtccggtaattttcgtatcggggcgaaccgcgcccggtaaaacgcgacttcgttttacaagcagcccgcacgcctcccggcacgaagcaaaccggacaaacggcagatactcccgtttgccgcaaagttctgaaaatatatgttaagtagaagacagcttagaatcaaggcgataaaggccctgtatgcgcatctcaaatccgactcggacaatatgatcgcgtcggaaaagaacatgatgaattcgatcgacaagacctatgacctttatttccagatgatgacccttccggtcgaactggcgcattatgcccagcaacgtcaggagctggccaaacagaaaaagctgccgacctacgaagacctccaccccaacacccgcttcatcgacaacgccgtgatccgtatgatcgccgacagcgacacggtgaatgaccgaatggcagcccgcaaactcggctggagcaaatatcccgaactcatccgcacactttacaaccaactcgcggcgacggactatttccaggcttacatgagcgctccggaaagttcgttcaaagccgacgcagcgcttctggcgaccttcttcgaaaaggagttgcaggagtgtcccatgctggacgacgtactggaagagcagtcgatcctctggagcgacgacctgggattcgtactgacgctcgtgatccgcacgatctccaacatgcgccaatcccacgcggatgtgaagatgctgcccgaattcaaaagcgacgaggacgcagaattcgtcaaaacgctgttcgaaaagacgcttatcaactacaacgagcggctggaatacatcgaaaaattcacgcgcaactgggacgtggagcgtatcgtcttcatggacaacctgattatggccacggcgatcaccgaactggtttccttcccttcgattccggtgaaagtgaccctcgacgaatacatcgacatcgccaagttctactctacgcccggcagcagcacctttatcaacggcgtactggataaaatcgtggaggcgctgaccgaagagggaaaactcaaaaaaaccggacggggactgatatgatgcggcacattttctgcatattgctcataaccctcgtcatcggctgtcaatcccgccggacgagcagcgtccagagcgggccgacgctcgaaatatcggatgaaacgctcaccgaaggtacttcggacacgatccgtttcggacggctccactccggcgaaacaggcatcaaacggttccggctgcaaaatacttcgtcccggacatgggtggtggcccgctacgaggtttcgtgcgaatgtgtcaccccggaattcgaccgacggcccctgaagccgggcgaggaaatcccgttcagcgtccggttcgactcgcggggcgagcacggctggcagatgaaactgttgaaactctatgcgtcgggatcggaggagccgttacggatttacgtcgaagccgatgtcgattaagaaattgttaattcgcaggaaagaagcgccgaacggctgcgactcccgcaaatttcgactatatttaccggaaaatccaacggaggcagccgaaatccggattgcccgatatattcgaaggcatctccggcaggtgcgaatctcgatcggaaagcaccggttcgggaaaaacggccgccagcattcgaataatttggtgcgatacccggctttcactatatttgtaccgatcataaagaaaaaccaaatatcaaatcaatagaaaactatgattaacttacttcaagcgacagcacctgcaccgcaggctggcggcggctattcgctcttcatcatgctcggcctgatgattctggttctgtatttcttcatgtggcgccccgaatcgaagcgacgcaagcagatggctcaattccgggccggccttaagaaaggcgacaagatcatcacggccggcggtatttacggcgtagtgaaagagatcaaggagacgaccctcctgatcgaagtggacggcaacgtcacgctccgcatcgacaaaaacatggtcgtcgccgacacgagcgacctgcagcagcaacagcagaaataaaaaagtactgagacaagagaactccccttcccgtgatcgggaaggggagttttacatacgattatccggtcgtcgcccgaaataaatagcaaaaccaaaccggccggccagaatcaaaaaaccgaaaataagaggctcaagagaagagggacggattcgaatacgcaaaagccatggattcccggtacgcacggaaacacacacgccgacacatcggacgctgaaaatatccatttattcgtatatttgcgtacgaaattctttcgaaatggcaaagaaattcacttataagacacaaggtacctgttcgaaatccatcgaaatcgaattggagggagatatcgtcaaaagcgtccgcttcgaaggcggatgtcacgggaatacccagggaataggtctgctgacgcgcgggatgcaggctgccgacgtgatcgcacgtctcgaaggcatcgactgcaaaggccggggaacatcctgtcccgaccagctggcaaaggcgttggcgtcaggccctcggacaataacggctacgacgaaacccgagaacggtccggttctccaaaatccggggaaacaaaggaaaaacaaaagcagctataccgtcagtcgcaccgctcccggaaatggcgctgccgatgtctgtcggtcgcccggcccgattgtggtaacgggcgattaaatgaaaaggaaagtgctgcccaccccggcagaggcaaaagcagaaaccttttcggaaaaatacgatgatccgacggcacgcccaacaacgtctttcgaaagcggcaacccgatgagaaaaggatgcgccaacaaaaacaaagatgattatatactttattatcaagcgtttgaaacatcggatccgacgcgcctattcgccgcttgtgccatgcacgaaaacaaaaaggccggattttgaaatccggcctttcccgtcgcagcgacttcggctacgaacgacagtgttgaactacctggactcgaaccaggaacgacagaaccaaaatctgctgtgttaccattacaccatagttcaatccgatgctcgaaagcaggtacaaaggtacggcaaagaatcgatatttcaaaaaaaatcctccgcgaatggccggggcagcaaaaaaaattccacggaaagaggtaagttcgggtccaaatcaccggacaccctcactacggcacagggattgcggcgtttcgattccattgataaaatcgataattcaatgcagtaagatatgattataaccatgattctgatttttgtgttcgggtacctctgcatcgcgctcgaacacaaactacgcatcgacaaggccgcgatcgccctgctgatgtgcggtgcgttatggacggtattgagtctgctgggcaacgacgcccagatcggcacgcaactgatcgagcaactcggcgatacgagcgaaatcctcttcttcctgatcggcgccatgaccatcgtcgaactgatcgaccggcacggaggattccacgtcatcaccgaccacatcaaaacccgcaacaaacgcaaactgctctggttgctatcgatcatcaccttctttatgtccgccgtgctggacaacatgaccacgacgatcattatgatcatgctgctgcggcgtatgatcagcggacagaaagaacgatggatcttcgccagcgttatcgtcatcgcggccaacagcggcggtgccttttcgcccatcggcgacgtaacgaccatcatgctctggatgcggggcaacgtcacctcgggcctgctcgtggccaaactgttcctcccggccctggtatcggtaatcattcccacggccatcgcctgccgttatattcccgacgaaaacgcgcatcccgaaaaattagacacggcgcccaaactgccgccgttcgtcggcccgcgcttcagccacttcgttctcgttctcggtgtcggcgggctgctgttcgtgcccatattcaaggctgtaacgggactgccgccctacctgggcatgctgatatcgttgggtgtgctgtgggtcttcacggagctcgtctatgaccacaaacagaacatggaggaatctatcaaaaaccgggtgtcgaaagtactcaaacatatcgatatgcccacgatcctcttcttcctgggtattctgatgtcggtcgcagcattgcagagcgccggtttgctgaccgacttcgccgacttcctggacaaaaacgtacacgaagtctatacgatcgccggaatcaccggtctgctgtcggccgtaatcgacaacgtgccgctggtggctgcctgtatgggtatgtaccccgtcgtcgatacggcagccctggcctcgagcctcgacccggtttatatgcaggcgttcgtacaggacggtatcttctggcacctgctgactttctgcgccggcgtgggcggcagcctgctgattatcggatcggccgcaggagtagtggcgatgggactggaaaagatcgaattcggctggtacctgcgtaaaatcacgctgctggcattggccgggtatttcgcgggcatgctggttattttcctcgaacatttgctgctgggctaaagagcataacaacaaaaaaagggctgtctaacaagtttcagacagcccttttttatttgtactgcttattcgagagcttttccgaatacgcgattctaaaaggattaaaaaacttgttggacagccttttttactttttccttccgttgcttccgggacaagattccgcatcagcgaactttggacatgaacttctcacgatcaacgacatagcggacgtgaaccccctcgccgatcatcccttcggcatcgcgggccccgacattgaaggtgagcttacgcccttcgacttcggtcagcacggcggatgcgacgatttcggcaccgacgcccgaaggcttgatatgggtcacgttcatctcggcaccgacggtcgtcgaaccttccggcaaatggtcagccacagccttcatcgccgcattttccatcagggccaccatagccggcgtagcgaatacctgcaagtcgcccgatcccatcgttgcagccacgttgccgccatcgaccgttaccttactttgtgcagaaagtcctttttccatcataatacaaccgttttttattgcgttaataattcagaatcattatctttgaacatagctttagataggaggcgcctcggaaaaccgggaacaagtcccgttttcgctcggctttcactatctttggcagaagataggattcggttcggcaattttcgagaacaagttctcacaattgccctcacatttcactatctttgaattgcgaagaggattcgaaatccgtccgcttcggacagaagcgccctctccgcccttgtgtttcatcctgacaaaggtacgaaaattccggttccgatgaaaaagtggtttttcctatccctggtattgctgctctccctgcccgggcaggcttcggcccgacacggacagccgggccgatggcacacctctttcgaaatcggacccgacggcgacacgatctcggtcgtccccataaaacccgtcttcgtattcagcaaaaaagctgacctgcgccgttaccgcaaactggtcgaagcggtgaagaaagtctatcccgtagcccaagccgccaaagcacaaatggttcaaatggaggcggaactgctccggctcgaaacgaaaaaggaacagaaacaatacatcaaaggcatcgccgcagcgatcaaaaaggagtacacgcccgtgctgaaacacatgacccgtacccagggccgcgtgcttctgaagctgattgaccgggaaacgaaatacacggcttacgaaatcctccgggagttccggggcggcttcgtcgcgggattctggcaaagcgtatcgcgtatcttcggacagaatctcaagtcggaatacgaccgagaaggggacgacaaggtactcgaacagatcgttctctattacgaagcggggctgctgtaaaccgcatccgcccgccgttcacagacaatcgcccctgttttccgtccgtctgcaacctccgcagccaccgacggcacgatcgaatgccatccaccctcccattcgacagacgaaaatacccatacgggcacgatctccggaccactccgtcaaaatacaaatatatttgtatttctgttcggcattttcataatctttggcttcgcctcaaacgcttcgatccgacaaagtgcagataaacttgcttccgcacccggcttttttctaatctttaacgtcgttcaagcattccgcctcagcaaaatacaaataaaatttgcttttgcacgcagtttattcgtatctttgacttcgtcttagatactccgcctcggcaaaatgcaaataaaatttgcttttgcgctcggcttattcgtatctttgcaacgatcggacaaaattgcccgacttacttaaccaattatcgttcaaattctttatcgtatgaaaaaactgttcattttctcggctctcatcaccctggcgctgggggggggagttgcagcgacagcgaaacagatgagtttcagaacattctgattcctcaggataacttatcggcctcgatttcggccgatgtgttgtcccataccatcggtttcgaaacgacccagagctggacggcatccgtgcgtgaaacctcgcgtgccgaaagctggatctccatcaaccccacttcgggcgacgccggcaagcacacgattaccgtcacgctcactgaaaacgaaacgaccgaatcccgccaggcggtcgtcatcatctcctgcggcggagaatccgcgaatatctccatcacccagcggggcgtgggacaagacgaaccggaagatccggacaacccgaataaccccgacaatcctcaaaagcccgaacatcccgacgtagcacccgaagaccggctgacctgggtagaaacgacctacaccgaggtttacagcgacggttccagcaccgacaagagttacatgctcttcgaatacgatgccgaaggtcttctgaccggttacgaccaatacgattacgattcggaacagaccgacaaaatcaatgcctcctatgaaaggacgctcaaacgaagcgaagggaaaatcacagacgaagagaaatggttcgaaatcgacggcagcagttacgaaggaatgccccttcccaactcgggcgaatacaccaaggaataccgcttgaatacaagcggtttggtaagtagctacaccgacccggacggcgacagccagactttcacctacaacgccgacggcacgctggctcgcttggaataccgcaacccttcctatcccgatgagaactcgacctcgacgcttacctggcaggacggaaacatcgtttccatttcgaccatcgacggacgggataacgaaacaacgacgttctcctacaccgaacacctcaacccctggaacggcatcgacataggcgccttcatgatcggcgatgcagaggagtccgccatgctgctcggcatcagcggtacgaccgttaagaacctgcccgccagctgtcaagacggcaacagcactacgacctacacctacacgttcgacgccgaaggccgcgtcagcacgatcgtgaccgaagtgaattggcaggacggcggcggcagcggcagcgagcgcacggaatatacgctccactacggtccccaaaccgtttcgaaacccgattacatcccctacctgaccaaacaggaagtcgtggacgaaggaacgcttccctatacattctcggaagacaatccggacgaaaaatggtacggtgtaaacgcctacacctcctatgccaagatccgcagcacgatgtccgacggcagaaccagcgaaaaaaccgaatatcggcagatcaacatcaatccctcgactcaggaaggtcctgtattaggctacctttacatcacgcaggacgaagcggacaacttccggctcgtttcgacctctttcaacgagattccgctgggtgaaaacgtgatagacccccaccgtttcgtctatacgctggaatataactgcttcacggtcaatctggaattcgacgtgttctatccttcctgcacagtcttcgatcctgcgaccggtgaacagaaaacccactggatgccgatgcttccgctcgacaagaactgtttcacggtatccgaaccggaactgcggtatatgggtgaaaatacggacgaaaacggccctatgagcgaatactactaccgacaggagtatcttttccaggtcaatcgggatgtggagcctacggaatacgactaccagttgttgagccgtcatatgtacgtcgcacactattaaaccgaaaacacggggcacagccccatcagacaacccctccgaaaactcggaggggtttgtttttcacccgcacaaacgactgtacggaaaatgtgcagcgggccgctgccgatccccgcagggatcgccgaccgtagtagaaatcgactttctgaagatttccatttggcagttacgataatatttgttatattcgtcacagagtcagacatcaatcggctcaccaaccaattttttccattaactaacctttttatcgtatgaaaaagctattaacaatcgtaacccttctgggattaacgtgggggggggaagttgcaccgacagcaacaccgacgaagaacaggccattctgatcccccaggaagcattatccgcaacgatcgcggccgacagcggactgaaacacacggtaagtttcgaaactaccggagagtggcaggcctcggtagagtcccccggtagcggcgacacttggatcaccctttcgcctaccttcggcaatgccggtaaaaacaccattaccgccacgcttacggaaaatatccagccaacttcccgaaaagccgtcatcaccattctctgcggcacagaatcggccgccatcaccatcacccaacagggtaccggtacgagcgaggaacctgcaaaaccggaacatcccgaaatctcgcccgaaaaccggctgacctacatcgaagtttcggagaataaaaaaaccaccaccgaagacggcacagaagagagcacaacccaaggatacatcgacctcatctacgacgcacagggcgtgctgaccaatttcaactactacacgttcgaccggaatcaacccgacaaactcaacggttccagcaagacggttctcaactggggagccaataaattctcgctctcacaatacaacatcgaaattacgagttacagcagcattcccagaataacaaaagacgaccggtcggagagctaccagctgaataaaagcggtctgatttcacaatacagctatttcgacgacaatagggatgtcttcatttacaatcccgacgggaccctcgcaaccaaagaattctatctggctggaacggccctggaaaacctcaggtcaaaatacaaatgggaggcaggagatctgacgagcatcacggcatccgcaagcagttactgtttctcctatacctatacacaattcctcaacccctggaacggcatcgatataggcagcttcgcgatagcgggtgtcgatgacataggatgcctgctcggtatcagcggtacgacgaccaagcacctgcccgcgagccagcagacaaaatacaaaaacagccagtatcaatacacgttcgacaacgaggggcgcgtcagcacgatcgtggtcacctcgaccttccacaaccccgaaagtatggaaaatatctcgatcgccacccagaccgaatacactctccattacggcactacgccctctccggaacccgattatctggcctacctgaccgaccaaaagatcatcgaagagggaacactcggctatatcttcgacggcgacgatcccgaaggcgagcatatcgtgctgccgaacgcctatacttcctacgccaaaatcctcaatacgctctccgacggaaccaccaaagaaacgacggaatacaggcaggtgaaaattacgctgcccgaagagcatctgggatatatctacgtcacccagcaagatatcgacgatttcgaacttatctcggtaacgcaggaaaaagaggatgacggcaaagatattacgagtcccctcacctatacctttacattcgaatacaactgtttcacggagaaattccggctcaagatcgagccaccctactgcaatctctactccgagcagaccggaacatggaacttgcacccgatgcccacactgcctctcgatgacgactgcatcgtctgctacccgccggaagtgacccaactgaacgataacccgatccaaatcgattataaattcgttcagaaatacgtgatcaagatcaatccggaagcagagataaccgatcagaacgtttcacagatcgaccgattgctgtacgtaagacaatagcggattcgactcccgatagccccctcttctcagagggggtttatctttgtcgccgacaccaaggaaaatcagcacctccgttgcgattctgcgaatagttttatatatttgcaagcgaaaaatccggagcggacctgcaacggccgaacagggagaacgatttgcccgacaccgctttagctttgtccggactgaaaaaaccgactgcaacgacggctccgcaaaacgaaaaatgctccagcgtcgggcggcaccgtttcccggcatacgataacgaaccgaaactatgtttgaaaacttaaccgataaactcgaacggtccttcaagctgatcaagggcgaaggccgcatcaccgaaatcaacgtcgccgaaaccctcaaggagatccgccgggcgctgatcgacgccgacgtcaattacaaggtagccaaatccttcaccgacgaggtgaagcagaaggccctgggacaagacgtgctcaagtccgtcaagccgggacagatgattaccaagatcgtccgcgacgagttggcacaactcatgggcggcacggcgaccgacatcaagctggagggcacgcctgcggtcatcctgatcgccggtctgcaaggctccggtaagactaccttctcgggcaagctggcggcgatgctcaagagcaagaagggacgccaggtgctgctcgtggcgggcgacgtctatcgtcctgcggccatcgaccagctcaaggtgttgggcggacagatcggagtcgaagtctataccgaagaggggaataaaaatccggtgcagatcgccgaaaatgccatcaaatacgcccgtcagcacggtttcaacgtcgtgatcgtcgatacggcgggccgtctggccgtcgatgaggcgatgatgcaggagatcacggcgatcaaacaggccgtgaaaccgggcgaaacgctcttcgtggtcgattcgatgacgggtcaggatgccgtgaatacggcccgcgagttcaaccagcggctggatttcgacggcgtggtgcttaccaaactcgacggcgatacgcgcggcggtgcggcgatctcgattcgtgcggtggtgaacaaaccgctgaagttcatctccagcggcgagaagatggatgccatccaggtattccatccggaacgtatggccgaccgtattctgggcatgggcgacgtggtatcgctcgtggaacgcgcccaagagcagtacgacgaagaggaggcccgccgcctgaagaagaagatcgtcaagaaccagttcaacttcaacgatttcatgggacagatcgcccagatcaagaagatgggcaacctcaaggatctggcctcgatgatccccggtatgggcaaggctctcaaaaatgtcgagatctcggacgacgtattcaagcagaccgaagcgattatcaactcgatgactcccctcgaacgagagaaacccgaaatcatcgacgccaagcgccgcgaaaggctcgccaaaggcagcggtacgacgatggccgaggtgaacaaactgatgaagcagttcgaagacacgcgcaagatgatgaaggccgtcgccggaggcaatatgaaaatgcccaaattacccggacgcggcttccgcagataagcgggatgaatacttcgccaactactttataccccttcggttcgggttccgaaccgaaggggtttctatagtatcatacagccagatccgttcccggaaaaaccggaactcacctataatacggaaccgtcattccaaatatgacagtcccgaatgcccgtatcccaaaaatatatatctttgtaaaatccaatcggcataaaaaccatgagtaacgattcgatgttgatatcagatgcgacccggcgaaattgggaaaaactgcatacagaaggtttcgacaaattaaaatgcagggccaataagagtttgtcgaaaaaacgtatcgtacccgataattatattcatcgtaacggattggattccatagcccggcagctaatgtcttgtacacattcaaatagggatatcttctattgtttgtgtatgcaaaaactcaaccgtctgcctaataatatcaatataaaaagatttgcctccgaatatcggagcgatgtaaacattgaattcgatttatccgacgaggttttatcggatacaaaaagagattggataggtttcttataccaaatgcgcacgcctgaaggacagaggaacattcaagggcaatactataccaattttaatgtcgtcaataaaatgctttcagatgttcatctcgatcataatcagtcctttttcgacccatgttgcggaaccggagcctttctgatgaatgtcggtgcagaatcgctttcccaattatacggagtcgataacgacgaaattgcagtaatgatagcaaaagcgaacttaatcgccctctaccctgacgatattcattacccccggatatattgcgaagactatctggacgatactatctttgccaccggccagaccgtagatttacaattcgactatatatacacgaacccgccctggggcatctgtaagacacatcaatatcgatcggacgtcatacattcaggagagagagccgccctatttttcgtaaaggcgttcagacaactcaagcccgaaggttatatatcatttttactgccctcttcattactgaaaatcaaagtacatcaggattttcgttcatttattttgagaaaaacgggtatagagagcatatcgttatataacgagcgctttaacggcgtttttaccgattttttcagtataactgctacgaagaaaaattctgtcgatattcaatcgtattatgtaaaaaagaatgaacaactcgtatggatctccaaacctgtaacagaaagtgatactgaaatagaattaaatagtttagccgagcaagaaatcctcgcaatggtcgacgcacgaggattttacaatttaaaagaaagcgtctgggcactgggagtcgtaacaggggataacaaaaacaaactcaaaaaagagaaaacggaggggtatgaacccatatatacgggaaaggatatcggtagatattcattaaggaatccgtcgaactacattctttatgacaggacgcaactgcaacaatgtgcgaaggacgaatattacagatgttcggagaaattggtttataaatttatctcaaagtcattatgctttgcttacgacaacagttccagcctttttcttaacagcgccaatattttgattcctcgtatcaaaggattgtcgataaaaacagtattagcctttttaaactccgaacttttctcatattattattcaaaaaaattcacggacatcaagatactgaaggggaatctgatggcactgccatttcccgagatcacggaacagcagaatgctgaaatctccgacatggttgattccgtactcaaaggggagcaattattcatcgaaaagataaacgattacatctattctctatacggtttttccccgacaattgtaagcaaaataaaaaaagcacttcatggaaacgttgatttttcagcttaaagagcaaataaaaaagttaccccgaaatatcgctaccacattgtcagacgatattttgaacaaattgtattcagtctatccattcaatagattcgaatacgtcatctctcatctgatcgcagagaaagtgattacactgaaagactatctggaaattcggaacaattatctgaaccggaacaaatacctctacatttttgaaattacggctccgagaactttcggtgaaacatgggcgcagcgccatttgaatgaaattgttcctgaactggaacgcccttccgttcagaaagaccccaattattccggcgaatacgatttttggtacgatggaataaaaatagaagtcaaggcgtcgagagccgttgacagaagaagcggagacaccctaataatgaaagcactatccagtgacagcaagaaaggatttgatatgaattttcagcaactaaaacccaaatgttgcgatgtatttgtctggataggcgtctggagagatgtcatcagatattgggtcttatcaagcgatgaagtcgctaataaccaatatttttcatcgggtcagcatcgaggaaatgtcggagagggacaattgtgggttaaagatacgaatatcgagcatttcaaacaatacgaaacaaagattcctgaaattttgaataaaataaaagaaaaatatctcaagcataaagcgttcaaaaaggcttgtcgatgagtgttcatgcggtgtacggaggcaaccacgtatcccgttatgcgccgcgctagtcgatatacaccaacttttcgagagaatcttgattccaacacttttattttcaaagtttcaagaatccccgtatttgcaaccgaccggcttaacaaagccctataaacagtcttacacgcagtgatttttctacatcaaacgttacgaatcaatcggttaaatattaaaaaatactccgcctcggcaaattacaaataaaaattcgcttttgcattcggcttattcgtatctctgcaggaaacaagatgtagttcggcaatcccgacgtgcaatcccgcccgacagtcctcacctttacgtaacttcagaaagcgaagaatcggtataaaaacaggcggatttgttttttatgcccttatttttactacctttgtatgaatcagacaacaaacatcctatgcacaaggccggtttcgtcaatatcatcggaaatcccaacgtcggcaaatcgacgttgatgaacgcactcgtgggcgaacgcctttcgatcatcacctccaaagcccagaccacacgccaccgcattctgggagtggtcagcggcgaagatttccagatcgtcttttcggatacgccgggcattctgaaacccagctacaaactccaggagtcgatgatgaaattcgtcaccggcgccgtgaacgatgcggacgtaatcctctacgtcaccgacacggtggaacagagcgaccgttcgaacgacatcctcgaaaagatccgccaaagcgatattcccaccctcgcggtaatcaacaagatcgacctcacgacgcccgaaaagctcgaagagctcgtcgataaatggcaggcgctgctgccggccgccacgatcgtcccggtatcggcacgcgagaatttcaacatcaagggacttttcgacctgattctggaacggctgcccgagggagaagccttctactccaaagatacgctcacggacaaaacgctgcgattcttcgcctcggaaataatccgcgaaaagatcctgcgcaactacgacaaggagatcccctactgttgcgaaatcgcgatcgaagcctacaaggaggaaccgacgatcgaccgcatttcggcggtcatctatgtcgcacgcgactcccagaagggtatcctgatcgggcacaagggcgagaaactcaaaaaagtcggacagcaggcccgcgaggacatggagcaattcctcggcaagaaggtcttcctgcaactgtacgtcaaagtaaacgagaactggcgcgataacgaacggcaactcaagcgcttcgggtacgaacaagaataatcacaaccaaatcggggtgtcgtggcattgcgcaaatttatcctgaaaatcatcctgttggggacgctgctgagcaacgccgccactgccgacgcccaatacaacaaagactatttctactgggctagccgccgttgcctgatgaaccgcgaatatcaggaggcgattcgtgtgctcaacatcctgttgcgggccgatccggacgccgcagagggctatttcctgcggggcgtagccaaattcaacctcgacgacctgctgggtgccgataccgacttttcggctgccatcgtcaaaaaccccgtgttcacgaccgcctacatctaccgggcgctgacccgtacgcgcatgggcaactacgacgacgcgctgcaggatttccgcgaagcgatcgacctgaggcccgacctgccggacgcctattacagccggggctatacgcgcctgcagaacaagcaatacgaggaggcaatcgaggatttcgacaaattcatcttccaggaaaacaaggtagccgacgcctacatcggccgcggcacagcctacctgtacctgaaggacaccgtacgggccctggaaaatttcgaccaggcgatccgcaccaaccgcgaaaatcccaacggctattatcaacgcggaaccttgttgctgcaaaaagaggagtatacccgagccgaagccgacttcgatatgtcgatccgctgcgactcggctttcctgccgccctatttcaaccgggcggtggtctattccaacaccaaccgtccgatgcaggccctcgcggatttcgaccgggtgctacaactggactcgaccaactcgttcacctatttcaaccgggcgattctccgcacccagatcggcgattacaaccgcgcactcgacgacttcgaccgcgtggcgctctactcccccggcaatgtccaggtctattacctgcgtgccatgctcaaaacccgcttgggcgatctcgaaggcgccgagcgcgactacacccgggccatcgaactctaccccgacttcgccaacgcctacctgaaccgcagcgccctgcgttatgcgttgcataaccccaaggctgcgaaacgggacgaagagatcgcccagcgcaagatcgccgaatacaaatcccacctgaaggacagcacctactcgatctatgccgatacgacgcaacggatggacaaactgctggctttcgacaatcaattcaccaacagctacttcgaccgcatctcggaacagccgagcctgggccgcagcaacatgcgtctgctgcccctgttccgcttcaccctgatgcagcccgatacctcccggatcgaggcgtcgaaccgctataccctgcaacgggtcaaagacttcgagaaaaaactggacaatccctacctcgtcctctccaaccggcccacgaacatcggtgcggactctttggcgatgctcgacagccgctatgccaaaatcctgcgccagaatccgcgcgactggctcctgcaagtacaatatgccatttcgcaatcgctgatccgacaattcaccaactcggtcggcgcctattcgtcggctatcgcagacaatgccgccaatccgttcctctacttcaaccgggccgtgacacgggccgaaatgatcgacttcatttcgggcctggacaatccctatcagcgaatttcgatcgactccgacccggcgaacaaactcaccaacacccatgcacgcacctacaattacgacgaagccatcgccgatctggacaagacgctccgcctcttcccgaacttcgccgaagcctactacaaccggggaacgctgctggctctttcaggcaaactgcccgaggccttcgaagatttctcgagagccatcgaactgaatcccctcttcgccgaagcgttctacaaccggggcatgacccaaatctatatgaaagacacgcgcaagggctgcctcgacctctcgaaagccggagagctgggcattacctcggcctacgaaatcctcaaacgttacacgggggagcatacagaagctttttaactaacaataaccaattcaataaactatgacacaagctattcaaaagaaactgaacgactcggcgtgggctcggtggaccgcgctgattctggtggcgctcaccatgttcttcggctacatgttcgtcgatgtcctctcgccgttgcagaacatgctcgaaagcacccgaggctggagccccacgattttcggactgtacggcggttcggaattcattctgaacgtctgcggtttcctgctcgtcgcaggtatcatcctcgacaagatgggcgtacggtttacgggtattctttcggcctcgctgatggtactcggtgccggtatcaaattctacgggctgagcaactacttctatgaaggcggattcggttacgagttcctcaattcgttcctcacggacattccggccagcgcgaagctcgcctgcctgggcttcatgatcttcggctgcggtacggagatggccggtgtgacagtatcccgtgcaatcgtcaagtggttcacggggaaagaactggctctggcgatgggcctggaaatggctattgcccgactgggcgtattcgccgtattcagcctgtcgccctgggtggctaactggggcggcgatccgagcgtagcacgtccggtagccgttgtcggcctgttgctctgcatcggcctgctgacctacatcgctttctcggtcatggacttcaaactcgacagacaaaccgaggcagactccccgataggagaaaccgaagagcccttcaaggtcgccgatctgaagaaccttttcagcagcaaaaccttcctgatcgtttcggcactctgcgtgctctactattcggcgattttcccgttccagcgtttcgcaacgggtatgctcgaaagtaatctgggcatcaccaaccagcaggcttcggacatcttccgctggttcccgatgggtgcaatgattctgactccgctcctcggctggttcctcgaccacaagggcaaaggcgcgacgatgctgatgatcggtgcgatcctgatgttcatctgccacatgactttcgcactggttcccctcacccccgctatcgcgttctcggcgatcatcctgctcggcctctctttctcgctggttcccgccgccctgtggccttcggtacccaagttggtcgataaccgctatatgggttctgcctatgcaacgattttctggatccagaacctcggactgatggccttcccgatgatcatcggctgggttctcaacaaggtcaatcccggcgtgggagaagcgatcaaagccggtgaacacgtaagctacaactacacggttccgatgctgattttcgccagcctcggcgtattggctttcctgctggctttctggctcaagctcgaagaccgtaaaaagcactacggcctggaactgcccaacatcaagaaataacgataatccgtatccccggtctgccggaaaaatgatgagtaaacccccgctgcaaattgcagcgggggttttgtaataaagagtctatcggctaaagcgacgaggatcgtacgagattccgcttttcgagatacaagagttcctatttaatcggatcgaccctctacgcttcctatttaaccaatcggtaaagttccgtaatgcgatcgcacatcgcatcccacgaaaagcgcttcttctcctcttccatgttcgcacggaatcccgcgagcacatcgtcccgccagatacggtcgatggcccgggcgacttctgcggcatcgggacggcagacgaagccgacacgaccgtccggcacgatctccggaagaccgcccacgtcggtcaccaccatcggcaggtcgaattgataagcgatctgggtcacgccgctctgcgtggccgaacgatacggctgcaccaaaaaatctgcgacggaaaaatagtaacgcaccaattcgtccggaataaaatagtcgtgcaaaatcacatcgtcctccagtccgttgtcggcgatttgcttcaaatacttctctttcggagcatagaactcaccggccacgatcaggcgccggtcttcggcaggatgctcccgcttgtagatcttccaggcatcgagcaacaggtccaatcccttgtagtcccgaatcaaaccgaaaaagagcgcatagcgtttcgaaggatccagttcgaggcggatgcaggcctccgtacgatcaatgacgataccgaaattttcgaaaagcggatgcggagagaaaagcgccggaacctgcgtatatcggcgcaattcgcggtgcacctgctcggacatatagataaagccgtccaccgccctcaggaaatagcggttgaacggcttgtcagtcatatggcgttcatgcggttcgacgttgtcgatctgacaaaggatacgcgtcgtaccgttctttttggcaaaacgggcaatcgtaccgaaacagggcgccataaagggggtccagtatttcatcagcacgaaatccggcttctcgcgggcgatccaccgccccacggcgatccagttgaacggattcatcgtattcacgcaccgcacgatgtacagatcgggcggcggaggtgtctgcaccgtctgattcctgccgggaaagaaaatacggggatactggagcgtgaaagtcttgatcttcacctcgtcgccccgatgttggaaaacccgggccatgctctgcataattacggccaagcccccacgatacggatgggcgggccccacgatcgaaattttcataccccgaacttttatttataactgaaatcgaatccccgaacggattcaaaccttcggtacggccctcctgttttcgaataaacagcgcacggcaacttcaggaaaaatacaaataccctaccgaatcctgcaacaaggagataacgataaccggttcgggaggaactgcccgaaccggttatcactatccatcctatttcgttttattatacgcctccacaccgctcttcaggaagtcgatgtatgcctccacgtcgagattgtaagcccgcttgggaaccaattcctgcccatcacggccgaggatcaggtagttgggctgtccgttcaccccgaaacgggtctgggcgatgtaggagttgatgcggccgatgtccttgagaaccttgcctcccgcagtggtcacccattcgttctcgggcactttggtcttgtcgtcggtatagagggctaccagcacgtaatcgtcgcgcaggatctgctgcacgcgcggatcgctccagacgcgggcttccatttcgcggcaattcacacaactgattcccgtaatgtccacaaacaagggtttatcggcctccctggcagcggcttcggcctgggccagatcgaaataccccggcagatcgtaaggccagtgcaggatatccgcatatttgatcttttcagtcgtctgtgccgttgctgacggtgcggcaacgacaccctgcgtattgatcacgaagtcctgcgtatgcatcgggggcaaatagccagaaagagctttcagcggcgcaccgaacatacccggaaacatatagaccgcgaacgaaagcgaagcgatggccagcgtcagccgcgtcaccgaaacgtgcttgagttcgtcgtcgtgagcgaagcggatcttacccagcaaatagaaacccagcaatgtgaacacgacgatccagatcgccaaatagacctcacggtcgagcaacccccagtggtaggtctggtcggccatactcaggaacttgaaaccgagggcgacctcgataaaaccgagaacgaccttcacggaaccgagccaaccgccgctcttgggcaggtctttcagcaaggaggggaagaaagcgaaaatcgtaaaaggcagagcaaaagccagcgagaaagcgaacatcgtcacgatgggcacccagaattcgccggcagtcgaacgaatcaggacgttgccgacgatcggcccggtgcaggagaacgacaccaacaccagcgtcagagccatgaagaagataccgatcaaaccgcctttgtccgcgtgccggtcgctcttattgaccatccagctcggaagcgtgatctcgaaggccccgaagaacgatgcggcgaaaatcatgaacacgatgaagaagatcaggttgggaagccagtgcgtagccagccagttgaagatgtcggccgtcacggcatcgccgcccaccagacgcgtaatcagaatgatcgccgcaatgggaagcgtatagagcgctacgatgaagaaaccgtacatcgaagccttgaaacgtcccgcagcaggcgatccgctgcctttcataaagaacgatacggtcatcgggaccatcgggaatacacaaggagtgagcagcgccgcgaagccccaaagaaccgcttcgataatcagaccccacagggttttggactctccggctccgtcgccggaaacaggttgatccgcagcatccccggccgcaacggatgcccgggccgcctcgggatcgccgatcgtgatctcgaatccccaatcctcgggcgaattgcaattttcctcctcgcaggaacgccagttgatattgcctttcaatacggcgccctcacccgtcagggtgactttctgaccgaggatgatttcatcgaaataagtacccatttcgacctcgaaaatatcgtcgtattcgcgtttggaagcgttgatctcataaggatcgccgtcgagcgtcaggcccgttgcaggctcgaactccaccagggtcgaagaaacgtccgaatgcaggtcgtacgtatgccatcccggcaggatcttacccgtaaatacgacttcgtaattcgaatcgccgaggttcttcacagtgctgtcccaggtaatggtcggggactgcgcgtgagccgacaacaaactcgtcaggaaagccgccagcagcacgatacggatataaaatttcatatctctattattttaataagttaatagtttttttcgcgtgtaaagatatgaaattttattcaaaaaccacgtatgggacgcattatctcgcgtccgcgaggaaaaactactcggaaaccttcccttcggcttcggccttgctgcgtgcaaaagattgcaaggcgaggtactccttgtcgccgtaatcgagcaggttctgcaactcgttgcggaaatagtccaagtgctcctcctcttcgacggccagatcctggaacatcttgtgcgttaccgaatcgtcggcttcggccgcaatgcgagcggcatcgttatagctgtcgatcgtactctgttccagctgtatagcgaaacggaacatctccttgggatcggagatctggcgcgtcgtaaacgacgggttcatattcacgtccccctgcaagaagaggatacggtcggacaactcctcgctgtgacgcatttcggcgatggaaatcatccgcatctttttggaaagatactcgtaaccggcatcttcgaaatggacatggaaatacatgtactggagcgaggtggcaatctcttttcccaaagcatcgttcaatagatcgatacttttctggtacttgttcgcaactttgatcttttccataataataaaggttttgtctctatatcggcaaaacccgttccagaaaggaacaaagccgatcgtaaaaacggaccgaaacgaagtcgattcggttcggctccctgcctcgcccgccaccacgaaatacgacacatcaacgccactcgagcgccgcccggacagcggcttcctctccgttcgaaacctcaaacagcgacaagccgtcccgttgttcgtacccgaccgtaagggtttgcccgtaacggcattcgtgcatgaaatgaatgtcaagacgcaccgggcggatcgcggtcagctgctcgatgggcagcatatcgaacatcatgttgatatagcgcatcgtattgacgtgacggttgaagtcgatgtcgctgtaaaccacccggtgttcggcaatatgctgcggaacgatccccgtcactttgcgcggcttttcggtcggcgacggagcatccacaatcgaatcggcgcaggtgccgatgaccgtattgagatcgatcgccttgcgggcacccaagtcgatgatgcaccactgcgtcacggcccgcccgaactcccggccggcggcatcgtgcagcgtgaaattacgggtcgagagcatccggttgtactcgttcacccacgtcacgatttcataagagctgtattgttcggggcggtcgtcgatctcgatcgccatgcgcgaaaggacccacgagcggttttccttattcaacttatcgatcccgaaccctttgcgctgggcatcgacacccgccgtattgaggacctcgttcgccaaagccggaacggtcatccgaagtgtgaaatcgacctgctgagggtctgcataataagtgtaacctgttttctctgccatatttcagtgcgtttttcaatttcaaatgcaacgaaacgacaatccgccggttatccgccgggccgggagaaagccgtagataccgaatggtttcattcctacaaaaacgccccggcccggcttcctgcggacagtagcggcgtatgccggaaacagagcgaagccttccggccgcgccgactgcatttcgtgcaaagatacgaataagccgggtgcaaaagcaaattttatttgcgttttgccggcatggagtgtctaagaagaagtcaaagataataacaagaagagcggagaaccaaactcaacttttgttttcggctcccccgcgtaacgaagctcgtagaggggctttctcgtttcgatcgtccgtacttgcaggggcctcgcctccaagacggggatgatccctgccggtccgaccttcggtaggtttcagccgggttgcccgtccgatctccggttcgggaaaagtccggaaaattccgctccgtattcagacgagaaacatcattcgttatattttattgcgtttttatcgaaaaacgataaaaattatttgttttgcagaagttctttactatctttgcctcaccggaggttaaaaacaggtcgaacacctccattacgtattcagcaaaccgaaaatggacaaaaaacagaaaaaatctttgcggcgccatctgctggtcatttacatcttttatttcctggctctggccgcaggattcatccacagcttcgtgccccacgtgtcgtcgagtctggcgacaggttggcaggctgcgtccgaagacattcggatgcaggaaaaacacggtatcgcgcaacacacctactttttggcggcccggttgcaaaacgcccagagcgacgaaactcttttcccgatagaaaccggacacgcatcgatctccaccgaagccgaatatacgggggttaatatctacgtcaaaacggacgaaaacagtgacccgacagtagtccggacactgaacagaatcaattacatactgctgctgtccatcccggccctgctggccaagctctctatcctgatcctggtagcgctgattatcaatatcctgcgcaaatcggtacgggacgaacaacccctgccggggcgtatcatcatctacacgcgtgccgtagggttcctgctgattctggccgaagtctgcaccggagtcggctcttatatttaccagagtacgacccggacgtttctcgaagattcgcccctgcaagtcgccgcctcgttcccgctcaactactggaacatcgtcatggcgattctggtactcttctcggccgaggtcttctcgatcggatcccggttgagcgaagagcaaaaactcacgatctaaagaaaaaataaatgtcgatatacaatatacacacgggggggggacgcaagacatggcgataatcatcaacatagatgtcatgatggcgaaacgaaagatgtcactcggcgagctcgccgagcgggtcgatatcaccccggccaacctttccattctcaagaacggcaaggccaaggcgatccgcttttcaacgctggaagccatttgccgcgaactgaactgccagccgggcgacatcatcgaataccgaccggaagaaacaaccgaatgacaacgcaatacaaataatttcacccaaaatcaattaacaatcattttatgaaaaggttcattcttttacttgtcacgctgttcgcaatgacgaatgtcatggcgcaactacagcctgacatgccgattcccgccgataaggaggtgcgcgtcggacgactcgaaaacggcatgacgtactacatccgtcacaacgaaaaacccaagggacaggcatctttctacattttccaccacgtaggagctgtccaggaggaagattcccaacagggcctcgcccacttcctcgaacacatggccttcaacggcaccaagaacctgccgggcaaaaagatgatagaatatctggagcgtaacggcgtcaaattcggtgcggacctgaatgcctacacctcttacgatgaaacatgctacaacctggacaatgtgcccacagcaaaccctgcgacgatcgacaccgcactgctgatcctgcacgactggtcgcagttcatcagtctggagcctcaggagatcaacaacgaacgcggcgtaatcatggaggagctgcgcacccgcgacggagctggatggcgcgccatggtacgacgcaacgccgccgtcaacagaggctcgaaatacgagcaccgcaacgtaatcggctatctggacggtctgaagagtttcgaccataaagccttgtacgacttctacaaaacgtggtatcgcccggaataccaggcgatcgtcatagtcggcgatatcgacgtcgatcggatcgaaaacaagatcaaaaccctgatggcggatattccggtttcccctgcagatgccccgcagaaagaggcttacctagttcctgaaaacgaagaacccatcgtcagcatcttttccgatcccgaaatgacggcttcggtcatgcggctcttcatcaaacgacccgctctccccaagcaatacaacaacctgataattagccaaatgtacgacgtactcaactcctacacaagtgccatggcgaacgatcgcatgaatgaaatcgccatgcagcccgatgctccgttcctgagtgccgggatggattcaggcaacatactgggagtgaatccgacccaagatctcacgatggtcgccgtacaaactcgagacggagagttgctccgcggttacaaagctatcctcgaagagatggagaagatgaagcgttacggctttacacagagcgaattcgatcgtacgaaagctgaattcctgcgtcaggccgaggctacctatgccaatcggaacgaccttacaaacggacaatatgttcaaacctacctggcgaattacaagaaaaataccgctatggcagatgccgaaacgcagtacaacctcgacaaacaatacctcgaagcattgaccctcgacgatgtgaatgcttgggtaaaacagcttctgacacctgaaaaccaggttatcaccgtcgaagtaccgaagaaagaaggactgaccgagccgaccgaagccgaacttctggccatccgcagcgaggtcatggcatccaacgtcgaggcttaccaggacaataccgtcagcgagcctctgatccccgcagatatcaagctgaaaggctcgcccgtgaagaagaccgcatacaacgaggatctcggaacgaccgaatggattctcaagaacggtgtgaagatcatcgtcaaaccgacccaactcaaggcggacgaagtcctgctgcaggtacaggctgacggcgggatgtcgcagcttgccgatacggaggtgaaggaaggtgaattccttccggtcatcgcagcccagtcgggagtgggcaaattctctgcaatcgaactgaacaagcagctcgcaggcaagaaagccggaatcaacctgtacgtcaataactacagcaacggtatgagcggttactgctcgcccaaagacatcgaaacgatgctccaactgctctaccagaacttcacaagtccccgcttctcggaggaggatttcaacacgacgatggacagctacaaggcatacgtccagaacctgacctcgaatcccgactacatcatgcagatagaaacgatcaaaacgctttacagcgacaatccgcgtcagcagccgctgacgatcgaggccctggaaagcatctcgttcgaaaatctgccgaaaaccttcaaaacgctctacccgggtgcgaacagctttacgttcaccttcgtaggcaacgtggatttggaaacgttgaagccgttggtcgagaaatatatcggttcgattcccacctcgaaacacgtgcttaagttcacggacgacaaactccgcacagccaaaggcaaggtcgtgaacgacttccgcaccccgatgctgcagccgaaagtttcggagttcctgctcttctcgagcgatgcggactacacgctgcgcaacaagcaaaccatgttgctgctcaacatggccctaaacaaccgttacctgaaatccatccgcgaggagaaaggcggcacgtacggagtacaggtaagctatactctctcgtatcgtcccgaaaaacaggccctcctgcaaatacagttcgacaccaacgaggagatggccgacgaactcgtgccgatcgttttcgatgaaatcgagaaaatcgcgactgaaggaccggaagccaaagacatcaacgactcccgcgaatacttggtcaagcaattcaagaatacgctcgaaaataacggcacctggttcgggttgatcgacgactacaaccgtcacaagcagaatctgctcgccgactacgaaaagaccctgaacagcatcacttacgacgagatccgcgacctggcgaagaagctcctcgacagcggcaacgtaatacaggtcaccatgcgtcccgaagctcaacccgaaacagatgaataatcatcgataacaggttttattcactactacccccgaactctcaccggttcgggggttttctttggtttcggactcctgttcacggatgtttccttttccgctcctatctgcaatgcaggaagatcgtccacgcacaggaatcgtatccgtttccggaaaacagacgcggaaccaaactccacgaacgacgttatgtcataccccgccatgctttccgattccgcacttcgcatcgaattctccgtttcggcgacgctcttccgtttgcggacagctctctgccgatcacgttgccccttcccggcagtcggaatcgcattatgcggacagcaggtcccccggtgcgacagcctgccaacttgcagcaaaagaacgatccgaacaatgtcttgcttttttcggacatacggcaaccggctccccggcaggcaggaaaaacagtaacgggacaagatcatgcgctccgacttccgcgcactgctcttccctgaaatttacgcctcataagaccggaggcagctccttcgcggacaatacgagcggaatcgcaaccgcataaagaataaaaaacgggcctcatcaaaaagatgaggcccggcgatttcaactgcaaactgcggctatttcgaagtcacgaccacgtcggacgccttgttcagcaacaactgataggccgccgtcgcatcgctgccctgcgaaaacttggtatagatcgcggtaatgttcaccacggaaccgtccgcaggtattttctcgtcacggaaacggcaataaccgctcgaacgtacgacataattgcctgcgagggtgttgatgtcgccataggtgaaccaggcagagccataatagaacgtactctcgtgcgtaagctcatcgacccgcttcgtcgcccaggtagcccaatcgttgatatcggtccaacccggagaattcacatcgtaggaggtactgttggcgaagtagttggggaatgtatttttatacccccagccggccttgccgaacttgctttccaacccttcgaaacggatcaaacgccccagcgactcatccgtcagcgtcgaataggaagcgggagtaaccaccaaagtatcggccgccgtcaagccgatcaattcgccgagcttgacatgctcttccaaggtattgcgatcctccatgttaccgttcgcataatcggaattggtcgatgcgacacccacgctgagcatcgtgcggtaatttcccagcaccagaccctgcaaacggatataaaccaggcgaccgggagcataggtaatgtaatatcccgaagtcactttgatttcaatggccgactggcagctttcatcgtacaggtacatcgacttatagacgttaccggcctggtcgctggaaatgactttgccccgaatcaccaggtcgtcggtaatggtcagcgactggccgataccgctggtcccgggataagcctcctcgaaaatatccttcagctccttgatcgaaatgattttactgtcgctgaagtccgcatccgtccataccttcgcaggagccggcgtatcgaaatcgttataacagccgacgaagaacaaacttgctgtcaccgccagaaatatggttgctattctattcatattcttcacaatattaattcgttaagccgttagaaacggaaatagacattcaggtagtaagtcgtgccgaacaggtagaaatacttgggagcgaacttctggtaggaagtgatctccttgccggtcttaatgccctgcacacgcatctgctcataaccgccggtcttgatattttggttgttcaggatgttattcacctgcaaactgaagccgagcgtataacgacgctgaatgtagaaattcttaccgatgctcgcactcaaggtgtaagccgaatcgaacttctcctgactgcgcagctcccggatctgttcgtccgtcatcgtaggcaacagcacctcgtccgtacggtaaagcgggttcatcgacagatacatattgttgtaatagttcagatcgatcgatgcgtagatgttatgaggaccgcggtacgacaaaccgatattcattgccgtctgcggagtgctctccacgcgcatatccttccaatagaccgtaccggagttcagcggctcggcgctgttgtcggcaatctgcacgtaattgggattcgacgtgtaagtgtactgaccccaactgatcgcaccgttcaaagacaaaccgttgtagatcggaatcgaagcggcgacttccagaccgaaatactgctcgtcgataccgctcaaggcgaaattggtataggtcttcagcacatcatcgtagaaggagatcaccttcgaacggtcgttcaccttcgtataataaccggaaacacggagtttataatcaccgtaacgcaggttgtacgaagcgtcgatgccgtaaaccttctccgtcgtaagccccggagttaccgaattacgcgtacggggcgaaacgaaggccgactggaacgcaggagcattctgcatcgccacggcgttgagttcgaaagtatggttggcattgatgacataatcgaaattacctttggccttatatacgaaatattcgagtttctccgatttgcccttcgaattatccaggaagagacccttgcgccaaagaccttcgcgccacatcgaaagtccgccgagctcggcgcccaacttcataccgaaaccgccgaaacgggtggcataagtagcccatacaccgccggaacgcagatgcgccttgtagttgtagctgaacttgtcgccctctctgacggctcttgcatgaccgtactggttataataatccatatcgttctgcgccatgatcggatcgccgaagtcgcgctgtgcgaatttatcgacgtccacgtagtagtcgccgccgagcaggtccttcacctcgtcgtagtaccacgtgcggttgatgcggacgttggctccggccgtcagacgggagttatccttatagattcggctgatctgcgcggcgaggttccagtccaactggtcggtatggcgctcctcgatgatatagttcgaacgggcgccgggaccgtatatcgcttcatcctcggcattgcggaaattcatgttggtctggtacatttcatcccagtcgaagtggcggatattacccacgttgcgcatccactgatccgccagactggctgcagccatcgaagcggccttcaggtcggtagcgttcagcaacttgtagctcggcatatagcggtaataatcgggacgggggtctgcaccgtcgtaccacgtcagcgccgaataaccgttcttaccgaaacggaacgaagtggccaggttgaactgggtatgctcattgggatcgaacgtatagttgatcatagcgatcggctcgtggctgttacgcacgcgcgcattacgcatcttgccgtcctggtagccccagttggggttgtaatagttgttgccgaccagatcgtaagcctcctgcgtggaagcctgctgcgcaccgcgctcggtgggagcacccataatcgtgaagcccaaccggtgacgcgaattgaaaatcttctcggccgaagcgaaatatccgtaggagttgtaatagacgccgtccacgtaggagttgccgccctgacgggtagataccgacaacgcataggaccagccgttgtccagcagacccgaaccataggtcaccatggcacggaagcgatacatcgaattggcgttcaccagactcacgcgaagtccctggcgcacctgcgaagcacgggcgttgatgttggtcgtaccgccgatgctacccacgccgtaatccgacatgaccgaaccgttggtgatctcctggttgcgcgtagcgtcgttcagaccgctccacaacgaccagggcgtatagcccgtcatagcgtcgttgaagcgaataccgttcaagtaaacgtccgaatactgcgaatcgtaaccgcgcacgttgaaacgcatctcgctgaaccggtaggaagcgatgttgttgaaaacgtccttcgaagccgaaagggacgaaggcagcgactgcgcatcgttgccgctctcggtgtcgaactctgcgaagatcgaatcgtccattacggtcgaaagcacttcggggaccagaatcaccgtattgatgtcgcgcaccatcttgtccacgcgcaccacgagcgtcaaaggctcgaattcgggagcctcgaactgcaacgtatattcgccgggctcgacattctcgatcacgaaaccacctcggccgtcggtcgtggcagtcatttcaccgggagtgaccgaaaccttcaccccgtccaccgcgacacgtccctcgcgggaaacgaccttacccttgataccgccgctctgagcgaacgcggtcagcgacatcagagtaaatacaaaaattagtaaactttttattttcatatcctttcaagttaaggtatttatttaccgatgtagatataaacggggaagtggtcgctgtaaccgccctggaaattgtttccgacgtacgtgcgcaaaggatagcctttgaactgcccctctcgctggatcatatagttacgcttgaagacattcccgtagtacttcgatcccggagcccgtaccagacgcaactcgccgggcttcgcattgaccaggttttccgacactacgatattgtcgaagagattccaggcgtcgccgtaagccagcgttcccataccggcacgaagcacggcgtggaacggactgaagaaatcgcccggctgaagatccttgaccttgggtttggcattcagcccctccaacatgctcggatcggtcggatcgtcgttgaagtcgcccatcgccacgatcttggtcgcaggattgaccttcaggacagagtcggcgattcgacgcatctgctcgccgacggcgatacgcttgaactccgaagcgtccttgccgcccagacgcgaaggccagtgagccaccatgaagaagaacggttcgccgtcgatcgtaccccacatggtcgaaatatcgcgggttttgaaattcggaagcgaaggaatctgcgtgcggatcggtgcgctgccctccagcttgaagacatcgggacggtacataaaagcgacgtccacaccgcgagcttcgggagagtcgtagtgcgaaatccggtaattgcccggagccatcttcggcgtagcgatgatatcttcgagcaccgagcggttctccacctccgatacgccgatcacgatcggataatccttatcgataccggcaatatcgaaaagcaccttttcggtattgcccaacttcttcgcatacttgacagaattccattttttaggtccttccggtgtgaattcgtcgtcattgacctcaggatcgttgatcgtatcgaaaaagttctccaagttgtaaaagaccaccttgtacggtttctgcgcgaaacagcaggctgcgaacagtaaggccagtagtcctgtaaaaatcagtcgttttttcataagtcaaattagttttggattccccattggctcggagagttttgtgcctttacggattccgcagccgactcgggaatattgggaaagaacgtaaagccggtcttcttttcaatctccgccacgctcatgcaaatggacgcaggcggctgaatatcgccgtagctcttctgatccacccaaaatccgatcgtcttcaattcatcggccgaacaatccgcgatgcgtttaccggtcgtaccggtgcgcgtgcgaagcaataccttgaaataattcgtcgggaccggacaaactttcccgtcacggtcggtcgtcgtcgtattggtattggcataatagcaaccggtcaccacataaagcgtgtcgttgcatatctgcgcacgcaccttggcttcgagattggcccacatatcctggttgagccggttgagctgcggcgtcatattggtcgcataaaacgtctggagattcaactcccgcgtagccgtacggtccgccgaagggagctgatgtccccggtcgtaactgccccgataggaaccggccgcgaggttgggctgccaggaataatcgaccttcggatcgtactgaaaatcgtcggtacggtctatcgaccccctatataccgaatgcagcggataagccacccaatgcgccacatggagcgttttgtcgtagcagaacgaatagttgcgcacggtgcggttattgagcgaagcgaagtggctgacgtaaataaaattctcatcagtctttttttccggcagctccgcccaagccgtcgcatgcccctcgtcgtagggatcgttggtcgaagaggccgaaaactgcgtcagcacgagcacctgcggctctccgccgagaaattcgaattcgatggtcgccgaacgttccccgctcccggtattccgcgtataataaacgtccaggatattgctgatgttcgaactctgtacggtgccctccttcacgaggaccgtcggatcgttgagcctgaacgagcaccaagcacctccgtccttgatttcggcacgccatccggcgccgacaggtccctcaatctgtatggcggccgaaccctccgcagctccgaccgtcgaagaggtccgccatacggcagaaccccaaaaatcgtccgtatcgtcgccgcaagctacgacagagagcgcaatcatcgtcaggaacagccatttccatcccttctcacaatatctgaacatcgacatcatcggtaaactataaaaaactatccgagaaaccaaactcttggaggggatgatccctccaagagtcggtatccggcatattaaaaactatttggtaatctcgaacgattcgatatacaaggctccgaccttattattgtcgagcacaaaggaatcagcacccaaaccggccagatcgtactcatgtacatactctctgtaaccgctcttatccgtgtatgtttccacaggagtttgagcagccccggcaacggtcatcgtatatcccgggttgtagtagctgccactcttattcggatacgaccggaaaacgatcttgatcttcgacatcccgtcgatcggcgtcacgttttgcagcttcgcctgtttagccgcatcggagtcattaccctgcatctgaatgatcgagccgttggaagcgggcgattcacagattttcacacccgtgaactcgataccgccgacggtccaactaacccaagtactgggcgtagcgacaacctgcgaaccgtaaccattggtcgggagatccgcattatccgccttaatatccgtgatcgagaacgcaacgacctcaccggttcctccgccgccggcaccgagcaatgtaacaggcacatccttgctgttaccgttagc

SEQ ID NO: 10441 - DNA, 11168 bp, Unknown
  gut microbiota DNA sequence
accggtattcggatcggctttgaccgtcacggtcaggccatcgaccgtagcgctcagggggggggtcagtccgcttacgctaagttggttgtcaccctggttgataacagaaaccgtgagcgtcttctcgcctcccgctgcctcgaaggagaggctggccggagttacccccgtaatcatcggggtcgagctgtcgctgaaagcggccacgtcgtccagattgcgcggaacgagctgggaattattcttatatacggcagccagaccggagatattacccgtagcggccttgtaaggaacatcgaggaacacgctcgggttcttttcatcgctctgcttgcagaatacggtgaaattggctccatcggcagtgaaagtatgcgaagagagtgcgctggcgctcgcccaaacacctgcctgggcaaccgacgcattggcgatcgtcacggccataccctgatatttcgccagatccgcagcaacgatcgtcgccgtgggaatcgaagtcaccgtaccggtcttctcgaccttgcaccaagtcgcttccttagcgcccgtcacttcgtacataccactgtaatttaccaccttggcaagtcctttataaagggttacgcgcaccttgtcacccttgttcagaccgagcgtcgaaggttctacctgactgccgtagagcgtgatgccgttaccggcctccgtcgcattctcggtagcgaggatcaggttgttgaaggtataattggcaccggccacgtcgttcatcaccacagcgtccagatagcgatctgcattggcatccaccggagcttccgtagtagtcatctgtgcgatcagctcgggaatggtaatggccgtagcctcacccggatcgggcggaaccacaccgccttcgagatcgacctcctgaccgccgttgccattggtaaacgaaagatcgtcgatcgagaatgcggaattagcagcctcaccgcccgtcgtggtagtaaagcggatcgaaagctccttcagcgccgttttcagcgtaaaatctgacttgaacagaatccaataaggatcggtttcgtcgctgccgccgatcttctcatatttcaactctttccaggtcgtaccgtttccgacccaaacgtggaaatactcgggtttgaaagtattatcgtaagtaccatcattatttttcgaataattcgcaccgaaagtaatccgataattggtttcgcccgaaggcagcgtaatgttatctatgtcgaaattagcgggagccgtaccgaagaagatcttgttctggcccgaagctccgtcatagccgccgctgtttttctgcgacgagcgtaccgacatattcttgtaagcataagttacggactcgatacccgtgcccgtagcattctgccaagcatccgactggtcgaggaacggccagcgattgttcgcgtccttcgcggcaagcgttttatcgaaattgttgccgtaaataacggtcgcaggcttcacttcgccctgaagtacattgacatccttctgaatcaatgcgccgtaggagttgtaaacctcgaaagtcactttggcagactgaccgatgttcgaagcgggcaccgtaacggtcacggcagcatcgccctcgccttcggtagccgaaaggcgcacccaagtctgttcgtcctcgacgatagcacgccagggacggttcgtttcaacgataaaagtaccgttgtactcatctgcgggctgtccctccgcatcgaacgtcaggttctccggcgtgacgttcagatagggagcgcccatgtcgtcattgtcgtcggtacatcccgcgaacaccgccacggcgaacacggtcaatgcactgaagagcaatttccaaatgctactctttttcataaacaattaaattttagagtgatataaaaataggttaaaaataacttcatcgtcttgcatatttactcaggccacttattcttaaactttttgtaaaaatactattttttcctgtttcgacaataattcgaacactattttcgtattacaatcccgttaaatcaaatataacgacacaccggatttttatttcgtatcaaaaaccccaccaaaccgtattctttcccggcaaaataaacacaaaaggcgtgcagttttgaccgcacgccttttttccgagaaatacgtccggtcagcgaatccggtcgagcgaccgcaccagcttttcgtcccggaagatcgcccgcaaagccagcaagtcgaaaaccaggcagaccaacgggaaaacgagcgaaattttaagggtatgggagtaaaattcactgtccgcgaagtaacggttgcaaaggtagaaatagattcccatcatcgccccggcaccgatgaggagcaccaactcgacggcacataaccggatctgcaccagacggcgcttgaaaaggaaaatcgtcaccagcggcaccagacaggcggcagccagaacaacccccagatacaccgtcggcagcaacgtgatgccggcggcatccttcaggccgaaagcggtcagcgtacaagtgtccgccccaacggtgaaatcgaccagcggcagccacaaggccaatcccgtcagtacgacgaccagcaacagatacagagtctgaatacgttgaatcatataacttctattttgtttatgcgaacctcttcgaatcctgccgaaaatcgcaggctctgcaaggtttattgattatccaatgttttttcgatcaggtatttattacggtctgcggcattccggtcgatcaactcgcccaggaatcccgccaggaataactgcacgccgagcacgacagccagcagtgaaagatagaaaagcggctggtccgttacggcccgcacaggcagatcgtggcactgtttatacaacttggcaccgatcacccacgccgtcgtacagccgccgaaaaggaacatcaacgttcccaggctgccgaaaaagtacatcggcgaacggccgaaacgcgagagaaacgaaaccgtaatgaggtccagataccctttcaccatccgctccataccgaatttcgaatgaccgtacttgcgggcgcgatgctcgacgaccttctcgccgatccgcttgaatccggcctgtttggccagaatcgggatataacggtgcatctcgccatagacttcgatcgccttgaccacccggcggcggtaggccttcagtccgcaattgaaatcatgcagccggattcccgaaacggtgcgggccgtccagttgaaaaacttgctcggccaccgctttccggccgggtcgtggcgcttctttttccagcccgacaccaggtcgtacccttcgtcgaggaccatacgccgcagagccggaatctcatccggcgagtcctgcaagtcggcgtccatcgtgaaaaccacctcgccgcgcgcttcagcgaaaccgcaatacaaggcggcggatttgccgtagttgcgagcgaacttgatcccccgcaccgccgcaaaccgctcgtgcagattttcgatcacgcgccacgaaccatcgccggaaccgtcgtccaccaggattacctcgtaagacaaaccctcgccgcgagccacgcgatcgatccattcgaccagctccggcaaggactcctcctcgttatagagaggaacgacgaccgatatgtcgagcgtagcatccatcgttctcttactcttcggattgaggaccgaaaggccggggtgcacgcgccaggatgccggccaaaataagccccaggacgaggccgacgatcaggttgccccagatcgaagctcctacggtagcctgaatggaaggctccgacgcctcctgtatggttttcagcatttcggcgaatacgccctccatcgacgcagggaactttccctcctcagcgaaccggatcaatgcggaagtgtatcggtcgatatactccgaatatccgatgaaaacactgcggtaaaggtattctaccacccccttgatcatggccgacgccaggatcagagccagaataaaacccaagccgtggccgaaaggaaatccctgctcctgaccgtactgctcgcggcgacgcttggcgaaacgataaagcaacacgatatatacgactgcggccaagacccataccagccccatcgttgaaaaccaccccgacaacatcagggactgctcgataacgaaagctacggacatgaccagtccgatgatcgctccgtacttgcagacctcgttccagaatttgaactttgtcattcttcttctatttttagcatacgtttattcccgcaacacgcctttgccttcccgcaaaatctccggctcgccgcccgtcagatctacgacggtcgtcggcaccgcatcgccgacacctccgtcgatcaccagttctacgtcccggccgtaccgctcgtggatcaactccggatcggtcatatattcggtttcctcgtcatccagcacggaagaggtcagcagcggagctcccaaccgctcgacgatggcccgaggaatcgaattgtccggaatgcggatcccgatggtgcgacgccgttcgagcgccttgtgcggcatacgcgacgatgcatccagcaggaaggtgaagggccccggcagattttgtttcagcaaccggaactgagcgttatccacccggcaataatcggcaatctgcccgagcgaatcgaacacgacggaaaacgtcgtgagatccttccccttgatccggcgcagccgctcgacggccttcgccgaacggatcgagcagccgaaggcatagacgctgtcggtcggatagatcaccacgccgtccctttcgagcaggttcaccacccggtcgatctccttctcggaaggattctcggtatagattttaaccaacatagggagggcaaatatagacaaattatttaatattccgacgattcaactccgcactataagcccgggcattagccagatgttcgccgtacgtgcgggcgaaactgtgataaccgtcgaaagtcgggcgggcacagaagaagagatagtcgtggttctcgaagttcagcaccccatcgatcgcagcgaccgaaggcatcgcgatcggcgacggcggcagccccttgttcaggtaggtgttatacggcgaaggggttctcaagtgcttgtgcagaatccggcgaagcgaaaaatcctgcagcgcatatttgaccgtcggatctgcctgcaggggcatccctttccgcaggcggttgatatagactcccgccacacggggcatttcgtcggccttgttggtctcttcggtgacgatcgaagccagcgtcatcacctcgtcccggctcaaaccgctgcgtcggcgggcggcatcccgctccggagtccagaaacggtcgtactccttgcgcatgcggcgcacgaaatcctcgggcgaaaccgtccaataaaattcataagtattggggataaagatcgaaaagagctgcaggctgtcggtcccgacctcccgggcgagctgcgggtcggtcagcgcccgcatcagctccgcagaatcggcatcgagctggcgggccagccgcgaagcgagaaaagcgcgggtacgggcatagttgagcgtaacgcgcacgggcgtctgcatccccagtttgagcatccgggcgatttcgacgacgttcattcccggttccagtacgtagtgccccggtttgaaggagcgctccagctccagacggccggcataccggtcaaaagcccagtgatggtccgtacggggacgcagagagtcgagcagccccgggtagtccgtgcgggcgcttatataaaggtcgctccgctcccggacggcatctccgaaaaactgaaagatgaaaaccaaagccaccgttgccccgactgcaaccgcagcaataaacacgacaagcaatctttttttcgccgtcattctcttcattcattaactctccccgcaccgccctccgagacacatccaggcagccttttcggcatccggctctcgaaaaacagcgacaaaatcgcagatagttccttttttctttgcaaagatagcaaaaattcgtacttttgtgctggggtaagtcttatacgaccagctcccacagactcccccaggtgaggaatcaagcaagggtatgtggtcgtagcggtgcgatataagtagcttaccctttttttgtgtacccgcccatttccggccgacttcaaaaaccgtcgataccaattcagggaacaatcataagcaataccgggaaatacatatttcccggtattgctgtattcctttcgtttcagcatcgaatcgagcaacgaaacctctgcgggacaaatattataatacgaataatattcagcgctgcaaatatccgacttactaaaaatcaattgattttcggcaaaaaacgatcagttgttagccagcgcgatcgcagcgatcgcctccaccacgaccggacagcgcaaggcgatgcaggcgtcgtgccgccctttgacgacgaactcttccatccgtcccgtcgcaaaattgaacgtatattgtttcttcgcgatgctggaagtaggtttgacagcgacgcggaacaccacgggattgccgttcgagataccgccgttgattccgcccgccccgttggtagcggtttttccctctccgttcacaaaacagtcgttatgctccgaacctttcatacgggctgcggcgaatccgtcgccgaactcgatgccccgcaccgccggaatcgaaaatgccaggtgagccaattgcgattcgagcgaatcgaagaacggctcgcccaatccgacgggcaccttgtcgcaggtacactcgatgaccccgcctacggaatccaactcccggagcgtgcggtcgatcagctcgtcccagagcgtcggggcaccctcggcgcccaactccctccccggctcgcaattcagccgctcgcggggaataccgcccagctcggtgatccgggcccggatttcgatcgggccgatcatcttcttggccacgactccggccgccaccagcgtcagcgtcagccgccccgaaaaatggccgccgccccgcagatcgttgaaggcacggtatttccgttccgccacgaaatcggcatggcccggacggggcgtcgcgcgaaagtccgaatagtcgcccgaacgggtattgctgttgcggaatacgatcgtgagcggagcacccgtagtgtgcccgtcgcagacgccgcttacgatctccggcaaatcgctctccttgcggggcgtgcttcccttcgcaccgctgcggcgacggtcgagatccgcgaggaaatcctcgcgcgaaagcggcatgcccgcaggcacgccgtcgagcaccacgccgatcagcggaccgtgcgactccccgaaaatcgagagtctgaattttgttccgtatgaattcatagccaattaaatttcttcgagtttacttcagtcgtccggcccgttcatcgtttccgcgcttcgccgcacggaaagcgttctttccgccggaacggaaataccatctgcccgccccgctactcctgccgggcgagcagatcgaggaacgaaggaaacgacttgtcgatgcacttcacgtcgtccagccgcaccggctccggcgtgaacaacccggcgacgatcaggctcatggcaatccggtggtcgttgtgcgaacggacatctcctccatgcaacggcccgcccgtaacgaacatctcgtcgccccggatgtcgatccgcgcccccagcgtccggaactcggcatagatcgtttcggcccgattgctctccttctgcgtcagacgtccgacacccgcgatacggctcgtaccgtcgcaatgggcagccagcaccgcaaggatcgggaacagatcggggcaatgcgtggcatcgacctcgaaagccttcagccgccggccggtcgcagtaacggagatgttctgcaaatctcccggcatatcgccccttgcggatgcgtccgcaggcgcgacgctcacatcggcaccgcacgaacgcaagatgtcgagtatcttttcatcggcctgcagcgaatcgagccgcatattgcgcagcgtaattccctcggtccgccccagcgacgaagcgacggctccggccaccgcgaaataggcggcagaactccaatccgcctccaggaagacgtccgaaggacggtactcctgcctgcccggtaccgaaaatacgattttcgaaggcgtcccgccacacaccccgtcgtaaaacgcctccctgttgagtcggacaccgaaccgagtcagcgtccgcaaagtaagctccaggtagggaatgctcgacggctcggttaccgtcagcacggtcgcatcctgcaacaacggcaaagtcatcaggaaacccgatacggtctgcgaactctcccgccccgaaaaggagatctcacgacgggtaataccgccctcgatccgaaacggaagatacccctcctcacgggcagaacaatgcacgccggcttcgcgcagtgcggcgaccgcctcgtgcagattgcgcttcagaatactgccatgcccggaaatttccaccggggcaccgccgttcaaagcggaaatatgggatgccagcggagtcaacagccgcgtgagcagccccgattcgccggtttcgatcttcgtgcaacgtcccaagcgctccgctccgacaccctcgatatgcagcgtcgtaccgtccgacgcaatccggcagcccataccccggatgacctcgacggctccgactatatcgttgcaaggggcgtaattggcgagccggctctctcccgcagccagcgcagcagccagcacagcccgctgggccacgctcttggaacaaggaacggcaaccgtcgtccgacggaactcgcgaaatccctcgaaaggataattttcggccgaaagcagccgctccatctcctcgcgggtatattgccccgacgccgtggcgttggatgctccagctgaaacataagtatatggcgcaccgagcttcaggcagagcagacgggtgaatttcccggcttcgcccatcgaaaaagcgaccaactgcggacgctccgcagcggcggcaccctcgaaaagcgctccgtcggcttgcaggtcatacaaacgcatcgtacgggcagcatccgaaatattccaggccgtcgtgacgattttcaccagatcggcccccttcgtgcgacacagccgggcgatccccttcagctcgtcgagggagggagttccctcgaaatcgtggaacgaaacgatcagccagcacccgtactcgcgggcaagcgtacgaacgtattccagatgctcgtcgggcgcttcgatctctatatcgacataacgcgcccctctgcggatcgccgccgcgagctgctcgcgggcgaacgcctcggaagagttcgcaatccggcaggtggcaatcaggttcggccgaatctccacgagccgctcgacctcttcgaccgaaagacggcaaaggtccgcccggagttcggccatctcacacgattcgaggatcgcccggcaatccccgaaactcttttcctgtacgctaacgcagatcacgggcgacctcctccaactgttttaatggaatcgcacgatccaccacctcccccaccgcacgaggcaggatgaaatgaatggcatcgccctccaccttcttatctttttccaacgcttccagcaaaacaccgatagctacgggcgactgggtgggaagcccgaccttcttcaaatcctccgccagaccgaccgccagtcccgccggggcgagtcccagccgttcggacaccccggcagccagcaccagaccgatcgccacggcttcgccgtgcatgatcggacaatttttctcgatggcgtgagcgaaggtatgccccagattcagcaagcgccgctcccccttctcgaaagcatcccgctccactacggcacacttgtataacgccgttttgcgaatgatttcggtaagctcctcttgcccgtacacacattcgcccccgcaacaggttcccgctttccgcaagtgggcctccatccgggcgaaataatccacggccttgcgatagtattccgcatcgaacaggatgaaagtcttcaggacttcggcgattccggcccggaactcccggggcgaaagcgtccgcagcgcatcggtgcagatatagatccattcaggctgggtgatcgtaccgaccatattcttataggcatggaaattcacgccgttcttacccccgatcgaagcgtccacctgcgccagcagcgtcgtaggtacgaaaccgaaccgaataccccgtttgtaaaccgacgccgcgaaaccgcagaggtcggtcgtgatgccgccgcccacgcccacgagaaacgagctccggtcggctccccgatccagcaactgttcgataatatattctaccgtagcgagggttttaaccttctcggaggtctggatcggaatgagttcataccgttcgaaaaggccgaaaaagggcttcaggttgctgtcgataacgacgaaaacccgtcggccctgcggaatcagggcatccaaaccgctgaaatcggatgatatataaagattactcacgtttattcgaattgtttgtcccgacaaatttaggaattttatgcccgaaataaaaaagcgaaaaaaattttgtcattttccgaaaaatgcgatacatttgtcccgttaaataccctggacggatattcgacgacaaaaacgatatgcaacacgttcagtttacatactcctattattattacctttattcgggccgagtaaaggcgggagtttgcgtgttgtaaagttcgatcgacagaattacgaatttagatcatagctcctgccttgaggcgggagcttttttgttttcagtatgaaaaaacagcaacctgcggagcttggcggctccgaagaaacgaaaccggcaaaaccgaccgtcaccccggcccgccgggtggaaaacgtcgaggagtactacttctccgtgaaactgaaagaggtggcccggatgaacgaatccggcacacgtgtcatcaacttggggatcggcagcccggacctgcccccgtcggccgaaaccgtgcaggtgctctgccaggcggcagcgcggcccgacacgcacgggtaccaaccttacgtagggacagtcgcgaaataggcttaaaattataac

SEQ ID NO: 10442 - DNA, 12319 bp, Unknown
  gut microbiota DNA sequence
aaagagggtgaactaaaggcctactatatgcggaaagtagaagaaggaaagaacaaaatgtcggtaatcaatgcgttacgtgctaaaatcgtggcccgtatgttcgccgtcatcaaaagaaatgaattttatactcctatttactcttaaaaaacttgcaaaaaccataagaatatggaatttaaggaaatactccggcgccggcgcagcgtccgcaaatatctttcccgcccggtggagcgggaggtgctcgataccgttcttcgggaggctctcgcggccccgtcgtcgcgcaattcgcattcgacgcacctgcgcgtggtcaccgatcccgaaacgatcgcccgcatcgcccggatgcgggattacggttcggcatttctggagcatgcccctgcggtcgtactggtcgagggcgatcgtacggcgaccgacctttggcgtgagaacgcggcgatcacggcgacggccctgttgttcgcggccaccgatgcggggctggcctcctgttgggtgcatgtgaacggacgtccctgcctgaaggatcagcccgacggagcgcaggcggaagattatctgcgggagttccttcccgtcccggcggagcacggcatcctgtgcgccgtcgccctgggttactccgacttcgagcctgcggccctgcccccgttcgatgcgggaacgcatatccactggccggaaaagtagcggggtcgaatcgagtccggggcgggcgagtgtcgggaaggacctcgttcggtcgttttatgtcgcttgccggtgcttgtatcgggaacccggcgggattcgactttcttgggctgaatttatctttttcgcggcgaaaatccggttcgtcgaataaaaaaaccgcaacggaggggttgcggtttttctgtttcggtacgccttgtcatttcttgttgaagagattcatcgtccgttcggggccgatcgcggcgaacgagagaatcgcgtcgccgaagtatttgagtcgttcgggcatcgccttgcgctcttcgtcgttccagtgccccagtacgtagtccacctggtgtccgcgcgggaagtcgccgccgatgccgaagcggatgcggctgtactcctccgtgccgagcagttcggtgatgttcttcagtccgttatgcccgccggcgctccccttcgtgcgcatccggaaggttccgaacggcagggcgatgtcatcgacgacgaccagcagattctcacgaggaatcttctccgcgtcgagccagtagcggacggccttgcccgaaaggttcatgtaggtcgagggcttgagcagcaccagcgtatgccctttgctgcgaagcgtggccacggcgccgtagcggtcggtggtaaaagaggtgttggatgcttcggctaaagcatccaacacgtcgaatccaatgttgtgccgggtatcggcatattcggcgccgatgtttcccagaccaacgatcaggtatttcataagggtaatccgttgagattacttcgcagccgcagcgtcggcaccgcgcgaagcacgggttacgcgcacggcgcatacggccgtcgttgccggggtgaggaatttcactccgtcgaagttcaggtcgcccacgaagatcgtcttgcctacgcccagcggagttacgtcgataaccagttcgtcgggcagcttgtcgagctgtgcgctcacggtcagcttgcgggccgagagaacgagcttaccgccgatcttcacgccttccgcattaccggtcagacgtacggggatcgaaatggctacgggtttgcccggctgtacgcgataaaagtccatgtggagaatctcctcgcggatggggtggaactgcacgtcgcggagtacggctttttcggttttgccgtcgatctccagatctacgatgtaggagttgggcgtgtagatcaggggtttgatctcccggggatccaccgagaacgaaaccgtttcgccgccgccgtagagaacggccggaatctgaccttcgcggcgtaccgcctttgctgctttcttgccgtagttttcacgcttgacggcctttacttggattgttttcattgtaatttgttttttgtatgtgttaccttgggcgctactcagtccgcctctcgacgggcggaccccctaaacgcttgcggggccaaagataagcatttattcccggaaaacaaaaaacggcaccctgctttgcggggattccggattctgcgggcgtcgccgtccgtggcggcggagaacggcgggccgctgccggagtcgggttcgctatggcttcaggacgaggccgcccgcgatcagcacccggtgcaggacgttcttttcgggagcgtattccgggtaatcggacgggtgtgcgtcgaggtgatccgagagggcgtgcaacagcgccgagagccggttccgcaaggcccggtgcgatgcggcgagctgctgttgtccggccggctggcaggcggaggatttggtgacggtcgtgccgcccgctccgccgtgcagatcgagcgcgggttgcatggcgacgcgcacggcgcaggcggcagccggcgctgcgaactcttcgcgcagggtcgggtactctccttcggcgagtttctgccagagtgccgggccggtcacggggaggagatagcgggcttccgccgccgcgatatcgacggtgccgatcgcttcgggcggcaggtagccgccgtcggcgaaagcgaggtcgatgacctcgcgcggggttacgagggtggtcatggtcagtcgatgcttcggaggttgtacttggtgatttcggccaggaaatgttgctggcgttcgtcttcggggtcgtagtccaggccgtcggctttgcgggcctcccagactttcatataaaggggtttggagcgggtcggcggacgattgacgatttcgagcgacgaggggtcggcgccgaggatgcgtccgatgatttcgcggatcggctccagcagctcggcctgttcgcccaggatgaccgtgttgagggcgatttcgtattcgtgcaggatgcgttcggcgctgaagcccgaggcgtagtccagtccgctcagggtccggaaccacgaatgggcgaccacgatgtccgaagtggcctgttcgtgcagcgaccgccagtcgccttcgttctgcgaggcgatggggatgaagcgcgagtggtcctctgcagccccttcgcgcagtacgaacatcacctgcccggggttgccggcgaatttctcctcggccgtgcgcatgatccgttcggcctgcgcctcgtcgtccatcgtgctgtcgagcatcatcacgcccgagagttggaacgagttgtcgagccgcgagatattccagcggtcggtcttgtaggcgatggccgacacgccgaacccggcgatgtagggcggtacgccgtagtgctcgaacatcggttcgtagtccttgtagtggacgatcgcgcggagcgtgccgtcgtcctgccgttcgaaaagcgggtagaggggcagcgtgcgggcgtccgcagccgagaaacgggaccagtcgtggtggagcaggatgtgccgtgagtctttggctacgcggcagcgcgaggcgtcctgatggtagagggccaggaacgagtgcttttcgtcggtgacgacttccaggaaggcgttgccgaagagcgacttgtcgaaggacagcttgctgcatacctgccgcagggattcgcccgatccattgacttgcgcgacgaaggcgcccagcagggggacttccggatcgaacgtgaagcctttgccggagatgtagtcggccttgtcgttgatgatgcggcggtgcgtggtcgagcggcgcgacataagggccagggctgtggggaagaggttgtcgtcgccccagcgccagaatttgtcgctttcgacccgtgcggcgccgagcgtgaggtaggggtcgtcgcggcggacggccttcatcagcgccgttttcttgagtttctgtttcgtgttcatgggtattggtttgaaaaacagaggctgccggacgggttgccggacagcctctgtcggttattgttcccggatgggcggtgccggggccgtatcctcgccggccagcgtcaggacgaggacgggacgtgcggcgaatttcgtttgggattcgtaccggatctccgtgagccgcaggggttgctcggctccgaatttttccgaccttcccgccagcaggaagacgcccgatgcggtttcgatgcgggcgaccgtgccttcggtcgcgagccgtgcgagctgtcgttcgccgaggcggtcccggatttcttcgggatcggcgaccagcgtgagcgtatggcggaagcgcggaggtccgtccggattcaggttctcttcccggaacgacgaggactgttccaggatcggccattgatcggccgatgcccccgctcgcagcgtcagccctgtgcagcagccgtcgccgtaggtggccgatacgatgtcggaggccgggatcagccagacggcttcgatgcctcccgcaggctttaggggccgggcgtagggagtggttccggacatggtcagatgcgcgatgcgaatgcgaccagtccttcgtcgagcacgtcgcagccggccatgaagacggcgcgctggcggttctccatttcgtcggggttgtaccacatgcggatttcgttgccggggaagtcggccgtattgacggccagcaccaggttgcggcggtcggtcaggatgcagaacgacttgggtacgggcgacgaagaactcagtttggccaggtaggacgagatgcgcagatccacgacgggaatgccgtgatacagcaggttttgacggccgttgatatagtcggtgtaggcaccgtccgtgctcatgctgtcgaggtgcttctcgtaggcgctgtaaacgtccgacgaaacgaagaaggccagttgcccctcggctttaaggtctttcaggcgttcgtccgcatttttccagagatcgtcgaacatggcgaccgagttggccggtgtgttcatggcgtccgtttcgtaattgtaggtatagaccttgttgttgttcgagtaggtggcgatggttttgagaaagccgtcgaaggtgttcgcgccgctttcggccgacgtgtcgcccacccacatcgtcgagcggatgctttcggcgatggcctgtttgaagagcgtggtttcggcctcttcgagttcggtgcccgtgagatcctccatattgacctcgggacggttggtaatcagctcatagaccagcgagaagtagtctgcggccgagtagcccagttcggctttcacgcggttgagagggatggttttctggagttttttcgagccggcgccgccgctccagcctgctgcggtgaatttttgcaggatgtcggttttgggctcccacatctgcaccgtcgtcggtacgggcatgttgtaaaggacgcggacgcccaggtcgatggccgaaggaccgctcagcatcgggcggaaaaagatcgtttcgaggtttttgccggtgtaggttttggcattttcgagtgcgctcataagataatttgatttttggtgattgaatgggttgttcgaacgaatggaatcggttcgggtgtagcagttttgcggagggtgtccgaaggcggggcgccggatcctcagcgggcgggttttaccggatcagttgctttgcatcttcggcataggctcgctggttggccgagggagtcgtttctccgatcgacggatcttcgcgggggagcgtgcgggtcggagccgcgaattgctggccttcgtgcagggcgagttccgaagtgcgggggccggaccctttttccgggtcgccgaaatggaggatgttgcggtcggggggaagggcgtctgccggacggacgagtcccagcttgccgagcagcttgcgccattgtccggccggcgtcgcctgtgccgcaggcgttttttccgtagcggcgggttcgatgatccgatcgacgagtccggcggcgagtgcctcctgcggagagagccagcggccggagccgttgttttcggccatcaggagggtgaactcctccggagtgcggccagaacgggcggcatagacctccgccaggcgtgcgtcggttttgcggagcaggtcgatgcgggtcgcaagctcttcggcattgccttcggcggtgcagatcgaattgtggatcaggtagagggcgtgggccgatatttcgcggcatccctccgatgcggcctgtgcgatgactgtggccgccgaagccgtatagccgtagcagcgggtgacgatgtgtccgtcgagcgacgagagggcctcgtagatcagcagggcgtcgtttacgtcgccgcccgtcgagcggatattgacgacgatttccggggcgtcgatttcgcgcagccggtcgaggctgtcccggaatttttcgtaggtggctacgcgcgacgagggttggtcgaactgccactcctcggggacgccgatcaccccttcgatgtccacgaagcaggtgtcgttgcggttggtgatttgaatgtcggattgcatggaaagttgttttttgccggctcgctcgccggcgttcggaatggggttggctgtgggcgggatcgttgcggtttcgcggcgtccccgctccggcaggagggttgggcggattttcgaggagtgcatcccgtgagagtgcggggagtcgtacggctgcggtccgcgcggatgaaggacggtcgaagggctatccgttgggcagacgggtgaaggtgcagcgggtcgaggcggccgaggggtcgtaaccctcgatgcggcggagcgtgcagcggatctcttcgccgccgatgcggaacaggaacgtcgaggcgatgcagggggcgaggcgctgtatctgaaagagccgttcgatgtcgcacggttcgagccgcaggtggagcgtgaggtgctggcagagtttctcctgttcggcctgggtgtcgtagaagcggtgcagtccctgttgtccgtcccggtcttcgaagcagagcgtgaacccgttgtcgggatcgttacggtggaatgcggccagggggtagctgtctccggtggaaggatagccccagcgctcgccggcgggcaggggctgcatgccgcagtagcggacgatgcggggcgtgaaactgttccggtcggtggtgtccggggcgtcgcggtcgccgacccgcaggacgagggccgaaggtgcatccgcataacattccgtttcgctgaccgtcggcgagaagaaggggttggcgaggtttctttcccggtcgatcgccgccgccgagtcattgaccagacgccactggccgaagggctcttccagggtcgcgttcagccgggtcaccgcaccgtccgcctcccggtacttgtagatgcggacacgttccgcatcctgtgccgcatcgcccagcaggatcggctgcgagcggtcgatccgggagctccagtcgaaggtctggccgaggcggtagaagtcgtcggccggttcgacgtaaaccgtgcgggtttcctcgtcggtgtaaaagcgcagattgaacaggtgccgcagggcgtcgagtacgacccatttgcggacgcggtgccgggcgacgtcctcgaaagagatcggggtgttcagaccgggtgcgccggtgaagtcggggcgcagggtgcattggcggctcagggagaatttcatccccggttccgcaccgtagaaatagatggtcgagaaggttttgggcgaggtcggcgtgacagttaccgggttggtacggacggtcatttccacttcggtctgtccggtttctccgatgtagccgtcgtagagtgcccaatctccggtgtaggtcgtgtaggtcgtgcttccggcggctttgcagagcagtaccggggccgtgacggtcgagccggaaggggtcgtgaccagagccgaccgcgaatcgaactctccgattgcgtgcccggccgtgccgttgacggtgcaggtgaggcggtaggagtttccttcggtgtggttgaacacgatggcacggtactggaaggcgggtttggtcgagtttctgcggtcggcgtagcggtttgcgagggcgccctgtacctcggtgccgtcgcccaggtagaaggagtcgattcctttgaggcggttgcggtcgaggatgcggtggtcggtgatgtagcggatgtggtattcgaaggctaccgtcaccgaggtcatgggcctgaagacgatctccccgtcttcgacggtgaagcagtggttgttcgaaaagacatcggtgagggtttctcccagatcgttttggtcgttcggattgaccgtttcgacgaaattgcctaccgagttgatcgacttgtaggggttggcgtacacacggccgtcgctgttcgccgtcgtcgccgccgtcgtcgtacgccgggccaggaaatccatgtggttccgcagggcgttcgtgtcgcgcgaggaataggcgccgctcaggtagagcgagcggaaaaattcgccgttcagaaaatcgctttcaagggtgtagcccgcttcggaaaagagtgtctgcacgacggttgcagccgaaatgaacgggtggtagtcgtccacggagaggaatcgttctacgggaatcagttcgaccgacgacagttcgggggtgtattcgtcgcggcataccgggaagaatttgaccggggtgttgttggtccaggtctggcggatcatcgtgggcgtgagccgtcccgagaaggagatgccgagggtgttgaacatctccgcagcggcttgccgggcccattcggaggtgccgctgcggatctctatcagatacccctccgggtcggagtcgtacgctgccgagagcagccggacggagccttgcagcagtttggcctctccgtcgctcaaaacggccgtgtgctgcgcggcattgaagcgctggcccgtgtaaggctcggcggcgaatccgaaaatgcggtcgttggtccgggttgccggcagccgcagtcggagggcgtgccctttgtttccgcttcgcacgtcggcgagatcctgggcatcgtagtcgagggcgatgcgctgcgacgggtcgaggtcgcagggaatttggtcgatagtgagtttcataggcagcgggtttcttgtcggggacgcaggctgatttcgatacagcccagggagccgtgccggccgatcgtctgctcccgggtcaggatgtccacctcttcgtatttgtcgccgtcgatcttccagacttggggcgatgcggcgatttcggccagcgcttcgataacggcggcgggttcgaaggccgaggcgagggtcgtcgtccgttcgtcgcggatactgatatcttcgtagcccgcgtcgtcggtgagtacctgttccttgcggattttctggacgacgcttttcaccaccggaaaagtgtagtgttcgatcgaacctgcacggcttcgccaggcgatacggcatccttcgtcgcatttcggaacgaccgtgtagccgatttccgctacggtctgtccggcggtggcgatccggacggtgatcgtgccgaccgagggcagaaaacttcgggtgttgagccggaagagggtcagctcctcccctccgatcgcattgtacgtaagagcttctgccgtaatgtcgctcgtgaccgttacggtgtgctggcccgggatgcagcaggtgatttcgtcgctttcgccataggcgatgatgcggtgcgaaggcatcgtcgtcagaatccgggacggtttcacggagtcgtgtgccgcgacgaaggtccggacttcggagtaggtcgttccgacggccagttgcaccgaagcgctccggctttccgaattgcagaatccggtcatgccggacgaggggacgaagcgaatgtttttccggaccatcggggcgatgttcagggtgccggtcggggtgttgtaaaaccgtttggagccgatcctggagccgtccctggtgctgagtatttccagaaacagttccgtttccgccgcgttggagaacgtgtaggcgagcgggccgaatacggaggaaaacatctccggcagagaggtgaatgtcatgtgaaaacgggtttggaagtggatgattgtgtgcggtccgagataccgtgcggtcgccggtgtcggggctgtgggcggagtcgtgcccttcgctttttttcgaaagatacggaggcggcatcggaaaggccgatggctgctgtgcggggtgtccgggtgcctaaaaacaggtgatgacgtcggctttggccgtttgggagatttctccgtgcggggtgtaggctcccgatccgggttggacggtgaggttttcgacggctatgaccttcgggtcggtgcttaactgggtgaagagatcgaagagttgcagttccgtttggctccacacctcgttgcgccgttcggacgagagctttgccccggggtgcagcagccgcagttcgacgctgtaggtcgcacgtccgtgcagacggccttcgacctccttgagccggatgggtggaagccaggctgcgggcagcaggacgatctcgcgcggggtgcggtcgtcggtatcgatgtggatcgtgtaaccatacacgcctgcgagctcccggatcgcacgggtgagataggtgcggttcatgttgaaaaagttttgataaaatgtttatagatattgaaaagtctggataatttcctgacaacagaattgttgcgattgttgaaaaggtcggaaatatcctgaggccgtctgttgaaaagcggatttgtcgggacaaatataaacaatccgaataccccttgtcaagagattcgacccggaataatttcgatctgcggcaaataaagtcggcggataatttgttcggactggggttcaatctgttgcggtgacggtcgcagcggtctaatttggccttgaaaattggatatttgaaatataatagctacttttgctccataatatcttcgtgaagccggagtcttccggccgaaaagtggaaaatatccgtatcttccacggcggcgaagagcgaagttcaacgaaaaattcaacgatatggatgatggtgtcggttccaagcatagcggcagtgtcgtatctcaatacgataccattcatctacggtatccgtcacgaaggtaactttcgtgccgatctgttgttgtcccctccttccgagtgtacgaaaaactacgtcgaagagcgtgccgatctggcgctgcttccggctgccgccgttccctcgctcaaatcgacggaggtgattaccgagtattgcatcggagccgtcggccccgtgcgaaccgtcgtgctgttgagcgacggcccggtttccgaggttcggcgcgtctttctcgatccccactcccagacctccgtgcaactggtcggttatctggccgcccatcgttggaaaatcgctcccgaatggtactctctggatgactacgaacagcttcgtcatgcgcaggagggggacgctttcctgttgatcggggacaaggtgttcgatcacgaggagaagttccgctataaatacgatttggctgccgaatggcaggccgcgaccaaactgccctttgcctttgccgtctgggtggctcgcaagggaacgccctacgaagtcatcgaatcgctgcagcatgccctcacgttcggtttggaacatacctacgaagcgatcctcgaagcgggattcgacaaaaagccgtacgatgcctatgaatatttgacgcgtaatatcgactatatcttcgataatcagaagcgccgggcccttcagaagttctgggattcgggactcaaggtgtcgccccgtgtaaatcccggctgaagggagtaggcagggctcatgccgccgggcggccccctgtcttgaccagttcacgcagaaagcaacccggggaaccggattaatacagggtgctttatgattacgatttacctcaagcaatacaacaagatcatccgaaacgccgataccgggctcttcgaggagttgggttacgacgatatcttgtggatcgatatgctgcaacccacgatcaaggagcagaaagcggtcgagaatttcatggagatcaaccttcagaccaagcagcaggtcgaagagatcgaatcgacctcgaaatattccgaaaccgagaatgcgatcatttcgaacgccaactttttcgtgccgacgggcgagagtttcgtcatcgaacccgtgtcgttcatcatttcgaacgaaggtgtgctggtttcggtgcgccaggccgagtcgcggacgtttcaggagacggagaagcggctccagatcaactaccgcaactatccaacgggctatcatatttt

SEQ ID NO: 10443 - DNA, 25570 bp, Unknown
  gut microbiota DNA sequence
atctcatctcctgtttactgcgcaaatctaaggtatctttatgatcggataacagtccgaattcgcccgaggcgatccgagccacagccgattttgtgcaaagatagtgaaagccgagagaaaatgggagcttgttcccatttttccgagacgcagcctatctaagactatgtcaaagatagtgaaagatgagagcaatcgtgcggactcgtgccgaatcattgttttttgattgcgaaattcttaaaaaagatcgcgcctttcggaaaaaaccttaactttgttaaagtacctcgcaccggcgaaacgacacttttattcgcttggcagctcataggctgccgaacggcaagagatcgttttcgataatttttcggttgctacgaatggagccaaaagatttatgttatgaaaaaaatcgtcgtattcctgctgcttgtttcaaattttttcccttcgggctgcacccggccgaaacagtacgccgactattcgcggcactcgggtttcgaccgtacggagatcgacagcgctacgctgcgaaacctcgaagtattgggccgtgtgtggggattcgtgaaatatcaccatccggcattttcggacgaccggtacgacttggatttcgaacttttcgagttgctgcctctgatagccgataccgctcctgccgctcgcaacgagatattggcccagtggatcgacggcttcggccggtacaaaacaacgcccgagaaatacgagaagatactggcgtcggattcggttttcgaacaccgcaccgacatcggatggattcgggatacggcaacgctcggccgcgagctttcggagcgtctggtccggctgcgttctgccgaccgaaccgcagggaaccgttacgtgtcgcaaacgtattacgaaacctatgaccaatggtctcccaatccctgtttcgacggagaaaaaccctattacgacttgtcgaatcccgactacggttatcgtctgctcacggtattccgtttctggaacatggtcgaatatttctttccaagtaaatacttgaccgacaaggactggaacgatgttcttcccgaatatatccggcgtatggcacacccgacgggcagttacctgcgggaaacgcgacggatgatcgcggaactcgacgacaaccacgcacaatacggcggaggaatcttcgaattgttcggccgttatcgagtccctctcaacacaggcttcgtcgaagggcggctcatcgtcgtaacgcccgataccgtcccggtgaagagcgagcggaaagctccctttcaggtgggggacgaaatcgtcgctgtcgaagataaaccggtcgaatattacatggcacaaaccagggaattcatttcctgctccaacgagaacgacgtgctggcagctacggccgatcaaattctgcgcactaaagagaatcggccgctatcgatccgctaccgccgtgacggagtgacgagggacacgttggccgacgtaacaaagatgccaggacatttcggttggaattacctttggaaataccacaagacattctcgatgctcgaagattcgatcgggtatatctgtccgaacaaactctcgaaagaggaggagataccggagatctcaaacggcctgaaaaaaacagaggattgattatcgatttacgctattatccttcacaagattttaatgaatttgtaagccagtacattgttccggacagtgttaaatatacggtccgatttacttaccccgatcttgcattgccgggcgtattttacgcgagagactattcttatccgacatataaaacggaaaaatacaacgcccctatcattataatggttaatgaagggacgcaaagttacggggaaacatccgtacaaaaaatccaaaataatccatatactataacgatcggttctcaaagcgccggagccgatggcaatatcagcaaatttacgttgcctcggggagtactcggcgcattttccgggttagggtggtattatcccgacggatgggtggtgaatcggcagggtgtgaagatcgaccacgaagtacgacccaccctcgaaggcgttcgggaagggcgggacgaagtgctggaaactgcattgaacctaatcgaagcgaataccgaagaagagtaggcgagttcgggcgcaagatgagaaacggcgctgcgggtgttgaatccgcagcgccgttctgaaatatccgtacccgttccgcccgaacttcggaaattactccaccggttcgtaagagatcgaggagtcctcgtccgtacgctcgatcttcatgattaccgggcggagtccgtcgttgcaggaacagatcgccacgccttccttcgtgatccaatcgccgaaatagaactttccggcgccgtgcgacagggcgaatacatattgatagaccgccttccacgcttcgtcgcaaaaaccttcgggtttggcatagtccgcataaaagacctgtccctcccgcatcatcgggcacttcgtaaagccgggagcggcatactcccgtgccaatttctcgttcagagtccgttgcaggatcgtaattttacagcgcttcataatcttgtctttcgctcggaacccgttctgcgggcggacagacttgcctcccgcagacaggcgtttcaaaaatcaagcccgcacctgcgcacccgccttgcgttcgaactgagccgtcagattggccatcgcctgctcgatcatcttgtcggtcagcgtctgggtcttgtcctccagtacgaaactcagggcatacgattttttaccttcgggcagcttgtcgccctcatagacatcgaagagcgaaactcgtttgagcaacttgcgttcggccgcgaaagcaatatcacgcagcgcggagaaagtcacctccttgtcgatcagcagcgccaaatcgcgttttacctccgggaacttggaaagctctttagccgagaccttattcttgcgtgtagccttgaccagggccccgaaatccatctccagataataaacatcttgtttcaggtcgaaagtcttgcgcagcttcgacgaaacgacgcccatctgtaccaattctctggccttgtcgttgagcgagaaggagagtgcatccccgtaaagatcgctgcggagcgattcggacttgagcgtataaaggtctagcccgaaacgacgcaacagcttctcggcaatcgctcgcagcgtaaagaacgatgcctgctccggtttccggttccacgaaagaggcgcagcgatgccggttacggcgatcgccaggcggaactgctcggaataagccttcagcggctcttccggcatagcggccgtcgcatcgtaaaaatagcagttgccgaactcgtacagcttcaggtcgccattgcggtggttggcattcaactgcacggcttcgagcatattgaaaagcagcgtctgtcgcatgacgttcagatcgttgctgagcggattgagtatcttcacgcaatgctccggcttgtaagaggtgagaccctcgtaataagccgctttcgtcagcgaattggacatgatctccgtaaagccgttagccgtcaggaaatcggcggcgaggttcatcagcttgttccggtcgggtttcggcgcgtaggagagcgccgaattgacgtgcgagggaacagggatgttattgtagccgtagatgcggagaatctcctcgaccaaatcggcctcgcgcgtcacatcgacccgatagggcggcacggccacgcgccataggtcaccttcctcggcctcgattttaatgtcgagcgcaccgagaatcgtgcggatcgtatcggcaggaatctctttgccgatcagacgattgacacgctttatatcgagttccactttgaacttttcgataggagcggagcaaatatccgtaatttcggaggcgatctctcctccggccagctccttcatcagcagggcggcacgcttgagggcatagacctgtatgtcgggatccacgccgcgctcgaagcggaacgaagaatcggtgttcaggccgaagcgcttggccgtcttgcgcacccagaccgggttgaaataggcgctctcgatgaatacgtcggtcgtcgtatcgctcacgcccgaatccaatccgccgtaaacgcccgcaatacacatgggtttcgcagccgagcagatcatcaggtcgttggccgtgagcttgcgctctacgccgtcgagcgtcacgaacggagtaccttcctcgcaggttctgaccacgatccggccgccgtcgatcttcgctgcatcgaaagcgtgcaggggctgtcccagctcgaaaagcacgaaattggtgatgtccaccaggttgtttttgggggtaatgcccgctgtccgcaggcagttctgcatccattcgggcgaagggcctatcttacaattcttgaccgtaacacccgcatagcgcggtgcggcttcgctattttccacttgcacgtcgatcttcagatcgtggttatcgacggcgaaagcgctcacgtcgggccattgcagctcgacgggcttgccctggcttttgagataagccgccagatcgcgcgctacgccgatatgcgacgccgcatcgatacggttgggagtcagaccgatgccgatgacatagtcgtcttccagcttcaggtactcccaggccggctggccgactttcgcgtcggccggcagctccatgatgccctcatgcgaagctccgatacccagttcgtcctcggcgcagagcatcccgagcgactccacgccccggatcttgctgcgcttgatcttgaactcctcctcgccgccgttggggtagagcaccgcacccaccgtagcgcaaaggaccttgagaccctgccgacagttgggagcaccgcagacgatctgcaacggagcctcgccgcctacatccaccgtcgtcagatgcagatggtccgaatcgggatgatccgtgcaggtcagcacctcgccgaccacgacgccggcaagtccgccgcggatcgattcgatcttttcgaagctctcgacctccaggccgatatcggtgaggatcgtcgccatttcttcggccgacagatcggttttaaggtagcgtttcagccagttataggagatattcatagtatgtgtaatattttattattgacaaagagtaagcaaaggtataaaaatatcccgattttatccccgcaaaagagcggtaattacgaagacggccagcaccgtgctcgcaatgccgttgagcgtgccgaaagcgatgccgatattccgctgccgtgtcggggtcaccaacaggtgttcggcgacgaggatcagcgtgaaaatcccttcgccgagccagagccaaccgttctggggacaatacgacccgaaccagaaaagtgccgcgacgctcaccacatgcaacagaatactgaacaggagcgacacccgtgccgaaaaacgggccgggatggagtaaaggccgttcttgcggtcgaaatcggcgtcctgcaacgcatagatgatgtcgaagccaccgcaccaggtcatcaccagcagcgccaggatacagggcggccatgcgaaatgccccgtgacggcgatgtacgcccccaccggagcaatacccagccccagaccgagcaccagatgcgccagcgcggtgaaccgcttgcaatagctatacatcaatataacgaacagagccacaggagacagcagaccggtaagtaaattgatggtagaggccgtgacgatgaacagcagcgcattgacgatcacgaaacggagcgctgcccgggcactgatctttccggccggaatttctcggtcggccgtgcggggattggccttgtcgatgcggcggtcggcccagcggttgaagcccatcgcggcgttgcgggcgaagaccatgcagagcaacacctgcaagagcagcaccacccagccgtacctgcccgaacagtccgaagagatcccctcggtacgcagcgcataaacgaacccgacgagggcgaaaggcatggcgaaaatcgtatgggcgaacttgaccagtccggcatattgacgtatcattgtcgattcgattttatggtcgcaaaagtaatcatttttttcggcagcagaatacgaccagggcaagaaatcagcccccgacaacgcctgaaatccattgtttttctccggaaagatattatctttgcacattattatataaggatttcactcgacaatgaaaaacatacgcaatttttgcatcatagcccacatcgaccacggcaaatcgacactggccgaccgcctgctggaaaagaccaatacgctcaaccagcgggaaatgcaggcccaggtcctggacaacatggacttggagcgcgaaaagggcatcaccatcaagagccatgcgatccagatggaatacctggcccgcaacggcgaaaaatacgtgctcaacctgatcgacactccgggccacgtggacttttcctatgaggtatcgcgtgccatcgcctcgtgcgaaggggctctgctcgtagtcgatgccacgcagggtattcaggcgcagaccatatcgaacctctacctggccgtcgagcacgacctgaagatcattcccgtactgaacaagatcgacatggattcggcgatgatcgacgaagtgaaggatcaggtagtcgatctgctgggttgcgacccggacgagatcctctgcgcctccggcaaaacgggactgggcgtggaagaggtgctcgaagccatcgtcgagcggattccggagcctcagggcgatgcgaacgctccgttgcaggcattgatcttcgactcggtgttcaaccccttccgaggcatcatcgcctatttccgcgtcttcaacggtacgatccgcaagggcgagcatgtcaaattcttcaacacgggcagcgaatacgacgccgacgaagtgggcgtgctgaagctcaagatgcagtcccgcgacgaaatccgtgccggggacgtgggctatatctgctccggcatcaaaacttcgtcggacgtcaaggtgggtgatacgatcacatcggtcgaaaacccttcgacggaggccatcgccggtttcgaggatgtgaaaccgatggtcttcgcgggcgtctatcccgtcgaagccgaccagtacgaagacctgcgggcttcgctcgaaaagttgcagctcaacgatgcctcgctcacgttcgaacccgaaagttcgctggcattgggcttcggcttccgctgcggatttctcggactactgcacatggagatcatccaggaacgcctctaccgtgaattcgacatggacgtcatcacgaccgtcccgaacgtatcctataaaatcaccacgacgcagggcgacgtgctcgaggtgcacaacccctcgggcctgcccgaaataaccaaaatcgactcgatcgaggagccttatatcctggctcaaatcatcaccaagtcggatttcctgggcaatgtgcttaagctctgcatcgacaagcggggtatcatgaaaaaccagaccttcatcacgcaggatcgcgtggaggtcaatttcgagatgcccctgtcggaaatcgtgttcgacttctacgacaagctcaagagcatttccaagggctacgcctcgttcgactaccaccgcatcgggttccgtccgagcaagctggccaaactggacatcctgctcaacggcgaaccggtcgatgccctttcgtcgctgatctatgccgaccacgcctacgatttcggacgcagaatgtgcgagaagctcaaggagctgatcccgcgccaacagttcgacatcgccatccaggcagccatcggcgccaagatcattgcccgcgaaacggtcaaggccgtgcgcaaggacgtgacggccaaatgctacggcggcgacatctcccgaaagcgcaagttgctggagaaacagaaaaagggcaagaaacgcatgcgtcagatcggcaatgtcgaagtaccccagtcggcctttctcgccgtattaaaaatggattagctatgaaaaagacgattatcgacctgttcgaatcctccgttgaaaaatacggaaagaaaaccttcctgctcgagaagcgtcatcacgccttccaacccacgacttacgcggaaaccagggaacaggccctggaagtgggggccggattagcttcgctgggtattcgccccaaagacaaggtcgctatcctggctgaaggaagcaacggctggatcatctccgagctgggtatcttctatgccggagcgatcagcgttccgctgtcggtcaaactcgaagagtcgaacgatctgttgttccggctccgccacgccgaggtcaaggcgctgttcgtttcgaaacaacagcttccgaagatccgccgcatccgggcggaactgccggaactcgaacagatcatcgtcctgggacacattccgctcgaaagcggcgaaacggcctacggcatgctcaaacgtctgggccgcgactatttggccgggcataaggaggaatttctcaaaatagggcaggcgatccggaacgacgactacgccacgatcacctacacgtcgggcacgacggccgatccgaaaggcgtcgtcctgacccaccgcaactacacggccaacgtcgaacagtcgctctcgcgcatcgacatcccgtccagctaccgcacgctcatcatcctgccgctggaccactgtttcgcgcacgtggtgggattctacatcatgatcgcctgcggcgccagcgtggcgaccgtacaaataggggcgaccccgatggagacgctcaagaatattccgcagaatatccgcgaagtgaaacccaacttcctgctgtcggtgccggcgctggccaaaaatttccgcaaaaacatcgaaacttcgattcgggccaaaggacgtttcaccgaacggttgttcgacttcgcgctccgcacggcctatatctacaatcaggacggctaccacaaaggcaagggctggcggatcctgctggcacccgtcgtgggacttttcgacctcgtgctgttccgcaaggtgcgggaggcattcggcggcagcctggagtttttcgtcgggggcggcgcactgctcgattcggagctgcaacgctttttctatgccatcgggatcccgatgttccagggatacggactttcggaagctacacccgtcatttcgaccaattcgcccaagtaccactggcacaagttcggatcgtcgggcaagattctcgaaccgctcgacctgaaaatccttgacgaagaggggcgagagctgccgcgcggccaaaagggtgaaatcgtcatccggggcgagaacgtcatggccggctactggaaaaatcccgatgcgacggcggcgaccgtccgcaacggctggctccacacgggcgatatgggctatgtgtcggaggatgatttcctctacgtattggggcgcttcaagagcctgctgatcgccagcgacggagagaagtacagccccgaaggaatggaggaggcgatcgtcgataagtcgcccttcatcgaccagatcattatctataacaaccaaagtcccttcaccggggcgatcgtcgtacccaatcgcgacgccctgcgccgcgagctcgacgcccgcgatatccgggagggtagagcggctgcggccgccgacatcctcggtgcggagatcgaccgttaccgggccggcggcccctatgccggagaatttcccgagcggtggcttccggcgggactggctatcgtggacgagccattcaccgagcaaaacggactgatcaacagtacgatgaaaatcgtccgcaacaaggtggaagagtatttccgcgaccggatcgactacctctatactccggagggaagggagttgcgaaacgataaaaaccttgcgtcactgcggaaaatggtagaataacctgaaattttaccgcccgaagagttgataaataaaaaaatcggagtaactttgttctccgaatgcgggagtagctcagtggtagagcatcagcttcccaagctgagggtcgcgggttcgagccccgtttcccgctcacgaggtccttttcgaaggaccttttttgttaggcaagattacataatatagaagtaaacgattctggacatcaatgatatgcagaatcgtttcgttttaataccggaacaaagagcgaacagcagcgaaagtacgattatcaggatcgccccctgaaagttccaaaaacagtcagccttattttcctttatccatctgcttctccagcaaagaaattacccggttcatctgctcgtcccgctccttgaaactgtcggcctgcttttttattacctcccaagcatccctgggaatcaacacttcatcggagcctgccggtcgcccgacataatactcctggtcgtttaccaaaagctcattcccgccttccattgccggatagtgaacgacattcagcatcggtccttcaccgttcaacagccaatctttattcaattcgggatagcgggcgaaaattttaccgagtttatcacggctcggttcatgtttcagtttcgacagataggcattcgatagtccgcactcgcgttcgaagcgccccggcttgatgccgctcatcctacaaaattccattattctgtccttgaccgtcataccaaaagtagtttataataaaaaccgtatttataaaaataaattatagaaaattcctcgacatacagatttaattcttcgaatattatctatacttatagtatcaaacagatcgaacgaatagtgttcgaaaaaccgaacgaaaaaaattataacaaatataatatcattctttcgataatgcgacgacaagtatataaaaaggtaatcgaaatcgcacccgatctgaaacgacagatcgctatgaaaatggggtgcacggtagataccgtgtataatgcgctcaacttgagcaacccgaccacgggtgcacaaccggacaggatccgccgtcgggctatggaattgggcggcaaggagaaccgaaaaatccgctggatcaattattgacgccccaacctctcgtgcgaacgaaaacagccggaaaaaagaggtcgtattacaaaccgcaacgaagtcttccaccacatcgtgcttccgcacaatgctttgcgcgaataacgctcaccgacaaaaaacggggagcaatcgggagaggcggaataagtagaaatacaaagaggaaacgggagattttcccgtttcctctaattttctataaacgccccgccgacggaaacttacctccaaatccgaacgcatagccggaaggatgaattaaaaaaacgaacatccttccgaaatttttcgtatatttgcatcatacataagacacaagaggggtgccttcgtcgggaaagaccggaaaggctgagatcataccctatgaacctgatgcggtcagtaccgccggaggaacttgttcatagaccgtaattttctcgtcgaagcatctccgcaattacggtaaatcatggaagtattcatcaatcactcacccgtcgaaaccgacgcagcaacgacgcttgccgaactgctgatgcaggagggtatcgctgccgacggaatcgcagttgcgatcgccaacaaggtcgtgccccgcagcgagtggccgacgacccgcttgcaggccggaacgaaaatcactgtcatacgcgccgtgtgcggaggatgatgcgtatcatcgtcatcaccgacacgtcgttcgccgcatcggaagcggagtcgattcggattctgctctcggaaggagtcgatcgggtgcatctgcgtaaaccgcaatcggccgaagcagacatgcgccgcctgatcgaagcgctgccgccggaactatatcctcgtctgactttgcaggatcatttgcatctggccggagagtacggcatcggaggagtacacctgaacgcccgcaacccggagatccccgccggattcgggggactgataagccgctcgtgccactcgttcggcgagatcgcatcgcacccgacggaagactacctttttctcagcccgattttcgacagcatctccaaaaccggctaccgagcagggtatgcaccggacgaactccgaaaggcattcgcgcagggcatcatcaatccgcgcgtcgcagcgctcggcggcatccggccggaacacctgcccgcgttacaggagtatggattcgggggagcggcctttctcgggtacatctggcagggcgctacacccgaagaactggtgcggcgcatgcgggaaatacgaaaattcaaccgataaaccggcggaaaaccatccggaaatcggtctgataaataacaatactttaatgtacctcttggaaagcacagcgcaccaaatcccctccgagaaggagcaggggaaggtcggaattacaggctcggccaagagccgcgataatcgatcgccggttcgacgcgacaaacgtcagacaacggtacattaaataaatatacaactactaaaaatatgttacagttcattacccaccataccgaccgttacgacgagatcgccggcacccgggccgtactcgaaggaggctgccgctgggtgcagctccgcatgaaagacactccggcggaagaggtgctgcgcatcggacgtgaaatcgaaaagctgtgccgggagtacggtgcgaaattcatcctcgacgatcacgtggaactcgtccgcgaactgaatgccgacggcgtgcatctgggcaagctcgacatgcccgtagcggaagcccgccgcctgctggggccggaatacctgatcggagcgacggccaacaccttcgaagacatcaaacggggggcagggcagggcgccgactacatcggcctcggaccgttccgcttcacgcagaccaaacgcaacttgagtcccgtgctcggactcgaaggctaccgcacgattatggagcgctgccgcaatgccggcatcgcgctgcccgtcgtcgctatcgggggcatcacggcagccgacatggaaaatattctcgcaacgggagtgaccggaatagcgctctcgggcgcactgctgcaagcggaaaacaccctcgaagaaactcaacgaataattaatataataaaccgaactaaacaatgagtgaattagttatcggcggacggacgttccgttcgcgcctgttcgtaggaacgggaaaattcagctccaacgaactgatggcccgcgcaatcgccgcttcggaatcggagatggtcaccgtagcaatgaagcgcatcgacatgaataacccgcaggacgacatgctcgtgcatgtacgccgtccggagattcaactgctgcccaatacgtcgggtgtacgcgacgctgaggaagccgtgctcgcggcacagctcgcccgcgaagccttcggcacgaacttcatcaagctggagatccatcccgatcccaaatacctgctgcccgatccggtcgaaacgctcaaggcaaccgaacagttggctaaaatgggcttcgtggtactgccgtacattcaggccgatccggtgctttgcaagcgactcgaagaggcgggcgccgcgaccgtaatgccgctggcggcaccgatcggcaccaacaagggactggttacgcgcgacctgctggccatcatcatcgaacagagcaacgtcccggtcatcgtggacgcaggattaggcgccccgtcccatgcggcggcggcgatggagatgggtgccgacgccgtactcgtgaatacggccatcgccgtcgcaggcgatcccgtgcgcatggcccgcgccttcgcccaggccgtcgttgccgggcgcgaagcctacgaagccggactcggagcacaggcacagtgcgccgaagcgtcgagccctctcaccgcatttctcgactaattccgccgcgctatgttttcagaagaattagccaaatacgactgggaggagacgacccggcaaattcagcacaaacgaccggcagacgtagagacggcgctcggcaaggaacacctgaccctcgacgacttcatggcgctcatctcacctgcagcggccgcctacctggaaccgatggcccggctgagccgccgatacacacaggaacggttcggcaagactatttcgatgtatattccgatgtatatcaccaactcgtgcacgaactcctgcatctactgcggattcaaccatcataacaaattcgaccgcgtgatcctcacgatggaacagatcgaagacgagtgcaaggcgatccgggcgctcggtccgttcgaaaacctgctgctcgtaacgggagaaaatccccgggcagcgggcgtcgattacatcgaacaggcgctcaaggtctgccgtccctatttcaacaacctcaccatcgaggtgatgccgctagcgagcgaggactattaccgcctgacccaatccggactcaacggggtggtctgctttcaggagacctacaaccgtgccaactacaacatctaccacccggccggcatgaagtccaaattcgaatggcgcgtgaacggcttcgaccgcatggggcaggccggggtgcacaagatcggcatgggcgtgttgatcggtctcgaagagtggcgcacggacgtgacgatgatggccctccatctgcaatacctgcgcaagcactactggaaaacgcgttacagcgtcaatttcccgcgcatgtgcccgtcggaaggacattttcaaccgaacgtagtgatgaccgaccgggagctggcacagttgacctttgccttccgcatcttcgatcacgacgtggacatttcgttctcgacccgtgaaaagccctcgttccgcaaccacatcgccacgctcggagccacgtcgatgagtgccggatcgaaaaccgatccgggcggctaccacacctatccccagtccctcgagcagttctccgtcagcgacgaacgcactccggcccaggtcgaagccgacatccgccgcgaaggatacgaagtcgtctggaaagactgggacaaaatcttcgactgatgatggaggaacgttacgcgcggcagacgatgctgccggaaataggggagcgggggcagcgcagactgtcggaggcttcggtgctgatcgtcggcatcggcgggctcggctcggccgccgccctctacctgacgggagccggcgtgggacgcatcgggctggccgacgcggacacggtgagcaagagcaacctccagcgacaggtgctctacaccgaaggacaggtcggaatgcccaagagcgctgcagcccgggagcggctcgcggccctctcgtcccacaccgcgttcgaatgttggccggagggaattactccggaaaacgcacggcctattctggccggttacgacctgatactcgactgctgcgacaactttccgacccgctacctgctcgacgatgtatgcgctgccttccgaaaaccctgggtacacggctcgatcggggagttttacggtcaggtgaccgttttcaacggtcggaaaggccgtcgttacagcgatctctatcccgaccgggaggccctttgtgcccgtccccggatcacgcagggcgtactcggcacagtgtcgggtgtcatcggaacgctgcaagcctccgaggcgatcaaatatctctgcggcttcggcgagccgctcgacgggcggctgttcacgatcgacctgcgtaccctgcaaacccaaatcatagattattaacctgcaaaaacacaaaaagaacctatgggaaaaggatttgacgaatatgctccggcttacgacgcctggttcctcgaaaaccgcaacgtactctactcggaaatcaatctggtggcccacgtgctgaaaaatccggggcggacgctctcggtcggttgcggcagcggactcttcgaaacgattctggccaaagagtacggtatcacgatcaccgacggcatcgaaccgtcggaaggaatggccgaaatcgcccgcaagcgggggatgaaggtgacgatctcgaccgccgaagaggccgatttcggctgcggcgactacgacacgattctcttcaacggcacccccagctacatcaccgatctggaaagcgtcgtccgcaaggcctacggcgccctgcccgaaggcggccggatcatcctgatcgacgttccgaaagagagcacctacggcgtgctgtacaacctggccaaagccctcggcacgtgggatcatccgctgctcgcggggacctatccagagaatccctatccgatcgaattcgtccgggtcgccaactggcgcacgacggccgagaagatcgagctgctcgaaaaagccggattccgggatctccgcttcgcccagaccctcaccacgcatccgctctactcgaaccggcaggaggagcagccgtcggaagggtacgaaaagggagattacgtagccgttaccgcctgcaaataaaccgacattatgaaaaaatggagcgaagaggcatgggacgtcgcccggcctacctacctgaaaatcatcgaacatccgttcgtcgaagagcttgcccggggtacgttggccgccgacaagttcctgttctacctgcggcaggactcgctgtatctggcgcattactccagggtattgacccacatcgcttcccgtcttacagagaaggagcacatcgcagctttcattcgttttgcttcggacggcatagaggtcgaagaggcgctgcacggctccttcctgaaaggtgtcgttccggctcccgaagagatcagtccgacatgtctgctctacacctcggtgctgcaagctcaggccttagctccggtcgaagtggaagccgctgccgtgcttccctgcttctgggtttatcagcaggtcgggcagcagatcatcgcccggcagcagggaagtgcgaatccctatgcacaatggatcgaaacctatgccgacccgaccttcgccgaagcgactgcccgagccatcggaatctgcgatgcactggccgaaaaaaccggaccggaaacccggcaccggatgaccgacacattcctgcgctgcaccaagatggaatggatgttctgggacagcgcctggcgtctggaaagctggaagatatagcaagtattaattcaaataaatgtcccaataacctgattaacaaaatctattatgaaaaaacactataagcgggccctgacgatcgccggaagcgatccgagcggcggagcaggcattcaggccgatctgaaaaccttctcggcctgcggttgttacgggatgtcggccatcgtcgccgtcgtggatgaaaatacagtgggcgtcacgggtgtacacccggtgcctgtggatttcgtcaccgggcagattcgatccgtactggacgatatcggagccgacgccgtcaaaatcggcatgctgcactcatcggaactgatccgggccgtacggcaaaccctggccgcatacgatatccgcaacgtcgtccttgatccggtgatggtcgccacctccggcgatcggctcctgcaggaagaagcgatcgccacgctccaagaagagctggtaccgtttgtgcgggtcatcactccgaatatccccgaagcggagattctgctcggacgcaagatcgccggacaggaggagctgccgcaggtagcacgcgaactctcgctcggacgcaaggtgtcggtgctgctcaaggccgggcacctgcacgacgccgagcttatagacgtattctacaacgccgaaaccgacgaggcgacccctctgcgctccatgcggctcgacacgcccaacacgcacggcacgggctgcacgctctcctcggccgtagcggccttcctggcccagggactgcctctggacgaagcggtcgtctgcgccaaggagtacatcaatgccgcaatcatcgccggagccgaatacgaaatcggcaagggtcacggccctgtgcaccatttcttcaacttctgggaataagagcggggcagtacaccgaaacggcggaaatattgtgcgaagtggggatattttatgaaaatatccctatttttgcttattcaaacaatgtacaaaacacgaagaaatatgtcaatggttttcaaattccgaatgttgagcgatgaaaacgaccatttcgtccgcgactacgaggtgccgtacgatatgacgctgctcgggtttcatgagttcatcacgcgttcgcttggctatgaagaggggatgtcttcgttcttcacggccgacaagcagtggaaccggttgcgcgaattcacgctgatggacatgggagataattcagaggacgctcctctgccgatggcggacataacgctcggtcagttgattcacaacaatcgcgaccggctgatctaccagttcgacctcatgggcgaccgggcgtactacctcgaactgaccgaagccaaaaagccggagcaagggatggaatatccgcgcgtagctttcgagcacgccccggctcccgatcagttcgatcccgacgccaatgagtcggaaggctctattttcgaggagatgatgggcgacttcagttcgttcgaaggcgacgacaattacagcgacgatgactgacaagcggctcgtcgttttggtcggcgcaacggggtcgggtaaaacggatctgagcattcgcctggcaaagcattaccgggcgccgatcctttcgaccgattcccggcaagtgtataggggaatgccgatcggtacagcacagcccacgaatgaacaattaaaagccattgaacaccattttattgccacactcgacatacagcaggacttcaactgtgggcaatacgaagtgcaggcgctcgaactgcttcggcaactgttcgtacggcacgatacggtaatcgcggtcggaggatcgggattgtatgtgaaggctctttgcgaggggatggacgacctgccggaagccgacccggaattgcggagaacactccgacagcgacttgcgaatgaaggcctcgaatcgctgggcgaagagttgaagcggctcgatccggtttattatgcgcaggtcgatcggagcaatcctgcacgtgtcgtgcgggcattggaggtatgtctgcaaaccggacgtccctattcggaacagcggacaaagccccgacgcgaacggaacttccgaatccttaaaatcggaaccgacgttccccgtgccgaactctacgggcgaatcgatcgccgcgtggacgaaatgctggcagaaggactggaggtcgaagcccgtcggctctatccctacaaacacctgaacgccctgcaaacggtagggtataaggagttgttcgcctacttcgacggacgatgcagccgcgacgaggcagtggagcttatcaaacgaaacacgcgccgctacgccaaacggcagctcacctggttccgccgcgacccggaaatcttctggaccccacccggcgacactgataaaatcatagcatatatcgacgggacgttgtaaatcagtaaatttttgttacttttgtcccgtctttttccgaagacggctgctcggatggtggaataggtagacacgccggacttaaaatcctgtggccagcaatggccgtgcgggttcgattcccgctccgagtacggaccgaccgctaatcgcaagattagcggtcggttttattttcacagaccacaatctgacgtcatacagagagcgatacgttttcgaccgggtttcaactttcaaacgattgccgaccgtacgataaattttcggacaacaacaaccttgttttaacttttaataaggaaaagcgatatactaccaacctatatctaccgggaaatagattttagcccttgccatatttatttagaagcaagaaatttgcaattaaaaatatttagctatctttgccacacaatccgacaaccgatcatccgatcggtttcatcacccacttaatatatccaacattttattcggacaaatatgcaagaccttaaagcacttgaaggcaagagtctggctgaattgcgtgaaataggtaaggcactgggaatccctcaccttatgatgaaaaaaaaggaccttatcgaaaaaattctgaatttcacgcaggacggaggcgttgcggataccgaaacgcaacaaagccccgccgaagctcccaagaaaacccgtcggccgcgtattgccaagacggaatccgctcaggcctccgtcgaaatacgggagcaacccgccgcacagaccacgacgacaccgactcccgcagcgacaaaagagagcggtaaacgacgcggcaggcccccccgtaaggtgcaggccgccctttcggtggcagccaccgatataccccaaacagagctaataaaaatcccccgggaagaagaacccgtccgggaaatacacgaagaacaaccgccgcttcccgcaacacgtccggcagaggaggtcattaccaaagacgattttgcgggagaaatcgccggtgaaggtgttctggaggtaatgccggacggctacgggttcctgcgctcggcagactacaactacttgaactccccggacgacatctacgtttctccttcacagatcaagctcttcggactgaaggcgggcgacacggtgaccggcacgatccgcccgcccaaagagggcgagaagtatttcccgctggtgcgcgtgacggacatcaacggactggaaccggagtacatccgcgaccgcgtacagttcgaattcatgaccccgcttttcccgagcgaaaaattctgtctcacgggcaacggccacaacaacctctcgtgccgcatcgtggatctcttctcgccgatcggcaaggggcagcgtgcgctgatcgtcgcccagcccaagaccggtaaaacggtgctcatgcagtcgatcgccaacgccatcgccgacaatcatccggaagtctatatgatcgtactgctgatcgacgagcgtccggaggaggtaaccgaaatggcacgcaacgtaaaggccgaagtcgtggcttcgaccttcgacgaacaggcttcgcgtcacgtcaaggtagccgaaatggtgctcgaaaaagccaagcgcatggtcgaatgcggacacgacgtggtgatattcctcgattcgatcactcgcctggcacgcgcctacaactcggtgcagcccgcttcgggcaaggtgctctcgggcggtgtggatgccaacgcgctgcacaaaccgaagcgtttcttcggcgcggcccgcaacacggaagagaaaggctcgctgacaatcatcgccacagccctgatcgacaccggttcgaagatggacgaggtgatcttcgaagagttcaaaggcacgggtaacatggagcttcagctcgaccgcaagctggccaacaagcgcatatatccggccgtcgatgtaatcgcgtcgggtacccgccgcgaagacctgctgctgtcgcgcgaagtgatgaaccgcacgtggattctgcgcaagtatctctcggacatgaccccggtggaagcgatggagttcctgcaaaaacagatgaacctcacggacaacaacgaggagtttctcgccacgatgaaccattaaatcctataaaactatgcttcggacgctattcatctcgctcttatgcctgctgggaacgaccagggcacaggcttggggaccaaaagggcacgacgtggtcgcctacatcgccgaatgcaacctcacgcccgaggccgcagagaaaatcgacaagatcctcggcggagcctcgatggtatattgggccaactggctcgactcggcaagccacacgccggagtatgcctacaccgcgacctggcattatgccaatgtcgatgaaggtttcacttacgagaccatgacgaagaatccggacggggacatcgtcgaggccatcgaccggatcgtggcggaactcaagggcggtcagctcgacccggcccaggagcaactctacctgaaaatgctggtacatctggtcggcgacctgcaccagccgatgcacacgggacatttgagcgatcggggcggcaactccgttcccgtacggttcttcggccgggagagcaatctccatgcagtttgggacagctccctgcccgaagcggcccacaagtggagctatacggagtggcagaaccaactcgaccgcctgacagaagaagaggttgcccggattcaatccggcacaccgctcgactggttcgaggagagcaatgcgatctgtcgggagatatacgttgcaacacccgaaggcagcgatctttcctacgactacatcgctaagtatgccccggtaatcgagcggcagttgctgcgtggaggacaccgcctggcaggtctgctgaacgagatatacggatagcgctcttttccgtaaaaggaaatcgcaaaaaagccgtcgctattcgagcgacggctttttggttgagcgaaatttactcttcataaaaaatttccaatatacttgttaattcattttcttgaaatttatcgatccggtaaatatactcgccatccatttcgtaacggtaagtcgtaaccccgtcttctccatagtctatcttgaccggcagggttttgaatcggtttccacctgcgccgaacagataaatccgatcgagatcagtctcgtctatgaaatcgctcataccgaacaggtctatattcagattgttgagctgtaccgggtcattttcgtagatggcattcccaccataccactcttgagagctttctttttcttgcactcgaacaagactgccgtcgataacggtatagaccgactcggcactatattcgccaccgggattttcaacccatgtactttcagcgatatatccattttcatcgtaagagaatgtgtagtcggaaagatagacgcctccgccgggtatgctggtaatggcggtagttcgcccgtctgctaatgcatatattgactgcgctccttccggttctgttacgacgatccgatccggcgcatattctatggtcgttacttcatcctcgaaagattcgtcaggagctccttcgaaattatattgctggtccgtttccgtaatggttacgatacgtccttcggcatcgtaagtatagcgtaatacaaaggtcatatcctcctcccacgtaacgcgaacatgcgaaattcgggtcggcagaatcgccggttcctcttcgtccccgccgggagtattcggcacttcgggaaagtgaagaacacccagtatccattcgccgccgtcttgcttcaacaagatgttctgctcgcccgacacatcaggggccgtgaaggtcacggtcgtagccgttacgtcggttacttccgcctgtacatcggcggcacgggttatggcccgtagccagatttcactgtttgcggtaaatccctgtccctgaatcgttacagacgagccgggtgatacaggattttcctcgctcgatgcgggtacgctcacttcagttacggggcacgggagattatcaccgccctcttccttgtcacaaccgcagaacaacaccgcagccatgacgaaaaacaaaaactttctcataatacaatattgattcttcccgataccccgaagaagacaaacactaaagaagtgtgggtatcgtgactttgtttttagttgataggttctggtaaaccgtgagcataaaaacaagcaacaatcccacactgtacacgaatgcacagagcaagggcttcggcttgttctctgctcgaaaaatttaccagattcatcaacgagaacaaactcaaacacttctcatgttcaagcaaatatatgtctgtccgccgaaacggacgggacaaagataccgatttttcctgaaaaagaagtgttcaccgcctgaatttagggattgttgccgcagacaaatttacagattatttgtgtcttaaaaatacagacaactacttcgtcagttcctcggcaaatgaatgatacgaaaaaaccgtacctgcggcaactcggtacgcaagatgtttttatcttttaatcggttccgcaaaaaccgcactttctgaaaaaagggaaacgctccccgtcacggcaggtcacaggtcgtacagaaactccatcacatcgaccgcatccggatagtccgaaagtgcaggccgctgcgatcggccgaaaggaacccgacggctgtggtcgatacagtcggaaaccacgcactgcaactccgcatcgtgttcccgaagccaagctgcgacctgggagagatcgtcgtattcgaccacggacacctcactcaaagcctgcggaaattccgactggcggatcaacagcgcgaatcccaaatcaaaaaacggatcgccacacatttcacgcagggccttgcgctgacgataattattcaagtatttggggttcattcgtcgagaagcaaaacgaagagaaatacctcgaggtacgaaaatcagagaaacgttccgacatcccaggcccgaataggagaagatatcgtcggacaaagcctccagttgcccggacgtttcccgcccgttcaagaccgcgaccgaatggcgattaccgcgcaaaagagttttgaccccggcatacaggctgcgaaaataccggttggcattatcgctgccggtggcgatcacggcatcgaaaggtgtggtcccgtcatacactgccaccgggatatccggctcaatctttttcagttggtcgatgacgaaactcatcaacaccgcatctttgctcgacattttcaccaggcagcgatgtccggccgtaacgacacacaacaaatcgaaaaagccgaccagcggaatattgccggccatgacgaccagaacggtgcgggacggcagggtagcggggcgctcgtagcacgccagccaatgctcgatcttatcgcgcgataggaactcctcgcggatcgaccgcacggcatcgacaatctcttccggctcgaaccaatcgttcttctggcaggcccggacgatcacctcgcggctcgcagcatcctgtccgaacgaagagaggcgtgcatccaattccacccatatatctacgggagttttcatcgatacaaagatagtataagtcgcgagcaaaaacaagtttgcccgaatcatatcacaacctgtccatgtatcgacaaaaagaggcagaaatttggtttatcgaattttttcgttacctttgttcccgcatttgcggaaatagctcagttggtagagcacaaccttgccaaggttggggtcgcgagttcgagtctcgttttccgctccaagcaaaaggctgataatcaaacgattatcggcttttttgttcctgctgactgatgttacagaggccctttctgtgacacaaaataccctgaaatcgtcgtttgtgatacagagtgtgatacataaaatcgtgtaacacacgaatcgtattttgttgcttgcgtaatccgtaaagattatgacaatcaacgttgtatgtcgcaaagacgctatcaacagaaaccatttagcccctcttgctcttgtttttacccatgaccgctgccgtaagttcgtaggattgggcatatccgttgcgctggagcattgggattttgagaaacaac

SEQ ID NO: 10444 - DNA, 25860 bp, Unknown
  gut microbiota DNA sequence
taactcaaattgaaggaattaaatgactatccctaattattaaacccatataatctgtcacttcaataaactttttaatctcattcttatttctgatacattttccagaaattagtatgtaggtattttcttctgtatatacttcataataacgatacccccatattgaacaaagtaaattgtagttattgttattgtaacttgcaatcgcgataaagcagcattgaagtattatgcaaacaaataataccataaaatcaagtttgtcggcaaatattgttaaccaagggattatagatgaaattatttgctccgcactgttcagagataaatttgaataagatttcacttgaatggtttttccttccttgtgtttgttggattttctataaagaaaaattttaataccgataaggcatatcaacataaatccgaaactaatattgatgccccaccattcaaaactagtaggaaatatcttattttctagcatatcatcccatagttgaaaataattcgtgctatccttaataacacctattaatcccagtgacaagaatgttggtgctgttaccgtggcagtgaacaaaaatttagaaataaaacttaccatcagaaaattattttaaagatgaaaataatttatttatctcttcttctgtctcgaatatgggggttgcgccgtattcgccattgaggtaactgttttgaagcattttatcaaaacgcacattatataaattatccattcgtccaaatgaactgataccgttattgtcttttttcatcaaccatatttcatctctcctgaatatcttttgatccattaaagagctttcatgagtggtaaaaatcagttgactagaaacatcttttgaatgcttataaaacaataaaattatttgcttaataagtgatggatgtaagctacgttccatttcatcaacaataaagacttttcctccttgaatcaagtccaagataagtggaatataatcgaataaacgttttgtaccatcactctcatcgccaagcgaaaaaagttcaatgtcagcttcatccatttttttatgcacagtcatcaatttcttagccctaatttcaccatcaatcaagttaattaaatacaggttatcgtcaaatcttaatgctccaaatgcttcatcagtattggattttgataaatctgttttgattgcacgttgtaaatcgtgtggaattccaagtttttcaaattgaacatctattaatttcacaccatcaacgcccgtattgaagtatcttaatagtgccccaaaaccacgttttaagtcgttatcatcagccgctttaagtaatacaccttgtttgtatggtgtgtcgggaaatataattttaagggaatttacaaaccagtcgataactgcatctaaatcttttatatttgatacattttcatgaatgttacgactcataacttcgtggaggaataattgcttttgtggcgttgcttttgctagaaaagaaaggaattgtgattcttcttctttggggttaagcttaagtagatatgaaatttcaaattcagacttttttgtttctctttgaaaaataacacagtcgctgtttttgtttatttgtttaagccattctgaacttatttgttcagaattgtaactaaatccgtattcatattttttgttaccacatagtatgtgataaataatagtggtatctctttttttattttcggaactcaagcgaaatgggtaaaaatctatcaaatcatctgttctcgtgccccttagaacaagccttttccctaactcaatcgcttttacgaaattgctctttccacctgcattcgctccaaacattgcagcagactttaatacccattgtcctttaatgggttccgttttatgttcctttttcaaagtgcctttattaggtagaagagagaaggtttccctgttcctaaaagagagaaagttctcaactataaattgctgtaacatatactatctcattgattatataataaatcggtgcaaatttagagattttttctcagcaaaacaaatgtatatgccaataaatgccaaatatctatattgtaaatgtgaatttttcacatgttgtttgtttgtaagagaaaaagtccatatctttgctgtgtgaattcgaaattaagaccctggcgaaggaccagagaattcgcgctaattgatatgtatagaatatttatatcacactcgtgggcatattcttcagattatgacaaaattgaatcattcttgcgttaggaaggtatcgtcttttacaaccattcagttcctaaaaatgatcctattcacacaaatggcacagacaaacaattatctgatgcaatagaggcaaaggtaaaggggtgcagttgcattatcattcttgcaggagtttatgccacttatagcaaatggattaataaagagattgaaatggcaaagaagtacaacaaacctatcattgctgttcagccatggggagcagaacgcacatcctctatcgtaaaaaatgcagcagatgttatcgttggctggaatgcaaaatctgttgccaatgctgtccgtaactacgccatttatcaatcactataactatttgttacatgaaaaaggcattgttgattgggattaatgattatcccgaaggaaatgaattgacagggtgtattgaggacatcaatagcgttaaagctgcaattgaacgacatggtgacggatctcctaactttggcgtaaaaatgatgccaaatgtacagacttcaggagaagtgatggatgctattcgtaaactttttgcaggaaatgatgatactgctctcttttatttttctgggcatggctatatgaatagcactggtgcagaaattgttatgcctcaagatatagctacccctggtcaatattatacggggatacagatgtcaacaataatgagtattgttaacacttccaaggttcgcaacaagattatcattttggattgttgtcactcaggcaatatcgggaaatacgaacttcaggatgtaggtagcattttaaatacaggagtttcagtcttaacagcttgtcgtgaagacgaagttgctatggaagctggtggtcatggtctttttacagaattattatgtactgcgctaaatggcggagcatcggattattgcggtaacattactattggcggtgtatatgcatatatcgatcgctcttttggaccttgggatcaaagacctgtattcaagactaatgttacggaatttgctccattacgtacagttacgccacaggtatcattgtcaattattcgcgaattaacaaacctgtttacaaatcccaataacgatttagctctagacccatcttttgaggatacgaacgacccatctgtaaatcatgaatatattctcccttatgcagatgcgaacaacgttagaaaattcaaattacttcaaaagttgcagagtatagggtttgtaaaacctataaatgaggagttcatagtaccggatgtcagttgacagagttgggaaagtattattggcgattagtaaatgaaggaagaatctaatatgaagtattttagcgaggcgtattttcgtaacatagcatatagcactcccctttacgagcaacgtacatatagcgataatcttcaaggagcatctctatataaacagtttgatatattcctttcatacaatatttctgatttgaatgttgtaaaaggtatatattacactttgtcgaaaatggggttacaagtatatcttgactgcattgttgatgttgacttgaaaaggaatgaaacaaataaagatacagcaaaaaggttgcagaaaagattaatgagcagtaaatctttaatttatgctcaatcaccagaagctggaagaagtaattggatgccatgggaattaggtgtcgtggatggacatactggtaaatgtatgatcatgcctgttacaaaagatgcgcaacatgcaagtcctcaacgggagtatttacttctctatccatatattatgccttatggtattgaaggacagatgagagtcttcacagagtcatatccttatagtggagaagatcttagttcatatatacggaaataactcataatattaagcagtgcattctcggctgcataattcgagattgacctaaaaagaagattatggcaacaaatccaccgtcaggagacggacatcgcaatggtgcagtaagaaatcgttcacaggtttataatcccaaaactgaacaatgggtaaaaagggataaagatactgggcgttttatggatgtcaaacaagatggtacaccgtttaaaggtgtgcgaaaagaaaagtgagttaaaacgagggcaagagtataacttgccctcgtttatgcttacatcggttttatcattgattcaataaatgagatttcttcgtctgtaagattgtatttgacatacagttgtttgtcaatttgaacagatgaaagcgaccaatcaatatcgctttccttcgagaagtcctgcgtcgggacaaaacggaatgttttggccgtagcatcttgacttgacttcgcttgacagtgcatgaacctcgcaaagcgagatttgagatataggcaaatatttacgcactcatcatacgaaacattggaatctgcgaatatgcaaaggtaagattctgtacaaatttcgttaggctttccaacaaacgcattaagattgtcatcattagcctctgtgccaatgttgtttgctcgaggaatgattactttgaatctatcaatccagttagtgtgcaaaggaacaagattacgttccacatacccttttttgagacctttaccaatacagacaacaggagttgtcagcccatcagatgtttcatgaaaattgggatcgctcacgaaataaccacgcaagccaaatggtctcaatggtgatacaaatgattggatgtattcactactctgttccgttactttggtgatgattgaaatacttctaccatctcggataaaaatatcagaggtattctgagcaaggcttctttgagaagcatatacgccagtttctgtatgagaaattatggtaggtgcggtttttatgttatcatattttgcgtccattaggaaatagcataatccacctttgatcccacattactgaaaaggtctgatgctttcggataatcgtgcaagctgcgaatagttttgtctgatagcatatctgcacgaaagtcatcaagccctcgtcctcctgcataccaacgagcaggcataatcattgaaataaaattgggttgaacttttttagctatagaaacaaaatactgataaactggcacagaacttgcttgtgcgtctccatccataacttgatacggtggatttcccactatcgcattgaatttcatattctttattcctgttctttctgaaacgaatttatcaacctgcttgataaagtgttcaggtttgtttttaatttgattgattaaatcctcaaagtatctggtgtttaccttagccttgcggaagcctatcaaggttcgtttggtgatgctctttgccatgggagttttgcagatgacaaagatgttttctgcgacaaccttgtcccagatttgttgttcgtcttcgatacttgacaccgaaaataaagagttctttactcgtgtacggtaaatgctgtatgccatatagaggggatataatcccgattttgagttgatttcaagaatacgagaatcctcggcaaatacattggcggtcacttcacccttgtcaatgaaacgaggttcggacagtgtggtttcatacccttgttcaaagaagttatatccacccaaacagtcgccaaggtgcatattcaccacacgccaaggagtaagcaccgtttccttatccggattacggaatgtactgaaaatatccgttatgcgctcgatgcgttcctccacgctgagtttgtcggcagcacgagccatagcccggatacgctttccggctgcacagaatatctccgggtcatagtatttcttgatgttgttgaatttctgtttggtaacacccttaggcataaattcttcccacgattgagggtcgatgagcgaagcgaagttgtcaatggtgatttcttgagactcgtctttcaactctgctccataaatcagcaaaggcatacggatggatataccccgaagaatggaaatagcggcttcccgattgttctttttcttcttcagttcttccagtcgttgtttctcctcctctgtcaaaggctgtttgtccttacctttcttcttggatttcttttcaagactttcaagttcctcgtattgctcatcagtcagcccctgattgttgatgtccacttgattcgtcttgggcatggcttttgtctgaccgataatctttttgaggtcatcgaactcttgcaactccaaatcattgagtttcattaactcatcattatacagacttctgtcctcaaagccattgcgcacgacacgttccacatagacctttttgagttgttccaacatccttggcacatcaaactgattcatcttggaaccctcgatggatattatcgggcagaaattcaggaactcgcccataatcttacggtcgttgccactggtctttcctgtcttggatgaaatcttggctgtttctgctatcactttcaatgttctgtccggtgcgaagtcaaagacatagcattgctctttaacctttccgttgatagcggcaggagtctgcacacggaagatagtctgcatataactggaggcagccgtgttatacgagcctgacagcataaacacagctgtccaagccttcacactgacacccgttgtcagtctgccacaagacaaggtaatggtacgtgtggcatcagggtctttgccaatggcttcttctaccgccacaagtgcatccttgctttcttcatcctcatctccattgcctgcaacattcacaaccttgaaatgttggaataccgaatgtgtctgcaacatggcactcatcgcccgtgcctccttcactccaggcagcatccacagggtatgacggaatatattgcggtattcctcattggcaaacggatagcaactctcccggtcctctttggttataagattcaagaaagcacttacatccttgtcatgaacgaaagttccattgtcatttacacggaagaactcacggaagttgaatgccacatcttcgtccacgaactcattgagtaatcgtccgaggtcataggtgtaaatgttcatggttggcagtgatgcgtatggattcgggtcgccaaagtgcagctcatcccaagacgctttggcacgctgttccattacatagtcccaagtatatatctcatcctccttgaaatcgtccaacaaattgaatggagtgccggaaagacgcagaatcttggtcttgtccttcgtaagttcctgcattacagccttacccaaatctgtctgtgtgccttcgtgcgcctcgtccacgatgatacagtcccatgcggtggcgaacacttcattgttcttatcaaagttgccgcctacaagttcagaaccacgcaagtcttgcatggaagcaaagtaaacatatttgcattgtccttgttttgctcttgtttccagcgaagtatgactatcaccgttattctttgagccgtatgcaaaatcccgcctatcatagaatatcttgccaaagtcctcaaaccaaccgctatcaactaccggacggtgggtgagaatcaaggttcggctgaaatccatatcttttacctcctgtaatgcggacagcgtcttaccaaatcgcatcttggcgttccacagcatctggtttcctttcttgaactgctttttagtcttttcaatagcttcacgctgttccggtcggaatacaataggacttttgtcgtgtgaaacctcagcagaagataatgattcacgcccctcttttacggcgattattgcccgtttaactgtttcaagatcggtaataaaccactcgttggctttgttctcggtatcaaatatctttttcttgatacctgaacgctccagcacgctatgcacttccttgtcattgaaagaacacaaaccatacttgctgttgtatatcgtaagttccgtatataagaggtcgtatgctatacctgccgtttgcgtatattgattgatacgtttcttggcagactcgttgagagccttgctgttgggagcaagaccgaaaacattgtcattgtcacaagtggcttcgcccactttcagacatcccttgtgcgcagcatcgttgatacggaacacatatatcagttttaactttagtgaagatgtgaatttcataccgcactattttattaggtctataaatcggattcgttttccctttttgcctgttgccttgtcggtagcatgccaatccttgatttggcaatagaccccattgtgcctgcggatgtcatctttcagacatccttcacattgggtgaccacttcggtagtcccgaacaagtcggctacaacttccctacgttctccgcaactatttggaatgacacctcttaatccgtccatctgccatacgttccacgaaatgatgtaagcgatgtagttgatagatttcagtaaagggcatttgccaaatttctgttgaaaatactccacaaaagagacaagcatagattctcgggcaatgagtagattgtctccctgccactcgtaaccgtaggtacttttataggcttcttgtgcccactcaagccattcgcccgaagtggatgtgttctcgcttaccacccttagtttgcggtcaagcaaaccgatacgctgttccaaagggatagtctctcctgtcgtggtatcatagcggctaatcagatatggggcttctccgcaagtgatttccagtcggatatcacgcacataatccttccaacttttgccctccgggaatatgatacagccttccgttgttttccatttatgatgtccctgttcgtctgcatattcggtattgaaaacatcctttcgtccgaaccatgcttcatcaatcaggttgttctgtgcattgcatatccatgatggagtgaagacctcagccatatcacgggaacgggttgattgggtatcacggcttttgaggacacgaggcatgatgatatgtccgttatctcctgttataaggtgtgggaggataggggaattgtattggtattctttgccaagatgttcataatctgaagtagcccagaagatattgcgttgcatttcgtccctgctcgtggtgtggtctttgagcaaggtgttcagcaattctggtgaaaactggaatatgctatcttccaatatatcaacttcgacaggcattttatatcaagtttacgcccgtctcttcttatggaaataagggaaaaaggttcttctcttggtaagcgttggacggattcgctaaacattcatggtttcacagcaaatccagtattcttttattggctttatctactactgtagtatccagcgatgcaagataaatctgtgtagtgttctcagaatcatgtcccattccctcgcttatgacagaaatgggcacattacggctcttggcgatacttgcccacgagtgccgaccgacatacatagttaatggtattggcaaatccaactgctttccaattttcttcaacagatggttcacacggtgaagttcgttggcgtattgcttccgataatcttcgtcccgttttgtaatgatgggcaagaggtattccgtttcgtttactggatatttgtcaagaatctcttgcatacacttttcccatctgatgaacaactgctgtcttgtcttacgtctgcgataggaaagagtaccattctgcaagtccttctttctcagataagccatgtcgatgaacgacattccccttgtgtagaaacagaacaggaacatatcacgggcataatcaagattgggcttcaatgacaagtccagtcctttgatacgtctgatgtcattgagcgacaaggctcgcttcattgttttctccactcccgtgtaaacggacttgaacggatgtcgttgctcggtcagtccatcttccaccgcacggttatagacggcttttagaatacgcatatagaaggatatagtattgggcgtatttccccttcctttcaaataagcctcgtactctgccaacaaatccgcattaagctggtcaaacaagacatccttgccatttataaaaccgttaaaacttctgagtgcagctgtataagtctctgaggtgcgtattttgcccaagcgtttcagtctcgctatctgttggctgatgtaagcgttgaatgacaattcttgcctgttttcatgaaagcgcatgactacatcatccgttacgaatgtgccggattgaaataacttgtgtatgattttgttcagcctgtccttgtcccacttgatgcgtgaaccgattgaaagcaggtagttgttcctctcttgtcctgtcaatagatgatgcaagacaaccgtttcggaatggctgtcccattccgaaacaaaaagtttatactcggtgtttatctgtctgaccacacggttgtgaatgacctgatagtagagtgtgccctccttaccgtttacggtagatggacggaacttgacctttactgatgccatatcagtcggattttgattgctcccacttagcgtacatctcccttgaaagttccacaatctccctgctcaacttcacaagatcaatggtacaactctccagtttgtaaagcaacgccatcgccttcttctccgaaaaatggcagcgtagctctttgactacctgattgtagttcgtaccaatggcacggaactgggcgtgaaagtccgacagtttagtcgtgtagtccaccatcgtcttgtccaccttcagtaccttgaacttctgcccgaagaagtgtgccttgagaaagacggctttagcgtacacctctgattcctcgtacatcgtgagaaacttgttccattcctcatcatcgaagcgcaccatcacgcagtgtgtcttcgggttcaacttgggatttctcccgtacttgctcttctttttcattcttcttattcttttagtttaatgattcattcatagtctaatctccgattaaagaaccccgaaattatccgactgcggaggataattcagcccacggcggtgcaaggattttcagtcccataattatatttttgaataattatgtgttgtttgaatttttatatgaaaatcaatgttttaagcttccaaatgtggcgattttattttgtttatttttatctatttttgtttgtttttgtatttttgtgtcgaaattgtgtgttgaaataataattatcctatcaaatgaactattcaaaagacggaataacagttgcgcccataatagatacgagtcatccgaaaaagaacggaaagtgccccgtaaaaattcgtgtaacctatcgccgggatcgtcgctattatccgacgggcaaagaccttaccttggatgagtgggaaggtctgactacaacgaaggttcgcgcccttgtggccgttcgtaaagatatagaaagcagttaccaaattgttcgtggggttgttgaggaattggcacgcgacggtattttttcattcgatagcctcaacaagcgattgaaacgttcgggggttgatactcttaaccgtgcatttgcggctaaaatagcggaattaaaagagcaggatcgtatcgggtcaatgctggtttataatgttgttatacagggattggagcggtttgccggggatcgtattgctcttgaatctataacggtggattgggtaagacgttatgagcgctttctactcggagaaggtaagagccgtacaacgatcggaatacacatgcgccatttacgagccatattgaacgatgcttgtcgatgcgatgcgattaaacccgcgcaatacccgttcggccgagggaaatatgaaatacaggccggtgagggccgtaaattggctttaacgctggagcagatcgggcagatcgcccgctatgaggatgggaacgaagcaacggccaaataccgggattattggctgttcctctacttgtgtaacgggatcaacgtcgccgatttcgtgaaattgcggtatcgtgatattgtggacggtgaaatctgtttcgtgcgtcaaaagaccgagcgcacgactaagacccgtaaggaaatccgggtcgcggtagttccccagatgcaagctattatcgaccgctggggtaatactccagcaccgaataactttattttcccaattctcgacgggtcggaggatgcggtgcagagccacgctaaaacaatagccgctaccgggttaatcaataaacggatgcggatgatcggggagcagctcgaaattgggaacatatcgacctatacggcgcgtcattcgttcgctacggtgttgaagcgtgccggggcgaatatcgcctacatatcggaaagcctcggccaccaagatctgaagacgacggaaaactaccttgccagcttcgagcgagaggaacgagagaaaaatgctgcattactgacgaatttttaatacgattatttgcataatgcgccgcagtgcagtacctttgtcatatcgtgttattttagttggaatgatcggcggggcacatcttatttccgtcggtcattccgtttttactgcatttctcctcttggatgtggtgaatagcaacaacctcacgcctaaccgacgcactatttcgccggacaaagggtgtttcattttggaacagtgcttacagtgacggagagaatgtccgccaaatggacgatgaaacctggtgttaatagattttgcctttcctgtttcaccttgcgaacgatgctattcttgcttttgtagtttataggcgtgcacgatgcctcatactttgcctcaactccttatgcaacaccttgcaacttattccctacgtactgcgcttttgccaagagttatacggcatcgcgattgatgaacagcgaatcattgaagtgttttttgttttcccctatgaaatacggcaaattcttcgccttttcgattctttcggtgttgtcctcgacccatcgtttgaagttgtcgggcacatccttgacctcattcagcggttcctcccaaaaatccctatccgtgccctcgttggctataattggcactgcatagcacttgcagttcgggtgccacccgatgaatttgaaagatttcggatattttccctccattgcgtcacatatttccagcggcgcacgcccttttttgaagcgcggataccagaactttgccagccactgtacgtgcgattttgatgtttttacctcatatccgacaataaaatcaagttgttgccagcggatactgtcggcttcacgataagcgctgtttatttcggtgcgagccatacgcatagcattctgataagatgaccggtaaacgccttgcccagggtgataagcctgcgccactttcgacagggtaagattgccgaacgcatttcggacacgtcgaaatagtttgtccggctcattcagatagacgcgtacatcacggcttatatcggcagcgcttcggccttcgctgatacctatagataaggataattctatgtgccgttcgaactgcttggcgatactccaaactctttcggataaattatgcccgtaagttgttctacgttgaaatgcctcaagtgcaccgagattgtgaagcatccatccttttttcggattgtcgaatagttgttttacccatgaatcgttcttgtcgttggcaaaaaaccattccgaagtgatccccgctgtaattatagtggacaacttatttcggaatgaagataacgaggcatcggcttgtttactacggcttttgtttgatgagaaggcgaacaatcgccccgtattgggttgatatttatatcccattcccagtcgaatcaattcatccgaggccacatcatacaaagcctctatctgtcgtagatattcttcgacatgcgttttgtgctgttgctcccattgggcggctttcaaattcaatccgggcatcgtttcgaattagaatgttggctctataatattgttcatagatgcctctgccttcgcttgctttattcgctcgatttcagcggtaacatcatcggccgttcccattagttcaacgcccttttccagcgacataacgccatcctgcacagcacggcctatagccgcccaacgtgcggtgacatcttcattgaacggttcggcaaattcgtgttctattttgagcgcagccaaatcaggacgcaaatgaatatgggttacattcatcataatagcgagaataagatttttctccctatctacggctatgtcgtatatctctttattattttcgcgcttgatatatcccagtaccatcgcgcgtttgatcgcttcgcccgacaaagttcccagcccagccattttctcgggtgtaaactcgggcgtgaaagtgtcgaacaagatggactgcgcgaggtcttccttttcccgttgctgcgtctcggaagaggtcggtggattgatgtactcgaattttgaatccgctccggtcatccgaatcattttcccgggcttgtcggctcgacctttcaaaaaatctacgacatcgcccgttgctgcggcgatagggtctgcgaaatagttatttgtgtcggatattttgctgtctatatcctcctcgcggtctatgcgggggttgaggcctccccacgctttatcctgtcggtagtagataacattgatttttccggttggattgggagttgcaataacctcccaattaagagatcctcgtttgcatcggtagatcgtatcaggtgtttgaatatcgaaatgctcgatagttgatgtcccctctttaaggtagtacccatacccgaatgcaatgaggttctcgtataggtcgaataatggacgtagggtgtatcctttcgacttgcaaattaccacaacttttacctgcggttggaaattctcgtcccgatagatgtggtagagcttggcacattcagtttctgctcccgcaatgcgttttgctttacgcatggaaacgttgaatcgtgtatcttgcaaaaattgattatatgcttcgaaagcctcgtccgaaccttcgttgttcaccttcttccatcgtatcggattcccgagcagaaagaatagttccacctcattgatgtacttctgtcgtgcacgaggcaacttctcggtacgataaggctcctggcctttccgcatcttatcggcctttcgcataatacggtggagttcggggttatattcctgaatcgcctgcaaaacctccgtatcgcgattctgcataagtgtttgagcctgtgtaatgtctttgtccttgataagcgtaagcagatcacgttctgcaccggttgcattcagatatttattgcgtatcgcattgagtaggttgtctataaatcccatatccgtactttttaccaaattcctaaatcctctttgtctaaatcttcttcattgttgaaatacccccgcttttcgattactccggtcagggcatcttcggcgtcgtcatggctgttgaactcctgctgcttacggtatgatttgacatgcgaggcgaactccggccatttgtgctcccatccggtcggaaaataaataaggttttgcacttcattcgatcgcgtgaaaatacgcacccttttgttggcggtctgcgtaaatgggttgaacgatgtaaagttgttaccgattattcggcactgcgcctcaacattgcgcccgaaagacctgccgccattgttgctctcgacgtagcagatctccgtcttgtttcgggacagcatctcggctgttgccggctcggtatattccatcggtttctgtgtatataaaatgtccgtcacgaaattgccgatgggagtttccgtatagcaaatagaacacagatagtcactgccggtatcagcggtatccgtgtagttctttcgcttcatagatgctgcatatggaattatgtcgtatgtcttaaactctccatacatcaaaccttccagcggcttcgggttctgcatatattgcgtttcaaagacaaatgagttcgatctctcgattttgtgcagttcctccagcgtatgcttaaattcccagagaggctgttcctgtccgttttcgtcatgccagatgcagggcaacgaaagtaccgtccattcctccggctcgatctcctgaagatagccgcatagatcgtgctcatggagccgttgcataatgattatgataggcgtattgcgcgagttcacgcggttgcggatagtcgattcaaagcgattgttcacccgctcgcggatcgtttcggatagtgcatcttccggtttgatcgggtcgtcgataacaatagctcccgcaaaatcgctttcccacgcaggaataaaatcacccatttcgcgccgctccctatacggatcatttacttgacctgcaccaaatcctgtaacctgtcctgctgcacttactgcatacagtccgcctccgacggatgtataccactttttagcattcttgctttcgacgactacttcagggaaaagccgctggtagtagtctgattgtaccgtttcattgatctctttcgagttgtcgagaacaagatcatcggagtatgataggtgtatgaatttactgcgggggtttaacgccagcccgtaggcgatgaagttcttagagacaagttcggtcttgccatatcgtggcgcaatattgataataagacgctttatttcgccacggacgactttgtcaagagcttcgcatattttgcgatgatgatcgccgacaataaaccgcatccccgtcttatgcttgaacatgtaacgggtgaaattcagcataccggaaagacagaaggtacgctctatgtctatgtcgcgaatcggagtagtgcgttaatactcttcgttaagttttaacccatattgtcttgcctcttcgggagagagagtgcgaggtggaataagttcggcaccatctgctcctgtaacctcttgacgttctacatatccccgtttttttccgcgtgttttgagagtgaaaatgatcgctgtttcggagggacgttcgatccaaccggcaaatctcttttcgccattctcgtccttttcgatggccggaacgccggcaaccaatttacgcaggttgctttcggccaaatcaacgaaccgttcacgggaatcttcgagggcttgggcgaattgctcatcatcattgcaccatgtgtaaattgtgctacgctctacacctaaattagcagctatgtctgacaaaataccgccgcaagcatttgcaaccttgcgaaaggtatctaatttcggttttttggagggcattgccattttttatactgtcgtttttgtcgttattcgacccgttcaaccatatccgagaacatttcgccggggattattttgtcgtctggcctgaacccgaaccgaagcatgaatgatgatttcgccctataagacttaaagttgagcattacataggattcgatgtcttccgctttttgctctgcctgttgacgaatctgttctttcatctcctttaccgcggccttgcgttcctcaaacggtcgttgtatctcttcgaaatcacctaacgtatcagacagttctgaacttatttcgtcctgcatgacggatataccgtatatgttcatgtctgcttcagaaaggccagcggctttatagtctatttccggtacaagtacttttattttctccatgtcgaattctcccattgcggagggcgagttcatgaagatattttgttcgcgctctgtcttgtcgtctaactctacagcttctaccttgatctcataatccgtttcaggtgtcccgtcgtaattgttgatgatgtcaagcgtctgtacgcgcttgtgccctgaaaccagataagatgacaactgattccatacgataccgcccagatagccgacagttttaaagttctttttgagcttcttgatgacttcagggtcttctttgcgtggattgtatggagcaaagttgatttgtgatcgcttgattacgaccgtttcactttgcttgtatttgggctgctgctcttttctcttcgtcatatcgcagtaatatatttcgggataaggggaatactttgtaaatcttttcgaggtcttgcggataatgccggcggaggtaatcgaatacctccggcaaaaacgtcagaccttgcgatttgttcttgttgtaggatatgggttcaggcagtttctttgccttgatgtaggccatgacgtccgatttcttccacttggatagaggatataccttgttcgtattgcttatagcttcgttctcgtatccgcgcaacataagacagcgattcattccgtccgactgcttcattccatagaaagagtaagatattcccgtcttcatccggacggattcatcaacgtctttcaacgataacagctttacattggggttaggaatgcagtatagcccacaacgcaaaacacgcgtcaacgtccaatgggggacttgcagtatggtaacattggcataacgagctttgactgctcgcaaatagttgtcaatgtggtcgaggcccttgacgaaatacatgaacacgcaaacgatctctttgaagtgcggagccattaggtcgagcaatacctcgctgtctttgccacatgaataaaaaaggatcgccctgtccgttttttgacggacagaggcaatcacttcgtttgcatggtctatcggggtcatgattaacctgttgccatgccaaaggcggcgcgaatgtcgcgtgcacgaccggcacgattcgtcgcacgaccgcctactgcacgataacgaacacggctagcgcctgtcgtccgattgattcgatttcttactgaatttcgagtgcagcttgaattttagaagtttgacaatatgatttaacctacggaaaggcctcgggcggcagattgcctagctcttgtatatgcactggtcgcccttgcatacctattcgcaataacaccatttcggccactcatatttgcgaggctacttaatcctacagcaggattaggcgtgcggcgtcgcaattcactcgttatacggctgtattgcgcgtcaagctgagttgctgttttttgtcttcgtcttcgagtgcagcaatgattttaagggtttaacaattcattttctcgattaccttgccgaggtggtagtcgatctcggtcatggtatattcgttaccgttgtgctcgtacacaatcggctctttcgtctcttcgtcgcaaacatctaccagctcgacgcctttgacttcgaccagcgcgccggggcgattcttttcgtaacctacccagaactgtatggcatcgtagtggttgataaccgtatcaacgcccttctcgctgtcccacgccgattcgggcacgtcactgtctttcttgtagactttgcctgtgttgttgtctcggtatgaaatgtatttcgtgttggtcgggcgtacttcgcgggtctcgaccgttttttcacccgacaaaatggcgtcgaaccatttttgtttgatgataagcgttaaaattttcatagccgtaaatttcattagtagcgggggcaagaatcgaacttgcgcctgcgggacactaacccgccgtggtaacctctgcactaccccgcatatatctgttcgatgcaaaagtggacacgttcggcacattatgcaaatcttactattgaattatttattaaaaatacgattttttattgagagctgcaatttttaaggtcttttcttcacacaccctttgcagcggataatctcaagcactactgcgtcatatttgacgatcaataggctgtcgcgattgttgtctgcacctttgtaggctttacacccacacttcagccgcgtgcggtgacatgtcgcgtccgtcaattcgaatgcctttttgagtaatgtcaaatcgctgcgtttttctacgtacatcgttggtttcatatattatataacttttacaaagttgaacattctgaatgaccgccagccctcggcaaccgtatcgtaataggttacgaggtgtttgttaggcttacggtcgtcaccttttgtttcggggcataagtcgtccttaagcgtaccgaatgcctgtcgcaattcacccgtactcgatttgaggtagaagaactgcacgatgcccgcgcgcatctttatcttcaatttgaacacctgccatgccttatgcagacactcagcaaaggttacacccgtcgcgcggcacatctgccacgccgtgcgcatgatgatggaaaggtcggttcgtttcattgttatataggttaaaagttggtttttagtttgagtagtcgcaagcactctttcaactcgctgtctgtgtatttcttggcgatctctcgtgatatgccgtttgtgttcattgcgattttgatcgcagcctctctgttcaccttgaaggattttcttgtcttcatagcttttcaattttttcaaatgtaacataatacagcctattgccaacgagtaccattgcgatattcagtttatcgaactgtcctcgatattcaccagtattgcgtccgaatctcaccgggtcgccaatttttatgtctttcatatctttcatttttaccaccggcggcaggtgccgccacgcttcgggcctgaggtctgtttatagccgcccgaacggctttattcgtcgaggtagtagagcagcagttcacaatcttcaacgtgcagaactctcgtaggttcgattttttcgagttgcaaagacagtgtatcgtctttctctgcatagatgtacgcccactggcctttcagttcgatttcttctctggtgccgaaataggcgacagtattatctacgtctttgacaagaccccagctgccattgtccataccatcacgattgattgcgtcgatcactttaaatgcaaatgcgttcatagttctattgttttagacgtttattcaataaatcaattagttgatttcgctgactttgcaaggtgtgaaatacatatctctttcgatgccaagaccaaaggggcgagttctaacgcgttgaagttcattcagtgacacataaccatattctcgctcgcccatattgtctaacaatgcgaagagaatgtagtcgtcgtcttgcttctcgccttcgagaatgtaccacgtctgactgccgcaggggttgaagaacttgcagatgacctgtgccttgccgcctttgccatcttgtgaataaatggggtactttgccaactgcttctcaattgctttagttaagagtttcatggccgtattgtttaattgttgttttgattttttggtgcaaatataaatgatattttgatataatgcaaatattttgagataaaaatttaattgacactaaaattttttgctgtttatatgaatatcaatatatttgtggcaaataatacgtcaaaatgagagttaaagaattattgaaggaacgaggaatgaccgcaaaagagttggcggcgcgtctcggaatgactgaaacggggttaagtattgcaattggtgacaacggaaatccgccgttaaaacgattgcaagaaatagccgatattttgggtgttgaagtgccggaacttttcgccgcttcgaaagagggagcaatcacgtgcccgcattgcgggaagtcgataaccatcaaggcagaataacctcaacgatacctacccatggaactacaacctatccaaagcaagatttacgaaatacggggccagcgggtgatgctggaccgtgatttggcggaattgtaccaagtaacaacaagcgctctcaatcaagcggtaaagcgtaatatcgaacgctttccgcccgatttcatgtttcaactgacagatgccgaaactgaaaattggaaatcacaaattgtgataaccaattccatcacgatgggtttacgccgcaacccctatgcgtttaccgagcaaggcgtttctatgttatcggctgttttgaaaagctccgttgccatacaagtaagtatcgctattatgcgtgctttcgtagcgatgcggaactacatcacgaccacgacgacagtaacggccgagttggccgaaattcgggcgaaactggcgttactggagcgggtggacgccgacaatgccgaggcggtcagcgatctgtcggaagatatgcgcaaggagcttgataatatctacaacgctattgcggcgttgtcggtcaagataccgcaggcacgcaaacccgcccgcaaaattggattccaacaagcggagcaaaaggcggaagagtagcaacgtacccgacgaacacaatcacctgcccgaagtgcgggacggtgctggaggtaaaagaaaaggaataaataaaactacattcctatgacacaaaagcaggccatacagttgttcgaggaccgcaaggtgcgcaccgtttgggacgagcggacggagacgtggtatttttccgttctcgacgtgatctccgctctgacggacaccgtgaatccgaccgattatttcaagaagatgcgcaagcgggatgaagcgctcgcctcgttcgtggggacaaattgtccccagatagccatgaggtcagaaacgggagtgatgcgcaagacgctggccggagatgtgaaaaccgtcctgcggattatccagtcgattccgtcacagaaagccgagcctttcaagcaatggatggcgcaggtggcaagcgaccgcctcgaccaaatgcaagaccctgagttatctattgagcaggccgtagccgattataaacgccttggatattcggatacatggattaaccaacgcttgaaaagtatcgaagtccgtaaacttctcactgacgagtggaaacgcgggggcgttgatggaacgcaatatgccacccttacggacattatcacgaaggagtgggccggacgtaccacgaaagcctacaaacgttacaaggggttgaaaaaggagaacctgcgggataatatgaccaatgtcgaactgctgttgaactcattggccgaggcctctgctaccgaactttcccgaaacgaaaatccaataggtttcaaggccaacgccaacgtcgccaaacggggcggtacagtagctaaagttgcccgacaacaactcgaaagccaactcggacactctgtcgtatcacccctcaacgctcggcaatacctcggaacgttgcccgacaatccgccacccgaaacagcgcaccttacttcagcggtaaaatcgacgaaaccgattacatgcgacacctcaaacgaggaggaataaatagttctcaacttaaaaacacaaatgaaactaaagtaataaacgcatcgaattcgatgcgttttagaatatgaaatgtaatatggaaccgtctctgaatattcgatcatttcgaataggcaatttagtgtataacccccatcttgagcgaattgggtatattgcagaaattacgcgtgcagacatgacgttatttcatggtgagatgctaattaaggaagccggattttatcatgagattttagataaagtagtattatgagatgttaggcctatacgtttgactccaacgttattggaaaaatgcggctttgagaaagaatttagcgactgttaccaacgatttgactactatatcatcccccgtgtgatatgcttatctcctaaaaaagaagggttctgttggcaggtggaagacgaaatcgacgattgcaatgtggatgtgcccataaagtatctgcaccagctccagaatatatattttacattgaccggaacggagctgaatgtagaaaagatatatgatgcgagaatgtaaaaagccgagggaactcggctttctgtttatcatttcaaaccgaccgaatcaaaaatagggtacggttcgatatgtcattttctcggttcatgattgaggcgggattgtgagttgattatcttttttagtcggtctcgaccgcaatacctccaatatcactcggtcaccgtcgagaaccagcatcccgtgccgacggggatcaccaccttttgtgcggtgctcggcctcgcattcggtgcggatccggacacaacggaaacctgcggcctcgaaagccgatccgattaacgataggtcgctgcgtttggggacgcagtacatggggttaattgccgcttcgatgcggcccatgcgttcgatgcgctttttcattttgatttagcaataaaaaactgcgttacgagttgctcggctcaaaatgcaagccgtcgggcgtttccgctaccgaactcgacgcagttaaatttaactgtatgtatagatacaaaatacccaatatggttggatatgtttgtatcgcattttgatttagcaatgcaaatataatgattttgtagggaataacaaaggcgagatttattctcgcctttgttttgaaacatatatcctatctgattactttttttgaagttttatttccagtgttatattatctcctgctacacccatagacacttcggcaattccgtttgagatagaatgtactttgtatctgtataattcttccccgtctatataagtatatatcatatccccttcagctttgtatgttcctgaaccgttgccaaaatacccgcttcccgaatatgtaccattttcataaaatacaacagagaatgcaagatttgtgtgtggcggttgggttatatctatccattcgccgttactttgtatggcaattccctgccatgtgccataaagattctcaatgtcgaacttgaacgattcttgctcatccttttcgcaccccataaaagtaactgcacaaataacagccatcaaaagtaaaaattttttcataacataaattgtattggttagatgctgcaaagttacaaaattcccccccccgcaaaataatgagcctatttttttgaagttgtgccgaaagttccgaggtttgtaaaaacgctgaagctatgatttggatttatattttgctattcgtgattattgcgttgattgtgtatttgatctatcttgttcgtttttggggcagaactaatattgaattgacaggtgatacttatactggattaaacaatgttctgtgtagaatattgaatcaagacagattaaaaaagtaatttactgattttttgcattgcaatccaagtccattcaaaaatagtgtgtccccaaaattgagaggcgcaaatagatatgatagctaatgcaatagcccaatgcgcttcgcgcctacttatttttaaattgcgaagttctaaattatcccgttcttcttgtttgcgttgttcgttatagatgactgcacatcctccctggtctttacacactgataaattagccgcagcttttaaccatattccacccccttttatttcaatgaccatatgatcttcaagaacgcgcagtattcgcatccgttgttcttcatttgggattaatgttttgacggcatccatattaaaataggccggatttcttgataattcatttagaaaaacgtcggcaatgttaatgtctcctttttgtagtttggctatcataaggttcattgaatagtaattcaatctgaaatttgcatcggctcctattttttaactcttctttgaatgcttattatcaggtgtctgaattacaatatatttttgtaattcattgatatacattattttagctccaattttatggggggggg

SEQ ID NO: 10445 - DNA, 20649 bp, Unknown
  gut microbiota DNA sequence
ggtcttccatcagtttatcggcgacctttacgtcttctttccgcagtaaggtttccagatgcaatatgctgtttagttagttccacgttctattttcggcgggccgggcctctcccgccggatttggggcttcctttatttcagataaaatttaacggttgatatgagttggtccgatagtttgtaaatgtcagtaagtgctgtaattaaatgttttgttcctttcttttcctcgtcaaacgtttcaacatactttttccctccgttgaaatgcaagcccagatactgcgccctccgtagtggctatccgctccgctgttgtcgttggggaaatcattacccgcagcgttcttaccaagcgaatagcgttcataaaatccgcgtagtaggattgaaatacgatggtggacaaaatgtttgtaagagctgttgtatccattgtaggggaccagtatataagttttgtccgctcttttagcatatcttcgatttcttgttgcgtccgaagtgtggcgatagcgattatttcggccacctcttttgatttttcggagcatatggtccacatacgtttaacagcaccctccatctgttcgtcgtcgaaaatcagatcaaggtctattagtcggcgacttatcatcgcgagtcgtccgagttggagggggtataggtaaagggttatttgttctttgtcattgccttcaatctcgaacgattcaattttttcagtcagtgtgtcaagtgcacgttgttctgtaaggcggccgacttcttcttttttcatattataaactattgtttttgctcccgccccgtcctcgagacgtgatgcaagtcgtcagctttccagcgggatagagaatttacaaaacgctcttggtatattccggagttgtaatcggccaccaggaataaccaccttgttccggagctaaaactttcgcagatacttgaatttggagcgggtcggttttattgattccaccacccaatgtcgctacatattttaaccttgcaaaagcgatggagcctccacttttggaatcgaatacgaatgcttttactccttcgtaaatctcgccttttgcaggttctgtagttccgaagtaaaattccatcgtgtcgtcgtcaaaatctacgacattccaagtaacttcttttgtgcctgtcgtttcgtcgattgcagagtaaaatgggtctgcttctccttcccgataaaaatcattactggaaggtatcgcgaaattggtggaaacaccaccattataaggctgactgattttggtgaaagccttcattaagtcggcagcctcagcgtcttttactcctttcgggagaggattacctgcatgaacggctttcagtccgattatttgtcccatgtttaatattttttaagttttactttgaggtttgaaaatgtgtaggagatcccctcctcactaataagagtttcatcgctcacatcaaagaaccagcgttcgttgatagggtagtatcctagtgaatcgaaagcgagacgagttagttcgttcagacggttgcgatcggggtagcgttgctcttcacgaccgattgtcggtgttgtgtccggtacataaatgtttacatttacggttgccacctgcgaatctccgacgacatttgacaatgagcctacgacgataaattctcccgaaggattattcgggtagtggtccgcatacatcatcggcacggtcttccctaacagcgaatcccggatgcgatcccagacgagtttgaatatttccgtagaggtcaggttcatcgctttttcgattttaagaatcgagcgaactccgctttgagtttttcagcagtagattccacccagtttcccgacccttcgagaacgtcgaaacctttagcctcgacatatttcgcgtattccataccggctacccatacgagatatgttttgttagcgggaagttcacgggcgacagaccgggcatgttcaagccctttggcatgagcttcatcggcacctttgttccctttaggattgccgtccggtctgacacggcggttatacttgaaagattcagcaatgattcttccgtattgtaccacaacatacccgatggagttgcgtaggttacccgtgtgatcggtataactaccgtgttcgcgggcgtacttcaccactctttcccccaacgccgacaaccattctacagcttttcggtcgtactcttcttttgctcgcgcaaattcaagttccacctcacgccagttggtacactttacagccataatctcgtgttttcgtaacgttgtccgcttttgtagaatccctgtaccggatacgacgccgtgtccttgtctttcggtttggcctcagtgcggagcgaacggtcgaagatgttgaatcctcggctgtcgaatatgcgtactttcgtcccgataggaattggctgtgtatctgcaggcatcgtaacctcgaaagagtagaggaaggcatccccgttttgccctttgatttgctgtgctcgtccattctgacgggcattgcatcgtccgatgacacgccattcatgcgcaccttcgatccacgaaccatcaggattttgcgaggcgtcctcctcgtaccacatttcgagcgtataggggaatcttaccattggtcggaaatgtcggtaattttcgatcgagtatcgaactcttcggcaatatcgtccagcccgttttcctttgcgatatggaaaatgcgcttttccagtttgtccgtgtacgacaatgaatagcccccgttgctctcactcgcaagaacaatgagatttcgcagaatggcgattgtggcttttgccacgctaattttatcggttaccgtatagtctgcttgagtgtctattccctcgtcaatgcaggccttttctttgaggaaaggatccacatcgtaaggatacagacttgccgatattgcctcgaaattcttcatacaactacgattctacggtcagcgaatagatgccgttgatttcggtgataaccggaagtgacagcgactgtgctttcgtgaactctacgccgttagagttgtcggtttcgcccttgccccactgtgaaatgcggatgcgtccgtagttagagtaggtgacacccggctcttgccgcagctcgttgtcggcataggcgttcttgatgacgcccagtttgcccgcaggtacgaacacgaggttcttgtcgttccacggcgaatactccgtaagtttaccgttatcctgaatacgggtcatgcggcggatgacttcgaatgtcgggaatccgttcgaacgcataaactcgttcaggttcgccagcaacagcggtgtggacgacttgtcactaccgaataccgccaacttcatcttcttgttgcggaggatatacgacaggcgtttctgcgagagcagaatgcggtcgaacgtaactttgtcctgtgcagcatcgaggatggcttgaatatcctccagcgtatcgaccgtatctttattgccatccgtccataacgttttcgcggtggcaatgttctcgctcggcattttgtagtcgatcgtaccgcgcacaccaccctctgggttattggacgcgtcaaacgtgaatacgcctttgttcgacaatgctccgaggaagatgatgtccagtttcgattgcacggagttcacgaccttcgtaacattgttccacatcagattgatgagctgctgtgtcttggccgaatcggacagcatccgcgaatcgagaatctgcaacaccttacgatactcttcgataggcatcgaataagacatctggtgggttaataccttctgcttgatcgtttccagtccctcggttcccatgataggctccttacctttggagtcgagcgttgcagcggcgacgctcaaattgtacgagccgatcaactcctcgaagttcagtccgacggtgggggtgtcccagtcgaggaatcgctcgtaaatattttggtcgaatagccgcttacgcagttcagaggcggcatcgatgcgaatctgcacctgtttagtcagttcgccgaaaatggatgaataaaatacttcgttcattgtttacctcctcttttactgtcgtacatacttgatttcggggttgttcttcaggctgtaaccctgaagccatgcagcagggacgggataggctacatccttgaggatgatacctgcatatccggccgatacggtctggaatccgttattggcggaatagaccatgtcggtttcgacaactgcatcaggcagattgtcgtccgagaggacatctacgccttcagtcgcacccgttacggccgctgcgaacgtgatcacatcgtaatctgcatttttggtatcaatgctttttacggtcgaatttgactcgccgaccttaaccgcatctcctacttggagcatggaacccttcttgacatgtggagcagtggttgtgccgcccgacagaacacgtgcactcttgcatatggaacattccatgttgtcgaagtcgagcttgatcggcgtacctttgggaatctttgtcccttcgggataggttcccttcagtttgaagtcccccggcaatacggcgaactcaccgcgccagaatatggggaaaccgccctttacttttgttttttcaaatacgattgccatgattttacgttttggttactctttgtccggaagtgtttcagcccacgcctttgcgagttctttgccctgcgcttcgggcgtggacatcgggaatcccgaacctttcccttccagccctgcggtaaccagatttttctgcacgtttgcgaggtagtcgccgatcgttttttcatctgcatcgtcggcgatgacgaatccctctttcatgcgccactccggaataccgagttcttttgcctttgcggagatgagattggcccggtcgttcttggccttttcagctttcagagtatcgctctccgctttgatggcgttgtaacgctcctcctgttgcttcttgtaggctttgaaccacgcaggttcctcatcgtcgggttcgttttttttgccctgcccgcccccatttgcaggagatgcctcactctttgccttgagttcgtcatacagtcctttcagtgcgttgtactcggtgcgtgcacgatcagcgtcagactggaaaactttaaggaaaggttcgaccccgctgactgcggtttcaatttgcgattcatcggtgacggatttttccaaaatggaggctactccgtcgagagccttcgctccgaaccccaaattagaatacttggttttcagcgctacgagaattttctctttcatgttttttcgttctatatggtttcgaataaatcatcatattcgcacaaaaaaggtctgtcagccgacgccaacagacccactaacaattacatgaaggttatatcgttctgcaactggtgggctgcgacttcacagcctctgcgacaaaagtcagtatgttcggcacattatgcaaattattttaaggaaaaattcgttaaaaaaagaggagagcaattctcactgtcggaaaatagctttattgaaatgattcattccaaaaagtgcgaaaaatagtgcaagaaggagaggtatcccgcaatgggaaattagattgggtttgtgtctaaattgtgtgcccgactaaaaacaaaccagtcacctacagggctgtaagtgactggttttctgtgtggtgccaccgggaatcgaaccagggacacaaggattttcagtcctttgctctaccaactgagctatggcaccatcatcgactgaaactcgtgtgggtttcgaatcgtggtgcaaagatagatattatttcctgaaaaccaaaaaaacgaccgaatattttccatctcagactttcatttcaggaacggcaggccggaatatcggaaaattttttcggccaggataccggaaattcaggattttggttatttttgtaaaaactgtaaagattatgaaaacaagcagtttgatgatgtgtgcgctggttgcattgacagcctgcggtaccggagtgaagcagagtgtccgtacgcccgtcgaaatgggcgagcggatcgaattgaagacgccggatcccaagatgggactgactatcaacgaagcgcttgcggcgcgcagctcgtcgcgcgacttttctccggagatgctctctctggaggaactttcgggtgtactgtgggctgctgccggggtaaaccgggaggatgggcatcttaccgcgccttcggctatggcgctctatcccattcgggtctatgctttcctgcctgaaggtgtgtatcgttacgattcgaaagcgaatgtattgaatcgggtcatcgaaggagatcgtcgggagcttaccgcgatgcaggatttcgcttacactgcgccgctcaatttggtgtatgtggccgattacagcgtttatgcggaccggaatcagccggtggaccgcatccgtttctggtgcgcggccgatgcgggcggatatacggagaacgtgaacctttatgccgccggaaacggtctgaaggccattacacggggcagcttcaaggaagaggcgctgttggagttgctggggctcgatcccgcacaatacggtgtgattctcgcccagacggttggccggtagtattttcggaaagagtatcgacgaggagttcccggaaacgggtggctcctcgctgcgttttgtcaggagcgggcagactgcaggtccggtaccgggtggatttttcggacgaaccgtgctatcgtcgctttttcctgacaaatgaaaggggaatttcactatctttgacttcgttttggatactccgcctcggcaaaacgcaataaaaatttgcttttgcattcggcttattcgtaatctttgactttgtcttagatacttcgcctcggcaaaatgcaataaaaatttgcttttgcattcggcttattcgtaatctttgacttcgtcttagatacttcgcctcggcaaaatgcaaataaaatttgcttttgcactcggcttattcgtatctttgccgtggaaaattttcgtatgggcggccagctgttcggcgtagttcgaaaaattcggcattacgttcgatgtgcgctgtctttgtattgtaaataacgacgattttatgctttcaaaacccgaacgggagcagataattgctctgataaaacgagaggtcgttccggcgatcggctgcacggaacccattgccgttgcgttgtgcgtggccaaggcccgcgagatactggggacggaaccggaaaaggtttcggcccggttgagtgccaacatactgaaaaatgcgatgggagtgggaattcccggaacgggcatgatcggattgccgatcgcgatcgctttgggcgctttggtcggacggtcggagtatcagctcgaagtgctgaaggattcggatgcgaaggccgtcgaacggggtaagcgctttatcgagcaggggcggatcgacatctccctgaaagagggcattaccgagaaactctatatcgagatcgaagtttcgggcggcggacactccgctgtggcgatcatcgccggcgggcatacgaatttcgtcttcatttcacgggacggcgaaacgcttcaggagagtcgtcgtacctccggcagcgaacaggaggcgcagggcgtcgaactcaacctgcgcaaagtgtttgacttcgccatgaccacaccgctggatgaaatccgcttcattctggaagccaagcgattgaataaggctgcggcagaggattcgttcaagaacaactacgggcattgcgtgggaaatactttgcgccatgctcccgaattgcggattatcggggattgtgccctctcccgcattctctcctatacttgcgcggcctgcgacgcccgcatggcgggagccatggttccggtgatgagtaattcgggcagcggcaaccagggcatcgcgactacgttgcctgtggtcgtttatgccgaggagatcaaggcggacgaggaacatctggtgcgtgcgctcgttttgagccatctgaccgctatctatatcaagcagagcctgggacgtctttcggccttgtgcggttgtgtcgtggcggcgaccggttcgagttgcggcatcacctacctgatgggcggcgggtacgaggccgtttcctttgccgtgaagaatatgatcgccaacctgacgggtatgatgtgcgacggtgcgaagccgagctgttcgctcaagttgatgacgggagtttcgacggctgtgctttcggcgatgctggctatggagaaccattcggtttcgtcggtcgagggcattatcgacgacgatgtcgataagtcgatccgcaacctgacgctgatcggacgggacggcatgaacgaaacggatcatctgatcctgaagatcatgacttcgaaatagccccctcgaaaaataacaagcgtgcctgccttgcggccggtgcgctttttttgtacagaaagtaaagacggtgcggagcgtttatccgttcgatcggaatatgtgcggaacagggcgaatcccgaaaccggtattgtcgggaaaggggtgcggaacgaccggtctgaacgaagaacctattccggctttccgaaaacggtatgcaggacgatgttcgtcgccccttggtgggccgtcgtgtagtctttggcgatgcggctgcattgttgaagcagatgctcgtcgtcgcgcaagggggtgaaccaggttttcaattcttcgtatgagtggatgggcgttgccgctccgagcgttaccaggtcgcgggcttccttgaatttttcgtagttggggccgaaagcgatcggcagaccgaacgtggcggcttcgagcgtgttgtggatgcctacgccgaatccgccgccgatataaccccattcggcatagccgtaggccgaggagagaatacctaccgtatcgagaacgagcagttgtttgccatcgaacgatgtttcggcggtgcattgcgtatagcggacagctcctccgagggtttcagcgagcaggcggttgatgcggctttcgtccatttcgtgaggtgccacgatgaatttgaccgaggggttatcgtttatcaggcggatcagaagatcttcgtccggtccccaggtcgagccggcgatcaacagacgggtgccgcctttgaaccgttcgatgaggtcgatttttttcgccgcagccgcaatttcggcaacccggtcgaagcgggtgtcaccggcgactacgacgttgtcgaagcccagttctgccagtaattttttggagtcgttgttctgaacgaagatcgtgtcgaaactttcgagtgccatgcgccaatagcctccgtaggggcggaagaagatcgagttgcggcggaagatggccgatacgatgtagctgcggatcgagcggcggcgcagctcggtgagcaggttgatccagaattcgtatttgacgaagatgacgatttcggggtgggcgatgtccagaaaacggcgggctttgcccggcgtgtcgatcggcaggtagaagatgtagtcggcctgatcgtaatttttacggatttcgtagcccgaaggggagaaaaacgtgagcaggattttgtattcgggatgttccttgcggattttttcgatcaggggacggccctgttcgaattcgcccagggaggcggcatgtatccagataatgcgagccgaggggtcgatgctctctttcatgcggcggaagagtcctttccggccgtcgatccagagtttcgcctttcggtgccagggtgaggccaatgcaatggcccaaacgtagagtaccagccccaaattatagatccacatccgctttcgttttgtgcgtctttatatcgcggatgcaaagataagataaattgtcagaactgccaaattaccagtggagttcgatggcgtcttcgatatagcgcacctccggtgtgcctgcgggggcggtttcgactgcgatcaggtcgaattgcatctctccttcgaacggattttctgtcagataagcatttgcggcccggatgagtgcccggcacttgcggtaatcgagcgcctgttccggcggggtgaggccgtcccgccggcgcgtcttgacctcgatgaagtggagggtgccttttctggcagcgacgatgtccagctcgtaatgtccttgccgccagttgcggtggagcagggtgaatccgtggtcgagaagccaccgggcggcagcctcttcgccctgccgcccggtatgctgtgtcgtggtcatcggtttgtcggtggaagttgtcctgtcttttcgaaatattttttcatgaccagcagcgaaatgaaccgttcccgacgactgtcgtagaattgtcgtgcgaagtcgttcgcctgatcgatgatctgttgagcctgttcgggatgcgcgatgtagtaatcgatcttctcttccaggtcggagtagtcgtcccttacttcgatgtagtggtagccggggcgcaggcgtccttccatgaaccaggattcgttgcgcggccggggcatcacggcgatcgaattggtggacatgacccaccggatgttgctggcgatatcgttgccctcgaacgtcatgatgaatttcgagccgaggtgggcgtagagcgtgatttgttttgctgtacctgtttcctgggcgctgtgtccgctgcgggtatccgccgtgtcgatgcggggattgtcccggaatgtttcgatgaagcgccgacgctgctcgctactcttaaccgatccccggaaaatcacccggtcggctttctccgtaaacggaattttgtcgtgcagccggatatctaagcggcagcggtccaagttgagcaatacggagttatctcctttgccggaagcggcttctcccccccccggtcgatttttcgagccttgatgatcgtcggatgaagcaggtcgaaaactccgtcgccgaaataggtctgccaacgcagggaatcgtcgaaaaaacgggtggtttggtaggagtcgaaaatataggcgctgtgccggcccctgaacttgtgttctttcaggggtgtcgcttcggtcggagagaggcgctctgcgccggtcaaacggttgtagtaattgacgcggtcgagcacatagtccatgtcataacgtttctctccgtcgcgcagaatctcttccaaccggctgcgcaggagcaccttcggtacggcataacgggatagctgggcgatgaagtagggcagcttgatgttcttgccgccgtgcagtcggttgagagcggtcattaattccatacttacgaatacggtttgtcagggattgcggaaaatacggggcataccataattataataggaatgacaggtcgtccccggctttcacctcgtagggggcgatgcccttcttgaaaatacgcatcggacggctgccgatcagttccagttttccgttttcataatgaagcatgcagccttcgcgcaggccgacgacgtagcggcgcggattggccgtgatgtactccagaatacgctgctcgcgggtctctccggcgtgaccttcggggttggcgtccaggtagtgggggttgatctggaacttcacggccccgatagccttgaacgattccggttcgacgatgggcatgtcgttggtggtgcagatcgtcgggcagcagacgttgctgccggccgaccagccgatgtagggcgtgccggccttgatcttgccgaggatggctttcaacagcccctgctcttgcattttcttggtcagggcgaaggtgttgccgccgcctacgcagatggcctgcgcctcgcggatcatacgccggggatctttcgaacggtgtacggaacgtaccttgatgccgtattccgcaaaacgggcctgcactttcgcttcgtattcggcgtaggaaaaggtgatgcctgcataagggacgaaaaccacttcgcggacacttccgaggaactcgtcgatgcggggcatcgggtatttcagatagggttctccggcgttcgtggagttggaaattaacagtagtttcataaagtattgatttatattgtgttatattgaatacgcgaccgaagaacggcaatttctttggttgtaatgtcaaaagtaataaaaaaagtgttatttttgtgcgattgtttgatagaaagaatttcaatttttaataaatgattgtttaactaaaaaattaaaattatgtcagaagtacagtcaaaagttgtcgagatcatcgttgacaaattgggtgttaaagagtctgaggttactccggaagcgagcttcaccaaccacctgggagccgattcactcgacaccgttgagctgatcatggaatttgagaaggctttcgatatccagatccctgacgaggatgcagagaagatcgctaccgttggcgacgctatctcctatatcgaggcacacaagaaataatttacgatttttccaaccggcaaaccttaaagccttaaatttatgacagaaagacgagtagtcgtgacgggtatcggtaccatcaacccgctcggcaataatattgcagagtttttttccaatctcgaaaaaggagttagcggcgccgcgccgattactcattttgatgccgagaaatttaagacgaagttcgcttgtgaagtaaaaaattacgactggacgcagcatttcgaccgtaaggaggtgcgtaaatacgacctcttcactcagtatgccctcatcgcggccacgcaggctgtcgaggattcgggactcgatctcgagaaggaggacctggagcagatcggcgtgatctggagttccggtatcggaggacttaagacgttcttcgatgagtgtttgggctacgccgcaggagatggaactcctcggtttagcccattctttattccgcgcatgatcgccgacatcgcggcgggctacatctccatcaaatatggtttcatgggccccaactactgtacggtttcggcgtgcgcttcgtcgaatcacggtctgatcgattcgttcaacgccatccgtttcggtgtggccgacgtgatggtcgccggcggttcggaggctgccgtcaatgaacccagcgtgggcggtttcaactccatgcaggctctctcgacgcgcaacgacgatccggtgcacgcttcgcgtccgttcgataaggatcgtgacggtttcgtcatcggcgaaggcgccggtgcgctgattctcgaagagtacgagcacgccaaggcacgcggtgcgaagatttactgcgagatggtcggcggcggccgttctgcggacgcatatcattttaccgctccccatcccgaaggcaaaggcgccatgaaatccatgcgcgacgcgatcaaggatgcgggtatcaaacccgaagatatcgactatgtgaacgtacacggcacttcgacacctgcgggcgatctgcccgagctcaaagctctgcacggcgtgttgggcgatcacatctacgatgtcaatatttcatcgaccaaatccatgacggggcacctgttgggggctgccggtgctgtcgaggcgctggcctgcatctttgcgatcaacaacggtgtgattcccccgacgatcaacaacgaaaacctcgatcccgaaatcgacccccgactcaatctgacgctcaacaaggcgcagaagcgcgatgtgaagtgtgcgatgagcaatacgttcggtttcggcggtcataactcgacggttattttccgtaagatttaacacctcgtccgtgccgtgtggaatttcgtacgccgtgccgtaagaagaaattacgggcaggataaggagtattacagaattatcgatgagctgttcggattcgttccgcacaacatcgaactttacaagctggctttgattcacaagtcagcttctttagttttagccgacggacggcagatcaacaatgaacggctcgagtttttgggcgatgccgtgatcgaagccgtgacatcggactatctttatatcgaatttcccgaccggcaggagggatttcttacgcagttgcgctcgaagatcgtttcgcgccagtcgctcaatacgatcgcccggacgatcgggttggaccggtacgtgatcgccaacccgaccggaagcaccaaccagaaacatatctacggggatgctttcgaagcgatgatcggggcgatctacctcgatcaggggtatgagtttgccaatcgattgcttatcaacaatatatattaccgttatctgaatcttgacaacctgacggacgaggagacggatttcaaaagtcggttaatcgaatggtgtcagaagacgcatcatactattgctttcgaaacggtgcacggccggaattattcgtcgaatcatccgatattcgacgctacggtcgtgatcgacggtatccgtgtgggacatgggcagggcgagtcgaagaaggaggccgaacaatgtgcggcccactccgtgtcgtgtgccatgagcgacgaggcatgcggggatattttggataaaatcgaccggctctaccagccgaaaggaaccggggtgtcatgagtgaagcgtctgtaaaactactttcccggggcgttgaaacgctgaccgatcaggagttgttggaactgttgctggacgacggtgattcggagcggcttgccggggcgctgctgtccagtttcgaagggcgactcgccgcattgggatatgccgacatcgcgcggttgcgtatggctgccggaatcggcctcaaacgcgccgctcggattcaggcggctgtcgaattgggccgccgggtgcttgctgccagggagttgggacccgatccgatcggttcgagcaacgatgtggtccgaatattcagacccctgctgacggagatgaagcacgaggagtgctggtgcctgtacctcaatacgggcaaccggatcgtcgagcggcagcgggtaagccagggcggggtgcaggcgacggtggtggatcaccggttggtcatcaaacgggccctcgaactgctggccacgcagattatcctggttcacaaccatccttccggtgctgccttgcccagcgagcaggataagattctcacgaagaaaattgccgaggcggccgcgctgttcgatattcggctgctcgatcacctgattatcgcacggggcggtgagtacagtttccgacagaacgggttgctgcaatagtcctggctgtgacgaggctgtctgcccaatccccgaaattgaaagttgcccctgccggataaactccgacaggggcgaaaacattaaaatcggacgtgttagacagctttttgttctgccgctgcggtccatcgttgcgcaggttgtgggcaggaagagacgggaccatcgtaacggggcgtgcgactctttaatcgttgcgggaagagttggctgtggattatcgtcttccgggttcactttgttttgtcgtagaaaggtttttcttccgaagggagaacgtaagtttagactgccgggaaatttttgccgatctgtgccgtatttcttttttgaggaagagcataaggtgaatcttttttcgaatgatcggaaactctgaaataaggactgcaagtcgaacgaatggacgattatcccggagatgggagcgaaatgaccggaccgggcatcggtaacgaaaagcgaggaatggcaagaacctttcctcgcttttcgttgccgggtgcgcacaggctggccgcaaagtacgaatttctaattttggaggtcgaagcggcggaattgaatctcgaatcgacagacgctctcccgctcgtcgcttcgggtcgtgcgggtaatgatgagcggtgtcgcaatttcagcatcgtgtgcgactgtctgacgcgtgtattcgaaggtctgggtcgtaaccgcgtcgtcggaacgggtcgtgaccgttcggaaaagatcgttgttgagactgctgaagaaacccagtccgcgcaggatatccggttcggcaaccagcagcaggaccgggtcgctgttgaggaggggagtgccttccaattcgtagatgaaatcgctccaagccgtcgtttcatcgtagtcgtaaccgtactcttgccggaatgtttccgtatttggctcgttctcgagcgttcggatgacagcactgcaattatcccaagcctccagcggaccccagggatctttttcccattcgtatttttcgcagatgggttccaaagtcagggaattgtaacgcgatatggaggtgagtttgtcggagttgaaggtgccggtgccgtatgtgcaatcgaagccgtacgtttctatttcactgccggaaagtgtcgaggtgagttcgtatcctccgcttcgtacatcgcagaagtagccgtatagggttccgtctgcagtttgcgtataaggttgctcgccatcgatttcccgggtgaaggagaatcggatgcaatcgtctccctcgtaggtgaactgccatgtttcgacgggacggagcgtgccgttcttgtccgctgcggatattttgaaacccgtgatacggcactccttgctgaattccgccggaagttcataagtatattccatttcagcaatcagacttcccgaagcgtcgcgcccgacgatcttgtgcagttgccaataccgaacctgttctccgatgttgggttcgtccggttcattggtatcctctccatcggttcccggctgggtgatggtgatgagaatcgagttcgtgccgcaggtgatttcgataaaggccgtgcgggattcttcggcggtgttgggatccgtttcgacgcggatgtcgtaatcgcctgccgcatctccgtgatcgggatttatgcgtacccacgtcggggcttcggcgcgggattcgtccgtgatggcggaattccaggcatcgttcgtcgaaaagaaaatttccgaattccctgcggtttgtcctgcggggatcttctgggagagctgtcgtgtatcggggacctgaatggagccgaaatctccatgccattcatccgttgtgtcgtcgctgcaagccgtaatcgcgagggttgcaaacgtgagaagaagaagtttcaatcctttcatttgtgtattttttgatggttattcgttcgggtacgatgaatatgaaacagatgtatttgtcttccgctccggatatttccgaattttggcgtaaagatagaaaaaacggttcggagtaccttacattcccatttattttgtacttttgtttttcagaaaatagtaaatgcaaaatacgatgactcaggaagaacttttcaaaaaactggtagcccactgcaaggagtacggcttcatctttccttccagcgaaatatacgacggactgggtgccgtgtacgattacgggcagaacggcgtcgagctgaagaacaatatcaagcgttactggtgggattcgatggtgcgtcttcatgagaacatcgtcggcctcgattcggcgatcttcatgcatccccgcacgtgggaggcttcgggccatgtcggggcgttcaacgacccgttgatcgacaacaaggattcgaagaagcgttaccgcgccgacgtgttgatcgaagagtggctggccaagcaggacgacaagattcagaaagaggtcgataaggcgaagaagcgcttcaaggagaacttcaacgaggagcagtaccgctcgacttcgccccgtgtgctggagattgccgcagcgcgggactccgtgcacaagcgctttgccgacgcgttgaacgccaacgatctggaagagctgcggcggatcatcctcgactgcgagatcgtctgcccgatttcgggtacgcgcaactggaccgaggtgcggcagttcaacctgatgttctcgacccagatgggatcgacggccgaaggcgccaatacgatttacctgcggcccgaaacggcgcagggtatcttcgttaatttcctgaacgtgcagaagaccggccgcatgaagctgccgttcggcattgcccagatcggcaaggcgttccgcaacgagatcgtggcgcggcagttcatcttccgcatgcgtgagttcgaacagatggagatgcagttcttcgtccgcccgggcgaggagatgcggtggtgggccgaatggcgcgatacgcgtatgaaatggcatcgggcgctcggcttcggggcggataactaccgtttccacgaccacgacaagctggcccattacgccaatgccgcgaccgatatcgagtacaatttcccgttcgggttcaaggaggtggagggcatccactcccgtacggatttcgacctgtctaaccaccagaaattctcgggcaagaagatccagtatttcgactccgaaacaggcgaaagttatgtgccttacgtcgtggaaacctcgatcggcgtggatcgtatgttcctgcaggtgatgtcggcggcttataccgaggagaagctcgaaaacggcgaagagcgcgtcgtgctgcggattccggcggctcttgctccgacgaaggtggccgtgttgcctttggtgaagaaggacggcatgcccgaagtggcgcagcggatcgtcgatctgttgaagtatgatttcaacgtcgtgtatgacgagaaggattcggtgggcaagcgttaccgccggcaggatgcgatcggtacgccgctgtgcgtgaccgtcgatggccagaccctcgaggataataccgtgacggtgcgccaccgcgatacgatgcagcaggagcgcgtggcgatcgatgccctcttcggactggtcgatgcggagtgttcgctgcgcagcctcctcaagaaattgaatgtctgacagggctgtcgcgggtttcgcgccgggtgcgtcggacggcgagtacagtgtgtttcgtatcgggaatgttcgtgagggtgtgtgggccggtgttgttcgagctattggataaggtaagatcgtgggacgtattttggccatagattatggaacgaagcgcacgggaatcgccgtgagcgatcccttgcggatcattgccggagggctcgaaaccgtcgaaaccaaagggttggaacgctggttggcgcaatatttcgcggcgaatgacgtttcgaccatagtgatcggaaagccgatgcaaatgagtggcgctccgtccgaaacgtggcgttacgtggaaccgttggcggcccgcctgcgcagggcctatcccgacaaggaggtggtgttttacgacgagcgtttcacctcggtcatcgctcaccgcacgatgctcgagagcggtatgggcaagatggcccgccgggacaaggcgcttgtggacaagatatcggcgaccattatcctgcaaggatatatggagagccgaagttagttttccggctgcggccgggttaaaaatggaaaaagttatgatttatccgatagttgttttcggggcgccggtactgcgcgaaaaatgccgggagatcggacccgattatcccgaagttaaaaagttgatcgaggatatgttcctcacgctcgaggaggccgaaggcgtagggcttgcggctccccagatcggtaaaagcatccgcctgttcatcgtggactgcacgccttggggcgaagaccatcccgaactggccgattaccggcgtgcgttcattaatcccgaaatttacgaagtttccgaggagacgaaactctacgaagagggatgtctttcgctgccgggattgcacgagagcgtgcggcgttcgcttgcgatccggatgcgttatctggacgagaatttcgagccgcacgacgaagagttcaccgggctgccagcctgggtgatccagcacgaatatgaccatctggaaggagtcgtcttcacggatcgcttgtcgcctttgcgcagaaatctgattaagagtaagttgatgagcttgacgaagggtcgttacaaatgctcgtacaagactaaatagggggcgttccggtaaaagttacgggattgaccgaaaagagagcgacattggcctaaaagttgaaattttccggagaaaggggtaaactccggaaaatttttattacctttatatatctaaattaggaaagtatatttcaattattttaaattttcatacgatgaaaaaacttttacttacattggcaatgggcttgctcgcgtggtcggcatctgcccagaattggacggtcggtggtcgtatcggatccggtttccaggctgtcggacagtatgtattcagcaacgataattatgtggaagcccgtttcggtgcttattgggccaatgccggcggtacggtgacggccgatttctcggtgttgtataattggaatgtttgcaatatggattggactccgtcggcaggccgttggttcttcgatgccggtgcaggtatcaatgtgggcggcaaagggcattacgcttatgtaggcgtggccggctcggctaaactgggtattgccttcaagggggctccggtacgtctttcgttcgactggtcgccggctttcggtcccggaatcgcttattgggacgggggatcgcattccgagttcaacgaacgggcgttgtgcaacttcggtattacgtgcgtttattgcttctaaagagagaacccgaggaaataaaagaagcccggagcaatttgctccgggcttcttttatgctgtcggttcggtgctttttctgttcgatcatttccccccccc

SEQ ID NO: 10446 - DNA, 19948 bp, Unknown
  gut microbiota DNA sequence
ggctggactttcgggtattcaacgacgtgtgtagaattgtctttggaggttgtattcgtttatatcggatttgtttcgggcgacgaaactttattttgctttgggcggcgtttctcttggctgcggttgtaatcttcgctgcacctgtaggttcttttcgggagggagggtgcgtgtacactccgcgatcccgaagcatttgaatcgcaggtccgaatagcgataatcgccgtgtttttccgttagaatgtgaaagttccgcccagggagatcaggatcggattccgtgcgaacatggctgtctggaaacggtatttgagcatgagcgatgtactccagcggcggcttatccggtagtcgcagcctccgcccacatcgaagccgcaggaccatttgcccaagtcgttcacattgacgccgactgtggggaagaggctccattgttcggttatgtggaagagataatgagcgtcgcacccgatgtccaccgaacattccgatttgcagggaatgacgattcccgtttccagccgcagcgcatcggtcaggctgtatcggaaatagccgccgatgccgaagacggcgccccggccggtatgggtgtagagattgatcttcggacctatgccccaggaacctctgtcctgtgccgatgcgtagaaagcgctgaataagataagtattgccagcagtgtttttttcatagcttttgcagacttcgatacggcttttgccggaatgattccttgctgccgtcggataatttagattctctcgaaaacaaagatacgaacgaaccggccgtatgagcaaatttatatttgcactttgccgaggcggagtacctaagatgaagtcaaaggtacgaaaaatttccgtttcgccgaatcctggggagccgaatgaaaatggagatactctgagatcgaacagtatttgtcacaggatcgtgtgtggggtttatacgtgctgtattttgaaaattattttttatgattaaagaggcatgtggtggttggtttgataatggacggtgtcttgttcttttttgtaaataatttgtgtgtgtcgttataatgttgtaaattacatgggaataaatattttacaaacaatccctcctaatgtttcgattatgaaaagactattattcggtatattggcaacgttgccgctggcgtattgtatgacgggatgtagcaacgatacagactacggaggttttagttactttatctgggccaatgacagcgatcaccggattacgctctccgtggcacgcgagtacggtgagttggtaatcgaaaacgaaatcatagagccgggcgaaagttttgagagcgaaagggtggatggggcaatagcatactgtccacctccgtcgagctatatccggtatgtggaagttgtctttgaggatgggactaaagcgatttatatcaaggggtatcagccgccgcgcgattccgattattattcgaggcaggactctactatcgattggaattatgaggaggaggtaacggcatctcatgcggtcagaacccgttggacctatacttttaccaatgccgactacgatgcggcggtggcgcagcaattcgctgaataggagttgccggtcgtggttataaaaatcctcccgaaccgattggttcgggaggatttcgtcgcatgtatatcgttttatgcctctttgagagccgcatgcgctgccgccaggcgtgcgatgggcacgcggaacggagagcagctcacgtagttcagacctgcgaagtggcagaactccaccgacgaaggttcgccgccgtgttcgccgcagatgccgcatttgaggttttcgcgtgtgccgcggcctttgaataccgcctcgcggatcaactgtcccacgccgttgcggtcgaggatctggaacgggtcgttcttcagaatgcccttctcgaggtagatcggcaggaacttggcgatgtcgtcgcgcgagaagccgagcgtcatctgcgtcaggtcgttggtgccgaacgagaagaattcggcgacttcggcgatctggtgggcggtgactgccgcacgcggaacttcgatcatcgtgccgaccatgtattccaggcggtcgttgcgttcagcgaagaccttctcggccgtctggtcgatgatgttcttctggtaacgcagctccttgtggttgccaaccagcggcaccatgatctccacgtgtacgggaatccccgttttctttacgttcatagccgcctcgatgatggcccgggtctgcatctcggtaatttcgggataggtgttgcccagacggcaaccgcgatggcccagcatcggattgacttctgccagcaactccactttggccgcgattttttcgtagggaacgttcatgtccttggccagttcgcgctgttccttctcgaagtgggggacgaattcatgcaaggggggatcgagcaggcggaccgtcacgggatggccctgcatcgccttgaacagcccctcgaagtcgctgcgctgcatcggcagtaacttggcgagtgctacgcggcggccggcttcgtcgtcggcgagaatcatctcgcgtacggccttgatgcggtcgccttcgaagaacatgtgttccgtgcggcagagaccgataccttcggcgccgaacataaaggcctgcgccgcatctttcggcgtgtcggcgttggcgcgtactttcagcaccgagtacttgcgggccagctccatgagctgtccgaagtcgccgctcaaatcggcggcctgtgtcgctacctgccccaggtacacctcgcctgtcgaaccgttgagcgaaatccagtcgccctccttgatttcatatccgtttacgcggatcgtacgtgccttgtagtcgatctgcagctcgcctgcacccgatacgcaacacttgcccatgccgcgcgctacgaccgcggcgtgggaggtcatgccgccgcgtgcggtcaggatgccggcggcgtcgagcatgcccttcaggtcttcgggcgaagtttcgatgcggaccagaatcgcacgttggtttttctctttgagcattttttcggcatcttcggcgaagaacaccaccggaccggtcgctgcgcccggcgatgcgggcagtccctttacgatgactttggcgtttttcatcgccgtcttgtcgaaaacggggtggagcagctcgtcgagtttggccggctcgcagcgcagtacggcggtcttttcgtcgatcaggccttcgcgcagcatgtccatggcgatcttcaccatcgcggcgcccgtacgcttgccgttgcgacactggagcatccagagtttgccgtcctggatcgtgaattcgatgtcctgcatatccttgaaatactgctccaggtggtgctgtatctcgttgagttctttatatacggccggcatcacctcttcgagcgaggggtatttgctgcgacgctcggcttccgatacgttctgtgctttcgcccagcggcgcgaaccctcgatggtgatctgctggggagtgcggatgcccgctaccacgtcttcgccctgtgcgttgatcaggtattcgccgttgaagaggttttcacccgttgctgcgtcgcgcgagaaggctacgccggtcgccgagttgtcgcccatgttgccgaataccatcgcctgtaccgatacggccgtgccccattccgccggaatgttgttgagcttgcggtaaaggatggcacgctcgttcatccacgaaccgaatacggcacagatagcgccccagagctgatcccagggatttgccgggaaatcctcgccggtctgtttctttacggctgccttgaagttgtgcaccagctccttcaggtcgtcggtcgtcaggtcggtgtcgtttttcacgccgcgcttctctttctgcgcatcgatcaactcctcgaacggatcgtgctcctctttcgaagcgggcttcatgcccagcaccacgtcgccgtacatctgtacgaaacggcggtacgagtcccatgcgaaacggggattgcccgtgcgcttggctacggcttccacggcctggtcgttcatacccaggttgaggatggtgtccatcatgcccggcatcgaagcgcgtgcgcccgaacgaaccgataccagcagcggcatctctttgtcgccgaacttcatgccggtcagtttttcgatgttcttcatcgccttctccacttcggggcgaagcagccccacgactttctcgcgtccttgtgcgtagtattcgctgcatacttcggtggtgatggtgaatcccgggggaaccggaataccgatcaggttcatttcggccaggttcgcacccttaccgccgagcagttccctcattttgccgttaccttccgcttccttgttgccgaaggtatagactcgtttaacgtctgccataacttgtcgttgttgattataatagtgtttttcccaataaatgtgctgtttcagagttgtttccgccgggctgcgggcgaggccttccattgggaaggcaacggtgaaaaaaccgtcttttccggaggggcaaagatacgatgatttttcggataatcaaaaaacttatttaatatataaaaatattggaaaatatcggccgatgccacccgtatagcgttgtcgccgataggtcggcaggggcgttccgctgcggggatcgagcaggtcgcgccgggcgaaaacatcggcccggatgacggtcagcgtcgtgtctgtcaggattcggtcgtgcagccaccagccgccccgtgcgtaggcattgccccgccctcggcgctcggccggagccaatgcatccctgagcgagagtttttccgcagttccggacgggagcttgcctgcacagaggatccggatgccgggtgttcgttcgcgcagctcctccagcagttcggcagcataccggtcgccgcgtgtcagcaatacggctgtcggcttgccgtccagcataccctcgacgcagaggtagccataacctgtttcgatacgttccgtgaagaaccggtcggcatagtagagcaaggcgaaatccatcccgtccagcgtattgagggtgcggtgcacataactgtacggcaggtccgacgcccggaccaagtctttgacaacctcctcgttttcgactccatacactcctgcgagcggcatcgccatccggccgattacagcgcccgcccgttcgactttggcgcggtaacgctcgccgctccagcgcagccgtccttcgggtgtgtagtccgtgtcgtcgtagaagagcgacgggatcgtgtcgtagaggcggtcgaggtcgtaataggcgaaacccgtgcgttgttgggcgtggatggcaccgagagaagcgatgacgaagaatatcgccagaaaacttattcgtttcatattcgctgccgctgcggtttttcctgccggattttacgtaggaaactgaccgtgttataatttaatagggtaaatttcagttcttcgatattccggttgatttgtttgaatccgtgatttttgaaaattcgtacagtcgcttttgccatcaaagagtatcgaattgcaacccaaattacgcaatatttccgataatgccaaatccgatgccgtaaaatgtcggaattattttgagctgctgagaaattttgagctttgcccgaacaatctttaactaagttttacctgtaaatcgctgtcaagtcgccgatatggtagctttttttcatcgtatccgctgttgcaggtttcgtatcgtctataaaatcgtcgccggtcaaaaatgcttccgtagtaaccgtgtaaacatacaggctgtctttagtcagcacgctatatatttttttggagcgggggccatctccatattccgccgcaacttcgatatagcgaacaattttaccgtgttcgtcgtgcaatattaaatattctcgcggccccgggtcgtcgcctccgtcgaggaccaatctcatggtacgattcccgtcgaaaggaattcgataatattgtttccaatttccgtatcccgtcgtatcgttacctaaaagcagcgctaaccgatagaccgtatcccgatccgtaatcatggaattgcctgctcggtccagggtgtagtccgataattttaaccgattgttgagattgtccgattgccgatcgatgcaaaataccgtgccctgcaagctacgacaactcgaacaaatgaataatgtcataaatattatcgtgtgtttcgtcatggaaggtagcctttgtccgagaggatcaatatcaccaaattaagcaaaatccggcaaaaatccaaattcggaggtagaaaaccgctgtggggatcattcggtgcgaacgaatatgataattccatctattttccgggctttgcggccggtccggactgtttatgccggaaggttttgtattccggtgctcccgaagcatacgcttacctttaccgaccgaggcgacgttgcctcggttaaaatcatttgtattatgataataggttatttacgtgtcagcatgggaaaacagcatcttgccaaccagcaggatgagatccggcgtttcgccgaaagcaggaatctcgtcgtggatcatttattgcggaaatagatagctggtgaaattttctgtttttgtttttttataaaataatttttatatttacacccgtattttgcgaaaaggccatgcagatggtttgctttaaccgcagacgaatggtgatatgataatattgtaaacgaagaaacccttaattgccttattaaaaatttttttatgaaacatttatttgttaatttattttctcttgtatgcatgctgcttgcaggagtaggattgacggggtgtaccgacgacaagacagaaccagaccccggtacttggccttcattggaagtgaagttccttgaagcacagtattcgacagtcaaattggaggtgactgccgctaatttgacagaaattgcttacctggcgacgcccaaggccgatgccaaggaaacaccgacggcaacgatcgtctttgcgaccggcgtcaaatctgcgattgcggacggcgtttcttcgctgaccgtaagtaaactggaccccgatacggagtatgtgatctatgtggctgccaccactgcgaacgaagagttctttgagaaggttctcgaggttgaggccaagaccgcttcgttcggcgataacgcgtacgacgtgtttgacgtggactacatgagttttagcatgaacgtgaaattccagccgaccgatcccgagaatgtgatcaaatatctgctgatagacatgttgacgcatagttatcagagtatgatgaactataccgacgccgacatgatgaatctcttcgacgatatatatcacaactatatcactgagaacaccgttttcgtattcaacgaggagaattcgattttacgcgacgagaacggcgagcctgtgaccgatgaggaaggctcgatgataacgctctggaacccgatggtgcctggacagctcaattatgtgctgctcggcgagttcgcatccggcgagcacccttggggcttcggtcagggatactatttgcccctttgggatcaggacgcatactacgaagctgtcaacggtggcggtggtatcttgggagaagccggttcccgtgccgacgatgtagagcagggcgatttctggaccggctactaccagaagatagaggttaccaacaagaagcccgaaaaactcggtgagatcaagatcaataccgataaattgagacccaacggcggtctgctcactttcgagttgtgcgagggggtatcctacctgtgtcttggtattttcgaggagtatgatatggaggtgattaagacgtcaatgctgaaaggcgacctgtcgaatatgcagtgggcgctgacctcttacaacgcaccttacatcctcaatgcccagacttatgagatagccaaagggcagaccgacctctctttcaacctgacggagtatttcgttaagttcacgccgggtacgaagtattacgtctatgcggtgggtatcaacgataataccggttcgaagcaggctttcgccaaactcgaaggctttatgctgcccgaacctacgaaaccggctcccgaggtaaccgttaccggtatcgatgctccggaaggtcatgaggagtcgccctacgaagtttggttcaatatcaaatgtactacgggtgacgcggtgactgccaagtacgctgccaactacgagcgtgagtgggaggtcgaactcaacgccggcaggactaacaccgacctgatcgaaaacggtaacgcgtttactccggatgagatcgagaagatcaactcggccgagggttacaacgtaatgttctcgacccgtcccgacgccaacacctacctgggtgtaatcgcttacaatgacgagggtaccggcaacgatcccgacgaagatggttctgccatcggcaagaagcgttctatgcctgtacctgataaagagccggtagattcgaagtatttcgaaagtctgctgggtgagtggacgctgtcggctgaatacgagggcggcgaggcgccgatgacctgcaaggtggagatcgtttctggactgacgtgtccggagagtctgtcccaggaggtcattgactactatctgaataacacaaactactcgaaagagcaggtagagaagttgtacgagggcttcaagaagcagcttaagctctacaatgagcgtctgcgcggccagaaccgcctgctttgcctgggactcgatatcgaccgtccgaagtacgagtacagtaccaactacctggccggctggaagacgccatacgaccttttcatcgcaactacggaagagtacaacggctacgatacggagtctatgttcttcgatttcggtccgaagtggtatctcgagatgaaatccgacggttccgtagtcgctccgttcgacgtaaccaacctgccgccgcttacgttatggaacaagggggccgagtactatttcattggtgtcagcaaaatggcgattacgcagggtgagttccccgtaacgattagcagcgataactctacgatcactgtagggggatatgagtaccaaggtgatacttactacccgaatgcagcgaagataatgtacggaggacagtattcgaccgacacccgggtatgcggcgcactgacgctgaccaagggttggaatggtgagtccgtgaagtcggttgtcaagggcggcaagtccgtgacgacgaacgatgtgctgggtgccgagcgtgctgtccgcccgttgagccgcacgagcgtatctgatgcgaagagctacgagccgcttaaggttactcctcttgccgagaagtcgctccgcgagcgttggaagcagcgggcggcaggtaaatatatccgtcgctaacagactcttttgaaataaggcagggggaggtacccggaatgggaattttccccctgctttatgcttttataaaataaccggatgcgcaaatccgctggaggtgcggaggcgtattttatggaagcagaagagagttactctttaaatcgaaaaaagattccgatatgttgaaaaaactgtttggcttggcgcttgcactcttggcgacgcttgccgtttcggcgcaggttcgcgtgggggagggccagctctccggtagtttcgagagcaactcgatctactaccaggacgactcgggattgggtgcagcaggcactgctcccgacgatcgtttcggttcgaacaactacatgaaactcgactacatgaacggtcgtttttctgcgggactccagattgacgcttatctccctgcattgcagggatatgagatcggccagcagcccggagcctatcacttctatctctcctcgaagtatatccagtggcaggatcacaactattccgtgcgggtgggtgatattttcgaccagttcggcagcggacttatttttcgttcgttcgaagaccgtcagctgggattcaacaattcgatcgagggtgtgcagggtatctaccgcttcggcgactacgtcgaggtgaaaggtatgtacggtcgtccccggctctacaccgactatgcggattcgtgggtgcgcggtgccgatctgcacatttcattgaatgatattttcggttggaacgctgcgcagttctcggctgagggcagctacgtcaaccgctacgagtcgctcgacaaggatcagacgatcgacttcgcctctcgcggacttacctcgcccaacctgaacatgtattcgggccgcctgaatttcgactggaaggggctttcgctcaaaggcgaatacgtatataaggggaaggacatctactcgactgttgcggacgtagccgcagccggcaacgccatcttggtcgaggccggttataactacggacctttcagcatctcgggtagtttccgccggttagaccgtatggggacgatgctttcgctttacggctctggtacgggcaatgtactcaactacctgccctctctgacgcgccagtacacttacctgttggccaatttggaaccgtatatcgttaataccgacggcgaaataggcggtcaggtggatctctactatacgtatcgcagcaagtcgaaccgtcatcgctactggaatttccacgccaacttatccactttctatacgctgcgttcggagcagagcgaatcgggcgagcgggagttgatgtggcgtgatattaacatcgatgtagagcgccagtggaacaagaaactcaaaacctcgctgcttgtttcgatccagaagcgcaacccgagtcatggtttccagcgtcagacctacgtatccaacattttcataggcgatgtcacctacaaattcgactcgaaaaagtcgttgcgcgtcgaggcgcaatacctttattcgaccgactacgagggtgactgggtcgcggctttggtggagttcaacatggtgccgcattggagtttctttgtgagcgatatgtataacctcgacgagaccgaggctaactcctttactaaaacgaattattacagtgcaggattcagttacctgaaaaatcgtacgcgtattcaactcagctacggccgcaatcgtgcaggctatgtttgttcgggaggggcgtgtcgttatatgccggcttacacgggtctgaaccttgtgatcacttcatccttttaattaaaaaacagattatgaaattcaagaaattcattatccctgcgctttgtatggctatgttgagcgcgggatgttcggggcaggatccggtgacccccggtaacggtcaaaacggcaatgggggtacgaatgaaaacatcgaaaacggtctgcaggtgacggcatcgacgacggtaatcaatgccgacgggcaggatgccgcccgcattaatgtctattatgacaaagtgaaattgtcgctcgacgcagtcgctttctacgatgccaagagcaacgacgtgctcgacctttcgaaattcaccatcgaggacaacacgcttgtgtacactgttaccgagccgggtgaattttcgttctgggttgcttataagacccacaataccaaagatcgtccgacaaccatttctgctgtagagttctcggtgcctgacgctccggaagatccccagccggacaacacctcgttcgtccgccggacgctcatcacgcagttcacgggcttgggttgcggctactgtccttttatgatcgctgcgatggaagatgtacgcaagtcggccgaatatgcggacaagtccgtattggcagcctgtcacacctatgggggtgatccttatcagcccgatgtgcctttggattacgctatgggtgtcagcacgtatccttatgtaaatttcgatttccagacagggttgggtaattttggttacaacagcaacgtatctaacatcaagaaaaatatcgacaaatcgctctctgtggatgccggtgccggtatttcggtcggtatggaagttgctggaaacaaactggtcgctcgtgttacggtgaaggctgctcgctccggttcgttccgcgtaggcgcttgggtgctggaagatggtctgacaggtactcaactgaacaatggtatgaagggggattacgatttcaacacgcataataatgttatccgccacgtgaatagtcgttactctggttcggattattccggccatgaggtcggtgcgttggctgccggcggtaccggtgagcatctctttacgatgaccttggatgaaagttgggtcgtgaagaattgtcatgtgatattcttcgtaacggagcttgtcgataagggttacgccgtaaccaatgctatcgacgttcccgttaagtcgtctactataccgttcgagtacagatagtgtattcgaacgtagcagcatactgctgtaaaatttgcggggcgcctccatcggagtcgtcccgtctttttgacgcacggccgatccgtgatgccggccgcaacgcagtggaggtgcggtatgacgcggctgaagaactccggagggaagacaacacagcacaacggcccgtattcctttttggctgaggcagattgtcgatgcctccggggacgcaccgtgatcgaggatgtgggcagccccttgggagcgagaacggttccatgaaaaaagggatcaagatgtaaatgaaaagtcggtggaagtctgtatttccgcagacttttttcatatgcccgtgaccagtatcatctttccggtaagagtgttttcagctcatcctgcgtggaaaggtaggtcatgtattggatggtgaagacctgtttgtcatcttccgtgcgctcgatctctcggatgtgtagcaggtcatatatgtgtaaatcaatgagttgccttgcgtgtcgacagattcggttataaggtcgaaatcaccgacgaggcgaagcggacgctgacagtcatcggctaccagcgcaaatacggcgtccgcaccctgctcgaatgcatcgaggaatttctctcgggactgattgtcgacggcaaactgtacagcggggagcgggtgatcgtggagcccgacggcgaaaaggaggtgattctccggggcgcctaacataaattcgtaccagtgtcggacggttttcgaattccggccgaagcaattatcggtaagaataacacactcttcgcattgggtgacagcacggttcctttctgcaaaaaacgcgaaagcaaatcgtatgtaagcgttactccgctgagcgtgtaaaagaatcgctatacggataaaaaatgctgtaaatttcgcagcattttttcaataaacttcgattacaatcacgtcgctttggtagcgtgcaaactggtttgctttctgcgctcggtttaaacgtttattttaaaggaaacccgaagtcgagaacaaaaacggtctctgttattctcgaggtgtcttaaatataaataaaaggagttgctccgcaagccaacccatcctatgatggaaatgttgttaaatttaatattcttcagttttaaacggctcgctgaaagcaaccactgagttgtattctcctgtttttgcgtcaacacctacaaccacgactttatatattcccggctcgagtttctcgaagcgtcccatataactgccccaatactctccttcgaaaccataggttttaaagaaatgagcacggtctctgcaccatcctgacgatattttttgttttgcaatctcgtcaatgatttgcagagattcctttactgtggtctcctctgtaactatctcataatagtacaatgcagttatcggattaggtataatatgaatgttatggaaaccccaagacatatcgacattaatactgaaggtaattttggctatatctgtctcagtagtgaaatcttttctgaaaagccctgttgttacagactgtcctttatatccaaatgcaaaaatagaatattcagtactactatccagttgtgtatatgaaccttgggtttcgccgcgctccaatctgcttctcgcaatctgatccttgaaataggctataatttcctcatctctcttccctttaaaattagaagaaggtttcataaataccgcataaggatcggaatttgttgtggtaatgttgaaagatacagcatcagaagtaactgttcccagcacaatctcgatctgattgtccgaaggagaaaccttccctgtagcaaactcgacagatgccacttccgaattcactgttccatatggtgtcaacgaacaagcaaggcaaagatagtctgaagactcatactccaacttgctttccttttcactcgggccgtataacgctatttcagaaataacctgatgtgcagttttattcaagatttgacaagtacaatatactgatccactgaagcctgcatatattctgcatttgacatgcctgttcctgcaagttccgacttggaaactatcttggaaaaataacgggactctgtatcgtcaggagtaattgttatggaaaggtcgactccgtctttgacattattaagaaaaatcaaacttgacatcattaggtccctcatatccttctgcaaaacactccttaaagacttttgttgtcatttgtttatcttcactcacaccgaagatagtaatatatctaagagattttccaactccaataaagttaaaatcagcatagactaaaacaactacatatcaacaagttaattgattcttcgggtgacggattgcctccgtttccacccgaatacggtggatagttctattcttatgtaggcacccatgtagggaaccggcaggaatacatgaaccactaaaaaattaacgatatgtattgttcgatcacattcaaaggtcgcaaagacccccaggaccccaagatggtcaaactggaaatgattttctacaagaccggttacacccgcattccccgggtcgtcagtatcaccggagcttacaaatgctggaacaatgaaaccctgagttttgaatccgcttccagcgaatacctcaagaaaaaccaactgctgcttgaactcaaagagaagtacatgtccgttgccgaacggtgggaaaaggaatggcgtaacttctccgtactgcaatgggccgattgcttcaaacccaaagaagaggaaaaggcaaagcaggaattgaaagtgctgacggttctcaagctcatcaacgtccgaatcgaatacttcgagaaccacgaaaaattcaagaacggcaaactcgttaagagtgtcggcaccgccagtatgtacaagcagttccgcacttcgctttcggccttcacccagaggcagtacaacaaagacctgtctcgcttttacttcaccgacattacccagaaatttcttctggaatacatcgtctatctggagcggcgcggcatcgaaaacggtaatcgtgccggcttgcgccagctccttcgcatcttccgtgcattggtaaactacgccaaggacgaactccacatgtacggagccaaccccgcaatcttcgaggcagctacggaaaagatggcgtggggacagttcgagtccaaagccgtcaatccgaacatcatccgccggatagagttcatggaccgcagcctcttctccgagcaggagtagctttgtctcgaccttttcctcttcagcttttacagcggcggtatggccaacgttgatgttgttaacctgacatgggacatgattaacgaaaaggaaggcatgattgtctatgagcgtaccaaattccccaagctggccaagccactgcttatcgaccgtctcatcgtaattctggaaaaatacagaggcaaggggatcggcaactacgtcttccctgtctatactgagaaacacgtgaccgacaaacagaagatgggacgccgtaacagcttctcaaccctcgtaagtgaaacattggacaaggtttgcgagattctgggaatcgacgagaaaatgacgtggtacacggcacgagacacatttatttccagcgaactcgatgcgggcactccgattacccatgttgcagaaatggcgggcaacagcgcccgaaccatcgagaagcactactacaagaataccaagcagaaagaactgcgccagcgcatgaacgcccgttacggtagttaaagttatttattggttggggctgcataaaattataaacaactcgctattttttcgcttaattctgcaataaagaacttaaattcttttttatgtttttttataagagattgaggagctatcgctttgtaatcacctccgatatgaacttcatcatctggattttcaactattcttttcaaatgttgagttagatgtcctatattggatatcacgtttatccgctctaaactttctttcatggcaggatattcttgttagttcgtcaggaaggcaatcgtcaggtgagacgtaacattgaccattacaatcttgacatggttatcgccttgggctatcgtgtgcaatctcaggttgcaacccgttttcgccgttgggcgactcaacggcttcatgaatatatccaaaagagatttgctatggatgatgagcggttgaagaagggggtaatcgttacttccgtgagttgctgcaacgtatcagggatattcgtagtagtgaacgtaacttctgtcaacaagttgcggacatatatgctttttcaacccgcaatcccgagcgatacgttgcagcgtgcggttcatgttgtcgcagaccgatggcacgggaaagacgaggttgtttttcgatgtgggacggtagttttcgatcagttgttgggcgatgggcagcagtttgatatggaacggcgttccggttttctgacggtgcgcgatgattcagctgtccccgtcgaacgaggttttaatatgatcgaaggtcagtttcttcatatctgaataagacaaaccggtgaaacaacagaatacgaaaatatctcgcacgtttcccaaccgcagattcggcatcggcttggcgatcagcatctcgatctcttttttcgttagatgttctttcggcggtggcgcaacttctttcagtttatagttcttaaagggattcttctcgatccattcgttacgcaggcaatagagtatgaaatttcgcaggcaatccagaatgttgatggcaccgttgtggtggcaacggtgggcggtctgcaaaaaggtattgaatccgtcgagatagccataggtcacctctgtcaaccgaatatcttctttcttgtactccaaacgtgtatattcatggaggtagcggcaaagacgataatacttgttggaggtcaactgcgtgattcgtacgccgacctctttttgtcgcttctcgcaataaagcatcagctcggccagcaacatacgaacctgcttgccgggacttttcagccgctctttgatttcgatggcattaccctcgaacccttcggcttgcaaggtacggtagatctcgatgactttcgctcggaaatcgtcgatgtaggcatttacttcataggagagtctgtctcgccctgtcgctcgtcctttggcgggatcccacttatcgaccgccgtacgacattgggtataaatctctttggcgatcccattgaccgagattctcgccatgatcggcgccgtcccgttcttcatcacacgatcgcgacgcaggaagaacgaaacgaagaaagtttttctgttcagcattttcaatctgttttttgtgaatcaaatacgattgaaaagctcggaaagttttgtgcaaataagcgttattcagcgtattacgctcattcaaatctaccgataaacattcaaatctgccatgtacacactttggtagatggagagcgtgcctttttcggaactaccctgcttcggtaaagattgcgatctcttaatataaggtgttgataaacaggttaaaatactcttgtttgcggcgaacagtccaaaaaaagtcctctttcgaggactgaaaagtgcggataaaggtgcttccgtacgaatgtaagcccgatgtatatcaacgaattgcgacggtttttcggcttccgtccccgcatcgcctactgtcattttgcacggtcttgcgcccgcctgcccgttcgcctgcgcggccgccgtatctccttgcatgacagtacaaagatagcgatttcgggcgagaaatccaaatgccggaaaattttgagatgcaggcggatttttctatatttgttcgtatggacagaggggagatcatcatttaccggacggccgacggcgagacccgtctggaagtccgcatggagagcgacagcgtatggttgacgcaggcgcagattgcgcgattgttcggagtcgacagaacggttattgtcagacatgtcaacaacatttataagtcgtgcgaattggagcgggaagcaacatgtgcaaaaattgcacatgttcagcatgaggggctacggcaagtgcggcgtatgattccatattataacctcgatatgattttgtcgataggttatcgtgtcaactccaaaaacgccacgcagttccgcatctgggcgaacaaggtgctgaaagagtaccttataaaggggtatgccgtcaataaccaagcgaaagccgagcagttggaggagttgaaaaagaccgtccgcctgctctcccatgtcttggctgcgaaggaggttacgaaatccgaggcggtcgggctgctgcgcgtgattacggactacacctacggcctcgatacgctcgaccgctacgattatcagcagttggaggtatcggccactacgtctgaggagccgttccgcgcgacctatgagaatgcgatggcggcgttgcaggtgttgcgcgacaagttcggcggcagcgccctgttcgcccgcgagaaggacgagtcgttcaagagcacgatgggcgcgatttaccagaccttcggcggccgcgacctctacccgagcgtcgaggagaaagcggccaacctgctctacctgacggtcaagaaccactcgttcagcgacggcaacaaacgcatcgcggcgttcctgttcctctggttcttggagaacaaccgcatcctctaccgtcccgacggctcgcgtctcttggataacaacacgttggtggccctgacgctgatgatcgcagagagccgcaccgaggagaaggacgtgatgacgaaggtggtggtgaatctgatcaataagaataattagaaggattttgtatctttacataaaattattgcataatggcaaccatgaacacggccgatatcggctttgagagggaaatatggaaggccgcggacaagatgcgcggcaatatcgacgcatcggagtacaagtccgttgtgttggggcttattttcctgaaatatatttccgataagttcgaaacgaaataccggcagcttgtcgccgagggcgaaggattcgaggaggacaaggacgaatatacggccgaaaatatcttctatgtcccgaccgaagcccgctgggagcggattgcggccgaggcgcacacgcccgaaataggccaggtgatagacaatgcgatgcgggcgatcgagaaggagaataagcgattgaaagatattctcccgaagaatttcgctcgtcccgaactcgacaagcgccggttgggcgatgtggttgatctgttcacgaatatccggatgcacgaacatggcgactcgaaagatattctgggacgcgcctatgagtattgtctttcgaaatttgccgaggcggaagggaaactcgccggcgaattctatacgcccgcctgtattgtcaaaacgctccttatgcttctaccataaaagtcttaataaatcgagcgagcgtatttctatccactttacaaattttagcgattttgcgttgtgaaacttcagctttcaatagttcttgtatgagaatcctcttatcgtggagtttgtacttctctggagcactttttt

SEQ ID NO: 10447 - DNA, 3817 bp, Unknown
  gut microbiota DNA sequence
ctgacagtccaaaagcaaaagccaacactttactttgaatgtcctctcctaacttatagttgtctttgatagtccaaaccctacattccttgctcatgcaaatattcagaatttccattatcataaagagattacgacccaatctggacaattcagcgcagataatcaaatcatctttctgtaccttattgagcaattttccgagttcacgtttgttataggcttttgttccactaatggtttcctctatccaaccatcaatttttatgttttgattgtcgcagaaattcttgatttcaaaacgttggttttctactgtctgcttatcactgcttactctaatgtatccgtatatcatatgtctaattataaatgtttatagatatataatatggatagtttttctatagaaacctaagagagcgttgattttacatttaattctttgccatttcgtttttaatgaactttcaatttccattagtcgtaaagaccgtgaaaaatgtttagcccccacactcttacatcagaaaccggatagttcaatgggcttttgagcccccgcattcgtaatgatggctcacgatgtagtgatgttgtttaattaaagtttcagactatgacctacgttggaatcgatgtcagcaaggcgacctttgttgtcgcttattcgtccgccaagaccggcaggacaaaaacattcaagaaccacggttaagggtgtccatgagttcatccaaaccatttcagtagcagagcaccattgagtattagaagccacaggcaattacagtgcgttgctcgtctatctgctttccgaagcagggataaccgtcagccttgagaatccgctgaagataaagaacttcgcccgtgccatgctctccgtcaccaagacggacgagatagatgcccgtctgatagccctgtacggggagaggatgcagccggatccttataagctccgcagtgactcaatcctcgtactgaagcagaaacgaacggtactacgccagctaaagaagcaacttgtggcaacacgcaaccttaaaggctcgatggagttctttcttcttttgaccctgaatgcaagaaaaccatcgaaaagacgattgctttcctcgagaagcaaatcaaggcaatggaagagaatatcacttccttggcgtaaggcgagtacaggaaacagatggacttgctcacctccatcaaaggcatcggtgttacactggcagccgcgcttatcgtggccacaggcgggttcacctattttgataatgccaagcaactgacccgttatctgggcctgtcacctatttaccaacagttcggtacgtcagtcaatgtcaaaggtcacatcaaccagaacggggattcaaacctcagaagccagctctatgtggcggctttctcgtcactcaggtgtaatgccgagtgcaaggcttgtttcgaccgtttgcggtctaacggcaagccaggcaaggtggcggtcgttgctgtcgccaacaaacttataaggcaagccttcgctgtggtcacgcaaggaaaaccgtatgtcgatgggttcaagtccgagaaaccgtaaatactcatctgcggagggaacgccatgcggcaaccttagatttgcagcatcaaaatatttatctttgaattgatattgaaaggaaagcaaaaggaaaaccatcagcggcaatagaagtcaagtctaagtccctattcggtccttttgctccttccttgaactcaaacccatataagaatttcagtaaacctgtttaagattattaggtcaagttcaggtcctttcttttttgtttaatgttcaaaaacaaaagtatgaaagttttttatttaggagttgatgtgagtaagaaaaaattggatttatgtttaaggagtaacggtaaggacatcctttatgatgttattcctaatgatctatcctctattaaatcttggttaacaagaacgtttgagaaatttttcctctctgaggacagtttggttgtctgtgcggaacatacagggcaatatacctatcctttggtctgtgcaacaaaaagtataggagtctacttatgtttggaagatgcagctaaaataaaatattgtcatggaatacctcgtggcaaaaatgataaaatagatgcctgccgaatagcaatgtatgcagaaagatataatgattgcctacaaccgtataccgcatcagagcttataatacaaaaactcaaaaacttatcaacagaacgcagtatgcttgttgcagatagggctaaatatcaatcccagctaaaagatcaggtagactatatggaacactcaatatatattgctaaatgcaatagagttgaagggattatcaatacatttacggattacatagcacaaatagaccttgaaataaaagaacttataaatcaagcacctgtcattgctcatcaaatggatttactcatgtctgtggatggagttggggaacgtgttgcactgaagatgatcatggaaacagatgctttcacttcttttactgatcccaggaagttttgctgtcatgcaggagttgttccgttcgtctatgtgtcaggaagtagccaacgttctaaaaatagagtatctaatagggctgacaaaagcatcaagcatttgctacatatggcggcactatctgtttcacaagtgaaaaatagtccattgaagaaatattatgacagaaaggtcgaagagggaaaaaataagatgtcggttctgaatgcagttagagcgaaattagttacgattatgttcgctgtaattagggcggatgcttttttttcgagaaattatcaaaattcgcttgcgtaatccataagaataggggctgagcagtcagccccgacgagctttccatgcacgacaactgcataaatatactaattatcgttaaccatattcagttttcttattatagtccatttttctttccattttaaatagcttcctgtcagaaactcaaattattgaaatacagttcaaaatactttccaaaggcacttccggctgggtgtcgtggtttccgactccccctccggagctgtttgaagaaggagttcaatatattttttaccgtttctccgttatcgcctttttactttccgaccggtgatgaaaagtccttgtgggcgccacctctttccggtccccggaaatgcggttcaaatatgaacctttagcagcaacgtatatccggcatcttcttcccgtcgatatgatacggatttgggggttcctttcaatgctgtccataaccataacttctgatttatacattaattccatgtgataaccgggtgtttggtcaggcggacgttcccggtggcggattgtcgtcctacgccgcaaagaaaaaaagagtaaatgtatgagggaataccttgtcagttatagtcatatatagacataaatagtcaatgccggcaaaagatatgacaaatggcagtccggcgagagcccgggattcttcccgatattgccgggattgtgtgtaaaagtacgacaatccgttgatagcagtatgaaaagagaaaaaaatgattgaggaaggaggtcgtgaaaccagcctccggaaaacaggatacggcggagatcagataccgtgaaaaaagaaaaaaatccccaccggagatgaatgaaccggcagggaacgtaacaataaaggaacgggcctctcaacccttgatgtaaccgtactttttcaggtcgtccatgaaatgctccggcgtgtcggtcctcaccgtcaccccgtgcagttccctgtaccgcccggagaaattca

SEQ ID NO: 10448 - DNA, 53201 bp, Unknown
  gut microbiota DNA sequence
acgaatttacaaaattccgctttctgacgcaactgacgaccgcagaaaaaagaaaagggactacccgattaaatcggataatcccttaaaaggtagtgacaaactcggttgcgggggctataagatagaccttttttcaaaccttgtcacctcctcacaataaattctgcatggccgcatctatctgcgagttctcgaacgaatcgaggtagatttgcgtaatcttttccgaactgtgccccagcgattcgctgatgatggatgtcgaaactcccgaccttttgagcacggtggcgaacgagtgccgcgcaacgtatgtcgtgagcgtgataggcaggtgtagatgctcgccgattagtttcagatagcgatttatccgcttgttcgtccgttgcacccgtccgtactgctgttgtgccgtaacgtgaacagaacgccttaaaacagggaaaatgtaatcctgcggatgtgcgttcggttgacggtacttgtcgagaatgtcgagggcggcgggttggagttggaacgacaggagtttacccgttttctgacggttgaaaaccagcctcccgtccacgatgtcggtataacggatgtgcagaatgtctgtcagattgatgccgcacgacagatagctgaacaggaacaagtcctttgccagttgcaggaacggtttggggtacttggtcagcgtccgcacctcgcaatccataatccgccttatgtcctcttttgtcagcgaccgtttggccgtggcttccttgaatcggctcactttgaacgtgtcgaaagggtagtccgttttcttgattagcccgtcggtgattgcgctgttgtagagcacccgcaacgaacggaaacggatgccgatggagttgtcggaataatgccgttccacccgcagccattgttcgtatcgtttcagccactcggcgtcgatgtctataaaataaaagtccagcgaacggcagaatttcgtcagcgaggtgcggagttcctgaaaggttttggcgttgcctacacgtttctcggccagcaggcggtcgatgtagtcgttcagatagtcgccgacggttcggcgcacgaccttgcgggatgccttttcaacgagtgtgttcagcgtgtattccttatcgctggtcttgaaatccatgacctgactttggagttcctgcgttttctgttggataagggcttcgatgcgttctttgtcgggacagttacggcgcggtttacacttttctgcatcccagtattgcggagcgagggaaatgtgcagactgatgtactttcgttttcggtttttcgtcagccgtaacataatgggatgctgaccgttggataatgttttggatgtgtagagtaccgcctcgattgtcgtgttcatcgggaaaattcggtttacacattggtttacacaaactgcgtaaaccgacggaaaacgggctgaaaacaagacacgaaaaaaccacctacattgctgtaagtggttgattttgagagtgacaccgacaggactcaaacctgtaaccttctgatccgtagtcagatgctctattcaattaagctacggcgccgaattgcgaatgcaaatgtagtgtgaaaattgctcttatgcaaataatttgtcgtaaaatttaccagtctttttattttatatcttggtaagaggggtaattttgaatataatacattgataatgtttgatttgaggtaatctgtgctttgttcggattcttttccgggagtttgtcggtggaaatatcgttgccgggaaaagagggcatttgtcgtgtccgactggctatggggaccggagatttgtcatacaaaaattacccctgcgggctgaaatccgcaggggtaattcgatgattttgccggatgcgcttatttgaccagttcggcgagcttctccttgattccttcgcctcgcaggtctttggcgacgatcttgccttcgggcgagatcaggaagttggtcgggatgctgcggattccgtactcttcgacgatcggggcgctcttgccgtcggtgacggcgattacgttgggccacgtcatctcctcttttacaaggaattctttccaactctcggcatcgttgtcgagcgatacgccgtaaatgttgaatcctttggggccgaactccttgaacgcctccttcagatagggcaattcgccgcggcagggactgcaccaggttgcccagaagtcgatcagcacccatttgccggggccgatgaggggtgtcaccgaaacggtttcgcccagggagtcgggcagcgcgatttccagatagggcttgccgatttcggtattttcctgggcggcgatcgatttggcgatggcggtcaggatctgggttttctgcatctgttcggggaatttattcaggatttcgcgggcttcttgcggttccatttcgttatagaggtttccgaagaagtaaacgccgaccaggttgtcggagttgttgtccaaagcgcggcgcatgatgccgttggctacctggttcagcgaatcgaatttctccatgtcgttttcttgcatggccaccaggaattgtccctgaagcatgcccaaagagtcgtttatcggctggaaaatctcgttcgagcgggtgccgccgacttggaattggcccagatccgcagttttaacgtcgatttttcccggttcgaggaagatgaatccgatgccctggcggtgccggttggtaaggatggccaggtccggctggtcgatcgtgcctttgattttgaacgtaccgtccgcagcgacggctgccgatgcgatggtcggattttcgggattgccttgcatcaggaatacggagtccgtgattcccgggtccagtttgccggtgatggtgtaggtattgcctccgcatcccacgagggtgcctgcggcaagaagacctattaacgcttttttcatagtgctgagaaaggattaaaatgattatttggtcggtttgtgattcgtcttttggggtgttcgcggcgtttgccggatttcgcgctggggattatccttcaaaaaccgttcccagctcgaactgccctttgccgaggcagccttgcggcctccgccgagtcctttgaaccgatcttcgccgagggcgccgttcaatgggttcgaactcatgaaatggtggcacagggcgacggccataccgtccgtagcgtccagtcgccggggcggacgttcgatcgtgagcatgctgctgacgagagccgcgacctgctccttgggggccgagcctcggcccgtgatacactgtttgatgcgtgtgggggcgtattcgaatacctgcagtccgcggctcaacgccgcagccatcgccacgccttgcgcccggcccagcttgagcatcgactgcacgttctcgccgaagaagggcgattcgagggccacctcgcgggggcggtattcgtccacgagggcaccgacccgctcgaaaatgtagcgcagcttttcgtaaggatcgttcatcctgtgcaggtcgatgtcgcccagcacgaccgatcggacctcccgtccgcaaacctccagcaccccgtaccccatgtagttggtgccggggtcgatgcccatgatgcggtatgtcgtcgggtcggacacggtgcagggacgttacttctccttgagggccgcgatctccttttccgcctgactcacgcggcgtgccaggtcgggcaggttcttgaagatggccgatgcgcggtgatattgcatgccgggcagcgccggatagccgaaacgtacttctccgtcaggtacgtctttgtcgagaccgcttttggagccgatgcagaccctgtcgccgatggtcacgtggtccgcgatgccgacctgtcccgcgaggaaacagttgtgccccaccttcgaagtgcctgcgatgcctgtctgggccgaggaaacggtattctcgccgatttgcacgttgtggccgatctggatcaggttgtcgagtttcacgccccggcggatgatcgtcgagtcggtcttggcccggtcgatgcaggtgttggcgccgatttccacgtcgtcttcgacgacgacgttgcccagttgcggaatcttgtcgaagccgcctgcggcattgggaatgaagccgaagccgtcggcgccgatcaccgcacccgcatgcaggatgcagcggctgccgatcacgcacccctcgtaaatcttgacacccgggtagaggatcgttccgtcgccgacggtcacgccgtcaccgatatagacctggggatagatttggcagtcggcgccgatgcgggctcccgcctcgataacggcgaaatcgcccacgtaacaatcttcgcccagtgtcgcccgctccgagatcgaagcccgctcgctgatgccctgtttgcggggttttgcggcctgatacatttgcagcagtttgagcactgcggcgccggtgtcttcgactttaatcaaggtggcggtcacgggttccgaaggggtgaaatccttgttcaccaatacgatcgacgcacgggttttgtaaaggtgtttttcgtatttggggttggtcaggtaggtcagggcgccgggttcgccctcttcgatcgaggagacggtgtgcaccttggcctctttgtcgcctgcgacttggccgccgagaaaaccggcgatcatttctgcggtaaattccatcatagcaatatagtaatcagaggtatttttttatgtctattccttcgggcatgaattcatcgaccgtgcggccgaaagccagtacttcgcgtacggtgctcgaggcgatgtcggctacgggagccggggtgaagagcatcacggtgatgatgtcgggatgcaggcggtggttggtcgcctccatcgtccgttcgtattcgaaatcggtggtgttgcgcacgccgcggatgatggccgaggcatgctggtcgcgggcgaagtcgcccgtcagaccggtatagattctcacttcgacccgggggttgtccgcatagaggtcttcgatgagttgtttgcgggcttcgatgcgcagcagtcctgccttggaaacattgttgccgatgccgatgacgaccttgtcgaagattcgcagggcatcgtccacgagtgcctgatggccccgggtaaagggatcgaacgatcccggaaaaatggcgatggtgtgtgacattgggagcaaaggtaatgaaaatgaatacagaatccaacaaacggatccgggggtgttgccgaatgtatccgactttctgcaaaagtaatgaaaatgagtgcagaatgaaacgagcgaactgttttttatgccgagtgtattccgatcttttgtgaaggtattgtaaatagggtgggacaaaggaaacctgtccggtttgtatcgggcaggatgtgttagtataatttgttcaggacgcgggcgatacgttcggtgatgattgcggcgtagagttgcccttcgcaggccgatagcgaggtgaggccccggtgatcgacatagaaaatttcgtcgaaacgggcaagttgctcccggccgatctccagctccagcagaggcaggcgggcggcttcgacggcccggcatgccaattcccgttcgacactcggcggggcgggcggagtatagacttttttccctttcacggcgaacaggggcgcttcgtcgcatacgtgcacgaatccctcgccgtcgcagcggatcaccgcttgtacgcctgtccggactgccgcccgttcaatgtccgcttccgccgcccggttgtccgccgtcaccgctgcctgcaaagccagcatgcaggctgcttcgcgtgccgaggtggggtattcggggtagggaacgccgtagttcacgacagccgcagcgggccgcagcgaccgcagggcatacccgtcgtagaaggataccgctccggggatcagcagcaggtcgcccgccggtgtgaaggccatgcgtacgaacgaagagcctgcgacggggtgacggttggcgtcgagcagggcggcgatctctgcctccagccggcgaaggtcgggggcccagcgcaacccgaaaagctcttgtatgttgcgagccagcagttccgtgtggcggtcgagccagagggggcggcgtccccggacatgaagcgtctgatagaggtatgtgccttcgatgcggggcatcggctccgggataccgttgcgcagcaggatgcgttccattattggaggaagattttgagaagcagctcgcggagcagctccccgtccggggcgccgcccgcgttcatgcccttcgatttggcgtcgtattcgcgcagcagccccaggatacggaacacccggcggttgtcccaccgtgccgaggtctgcttcagttcgcccagagcgtaggcgttgttcattcgcaggatgcctatgagttccgtgtccgagggaaacggaactcccttgtggcggctgagccaccgcaggtagttgatgcggaaaatttcgcggaactgattgaaaagggccagaatcgttaccagcagggggttgtctttggggttgcgggcgaaatggtcggcgatgcgcagggcctgttcgaggttctgtcccgtgacggccttgcagagttcgaagttattgaaatccttcgagatgccgatgttctgttcgatgtgtgcgtcggtgattttcttcgttccttccggtagcgagagcagcagcttgcccagttcgttggagattttggcgaggtcggtgcccaggtggtcggtcagcatcgcctgggctttcgcgtcgatcgtgcagcctttcgaggcgacgaactgcgcgagccaggggccgatctcgtaatcgcgcggccggaccgattcgagcaccgcaccgtgctgggcgatgcttttgtagagctgcgaatgcttgtccacgttcttctccttgtggcagacgatcaggatcgtcgtgggcgagggtttcgaagtgtatagcgagagtttgtcgagaccgcgcagttgctgcgcctccttgagaatcaccacctggtacgaacccatcatcggcatctgccggcagaggttcaccacttgtcccgcgtcggagtcccgcccatagacggtcagctggttgaaagcccgttcggactcctggaggatcgtcgaggccagcaggtcgcagagagcgtcgatgaagaaggcctcttcgcccatgagcagatagacgggcgcgaacttccgtcccgcgatttcgcctcggagacggtcgtaggccgccatcgtatctttgaattttacgccgcttttcgccatggcttaaatgatctctttggtgatgcgcagcacgttttcggtctcggccgtgagccggtagcggtcgtcgatgcgccgcccgacgagccagacgatctcatccccggaaagcagtacgaactgccgtgccttctccggcagcgggactttatggtcgatcaggtagtcgctgaccttcttgcggccggacatgccgtagggaatgaaccagtccccctcctgccagcggcgcaccgtgagcgggtatttgagtttgtcggcatccacctgggcgatgtgttcgggtacgccgaagccctggatatcgtcgatgtcgcgcagctcgaagtagagcaccgagttgccgcagtagcagcgcggggcgcccgcctcgacctgcacctggcaggggtcgtccgccgggatcggggttaccataatccgtccccggtcgatgtacgccacgtgggatttggagtagaaccgcttgcccgtgccggagttctgttccagcgccctgaccagggcgtccgacacgtcgcctttgaacgaataggtcgagttgagcagttcgaagattacgaaattcagcgggaaagcccggtcgatacggtcgatgtggatcgtgtcgatcccgttttcggtggtgatgacctcttcgcggatgcgctggatgccgtggttgatgaagagctgcgcgtcggtcagacggccgatgttctgacgcatcaggtcggtgaacttggggctgatctccttgatgcggggtacgagtcccaggcggatcttgttgcgcaggtatttggtcgagcggttcgacgaatcttcccggtagggaatgtgttgtgctacggcgtattcgaggatgtccttgcgcgaagcgaacatcagcgggcggatcagcttcccggcatgggtggtgatccccgtcagaccccgcaggccggtgccgcgcaacaggttgatgaagaaggtttcgatcgagtcgtcgatgtggtgggcgatggctaccaccgtgtaaccgtgctcgcggctcaattcgtcgaaccaggcgtagcgcagccgccgtgcggccatttccatcgattcgcccgtgcgctccatctcgcctttggtgtcgaagcgtttgttgtaccagggcacgccgtacttctccgcctcgcggcgtacgagttcctcgtcctcttcgctctccacgccccgcaactggaaattgcagtgggccacgccgacgcgatagccgcttcgcacgaagagcgagagcatgaccatcgagtccacgccgcccgaaacggtcagcaggatgaaatcctccggagctgccagctcgttgcggcggatgtagcgttggaaattgtccagtaggttcataggcagtgccttgtcggttttataatatattgacttcgggttcgatctccacgccgaagcgtttctttacctgttcctgcactttgcgggcgaaagcgacgatctccgtacccgtagcgcctccgaggttgataatcaccagcgcctgccgggggtggatccccacgcgtccttcgctgtggcctttcagtccggcgcggtcgatcagccagcctgcggccagcttgacttgcgaagggtcggccgcaggatagtgcggcatatcgggataaagtgccgacaagcgttcggcctcctcgcggccgacgaccggattcttgaagaagctcccggcgttgcccgtcaccgcagggtcgggcagcttggcccggcggatcgcacagacggcctcgcggatgttgcgcagcgtgatgcctccccgcgcttcgaccgctgcggccaaatccccgtattcgaggcggggtcggggcgtgcggctcaacgcaaagcggaccgaagtgatgattacacgtccccgcagggagcgtttgaagacgctgtcccggtacccgaacgcgcagtgttctctgttcaggacgagcgtgttgaggctctccgtgcagaacatctcgacgcttcggatcgcatccttggcctcgcagccgtaagccccgatattctgaaccggagcggccccgactttgccggggatgagcgagaggttttccaatccccacagttcgtgctgtacggcccattcgaccaggtcgtcccactcgacgcccgcgtcggcttcgaccgtcacgcagtccggctgttcgtccacgatgcggataccctgtgccacaggggtcagcagcgtaccgggatagtcttgcgtgaagaggacgttgttgcctcctccgaggacgtaccacggatcaggcattcctttctcgaagagttcctgcaaatcttccgtccggtcgaactcgatgaggcgtgccgcccgctgcgccacgtgaaaactgttgcgcggggcgagttcgggattgttaaattctcgtatcatatttgcaaagttaggaattatttcgttaatttgaatgttttcgacaagcgagggcagaacgacttcactcgctctgccggacggagaaaacagagaatgcagttcgatgtttccgataagcgaggcaggagaggacgactttttgcccggcggagagaacggggcccgcagttcgccgttttcggtcgagtggtgcgggacgttgtgtcgggcagggagaacgaccgttcgacggtttcgatctatgcgagtgagaagggagctttttgtaacaggcgggcagggcgccgtgtgcgtgaagagaaaaacgggcggagtcgctgttttttatcgcccgcttcgtcgggcgtcggtcgatgtggcgccgatcttgctgaaagagaatgaatgtgactgataaacggtttccgatatgtttacgaaagaggattttgtgcaaatggaggagcacggcctgacgccggcggctctcgaaacccagttgaaaaattttcgggaaggttttccctttcttcccgtgacgcgggccgcttcgtgcggcgacggtattcgggtgctggatgctgccgggatcgagcaggcggcggcccgttacgaccgtgcgaaggagtctttgcgggtggtgaaattcgtgcccgcttcgggcgccgcgacccgtatgttcaaggatttgttcgagttcgttcgcgaggggcgccgtacggctgtggtcggggagttgctggccaaccgccgccgcttcgccttctggcccgagctgcggacgatcgtcggtgacgatgccgacgagctgcggacggtcgaaaatatcgtcgccgaagggctccgttacggggaaaccccgaagggactggtgtcgttccaccgctatggggacgaggtgcgcaaagccgtcgaagagcatctggtcgaaggggcgcagtacgccgccgccgggggcgaggtgaagattcactttaccgtctcgcccgagcatctgacccgtttcgaagcgttgctggccgaaaagataccgggttacgaatcccgtttcggggtcaagtatcgcatctccttctccgtgcaggacccttcgaccgacacgctggccgtgaatcccgactgtacgcctttccgacgtgccgacgggcggctgctcttccgtcctgcgggacacggggcgctgatcgggaacctcggaaagatcgatgccgacatagtcttcgttaaaaatatcgataatgttactaccgatgcccggcggggcgatacggtgctttataaaaaagcgctggccggagtgttgctcgcattgcaggagcggatttttgaatacctcatggccctcgaagtgccgggtgccgagttggagcccatcgccgcgttcatcgagaatgaactctgcgtgaaactgcccaaggactacggtacgcctcttttgaggcgggtgctcaatcgcccgatccgggtgtgcggcatggtgcgcaacgaaggcgaaccgggcggcggccccttctgggtggccggggccgacgggttggagacgctccagatcgccgaatcgaaccagatcgctcccgaaaagcggaaattgatgcgctcggcgactcatttcaatccggtggatctggtttgcagcttccgcacctcgaaaggcggtcgtttcgatctgcgggagttcgtcgatcccgctacgggttttatctcccgcaagtcggacggcggacgcgagttgctcgcgcaggaactgcccggtctttggaacggtgccatggcccggtggaatacggtcttcgtcgaagtccccatcacgactttttcgcccgtaaaggtagtcaccgatctgctgcgtcccgaacatcagggcgatgaattttgaataagccattgctcccttcggattttcattcggagggagcttttttcgagatgaagacgttggttgtcccaaacgatttttttatggttcgatccgaaaaaaaatgcgccgaatatgcgtgggttaaaatggattttatatatttgtaggaactaattcggaggagtgtgatttcgggaacagttccgatgtttccggtcggagtcggggagagatcgcttgcgatcgagtttcggatggaggtgaggaagagaaagattccgatgatcccggatcgtatgcctgcggtcggatttgccggcggggaaagcggtgctgtatgccgtgcgtttcggtcggcagggtcggtgtgaggccgggctgcatcccggaatccgtgacgcgaggtcatggagtgacgaataagaaattcaaatataataaacataaattcttatggaaaacaaacttcaacagttaacccagaagctctacgacgagggactggagaaaggccgtgccgaggcggaacgtctggtggccgaagcgaagaccaatgcggccaagatcgtgaaggaggccgaggcgcaggctgcgaagatcctcgccgatgccaataccaaagcgcaggatgtggagaagaacgcgatgaccgagatttcgctcgcgggcaagcaggccctctcgaagatcaaagccgagatcagctccatgattatcgccaagagcacggctcccgccgtgaaagccgcgacgctcgatcccgaattcgtaaagcagatgctgcttaccgtcgccaagaactggagcggcgccgattcgtcgaagaaccagttgaaggccctgctgccggaggcggaacagaaggcgttcgaagcgacgttcgaagccgctgcgaaggagctgctggccgcaggcgtcgaggtgggttattcgaaggaggtcaggacgggattcaaggtgggtgccaaagacggcggctactacatttcgttctcggaccaggatttcgacgctctgttgaaggagtacctgcgcgacaaagtctataaaatgctgtataacgcttaagccgggcgccatgttcgacaagaattactactgtttggtagccggattgcgggagtattcgctcgatgccgataccaagggcttcaatgcccgggcgatcatcgaggagattctcgaaggggtttccgcccgcgatgcacgttgcgtgcgtctgctttacggttactacgactgcgagaacctggttaatttccgcaagggacgcgcggcgcacaacccgctgggcaacctctcgcgggaagagatcgaggagcagaccaagaaccccgaccggcttccggcgcgtatggcgaccgtggtccgttcctattcggccatcgtcgatgaagatgccgacaacgaggacgggatcgacaccgaccgatcgttcgagaacgctcttttctcggcctactacgacgagtgcgcccactccaagagccgtttcctgcgccagtgggccgatttcgaccgcaacctgcgcaacatctctgccgccgtcgtagcccgcgttacgggacgttcggccgagcagtctgtcgtgggcggggatgaaacttcgcagcagctcaaacgctcgtcggccgccgatttcggcttgcggggcgacgtcccctatctggaggcggtgatcgctgccgtgaacgacgaaaccaacctggtggagaaggagcgcaagatcgacgcgatccgctggaaccaggccgaggagctttccactttcgattatttcgacatcaacgcgctgctggcttacctggtgaaggtgaacatcgtggcgcgctggacctgtttggacgacaagcaggggcgcgaaatgctgcatcgcctgatgaccagtctggacggcaaggatttgatcaataaacaataaaacagataatgaaaacaacaggacgagtaaacggtatcatctcgaacatcgtgatcgtgaaggcggacggccctgtcggccagaacgaaatctgtcacgtttactgcggggataccaagatgatggccgaggtcatcaaggtcgtgggcgacaatgcctacgtgcaggttttcgactcgacccgcggactgaagatcggcgaaaaggtcgaattcgagggtcacatgctggaagcgacgctcgctcccggtcttctttcgcgcaactacgacggtctgcagaacgacctggagaagatggacggtctgttcatcgcacgcggttcgatcaccgaccctatcgacttcgagaagaagtgggagttcaagccgctggccaagcccggcgacaaggtttcggccgcatcgtggctgggccaggtcaaggaggagtgggtcgagcacaagatcatggtacccttcacgatggagggaacctatacggtcaagagcgtcgtgcccgccggagagtacaaggttacggacacgatcgccgtcatcaccgatgccgacggtcgggatcacgatattacgatggttcagcggtggcccgtgaagcaggccgtgcgctgttaccgggagaagccacgcccctcgcgcgtcatggagacgggcgtgcgggccatcgacactttcaacccgctggccgagggcggtacgggcttcatccccggacctttcggtgcgggtaagacggtgcttcagcacgcgatctcgaagcaggccgatgccgacgtaattatcatcgtggcctgcggcgagcgtgccaacgaggtggtcgagatctttaaggagttccccgaactggtcgatccccgcacgggccacaagctcatggaacgtaccatcatcatctgcaatacttcgaacatgcccgtcgcagcgcgtgaggcgtccgtttatacgggtatgactatcggtgaatactaccgttcgatgggcctcaaggtgctcgttatggccgactcgacttcgcgttgggcgcaggcgctgcgcgagatgtccaaccgtctggaggagcttccgggccaggacgccttcccggtcgatctttcggcgatcatttcgaacttctatgcgcgggccggtttggtcaagctgagcaacggcaagacgggttcggtgaccttcctgggtacggtgtcgcctgccggcggtaacctcaaggagccggtgaccgaatcgacgaagaaggcagcccgctgtttctacgccctttcgcagggccgcgccgattcgaagcgttacccggctatcgacccgctggagtcctactcgaaatacctcgaatatcccgagatcgaggagtacctcgacacccgcatcgaaaagggctgggtggagaaggtttatacgggcaagacgctcgtgcagcgcggtaaggaggccaacgaccagatcaacatcctgggtgacgacggcgtgccggtggagtaccacgagcggttctggaagtcggagctgatcgacttcgtgatcttgcagcaggacgccttcgacgagatcgacgccaactgcccgatcgaacgccagaagatgatgtacgagatggtgcttgacatctgcgaccgggagttcgggttcaccggtttcgaggagtgcgcatcgttcttcaagggcctgatcaacctcttccgtcagatgaactattcggagtggaaatcggagaaattcgaggactaccgccgtcagatcgagaaaacagtgagtgaaaaagaatccaaataaggcgcggtatgacaacacgagcatttcagaagatatataccaagattgaaaacattaccaaggcgaccgtgacgctgcgtgccgagggcgtgggtaatgacgagctggccaccgtaggcggcaagttggcccaggtggtgaagattatgggcgaccaggtgactttgcaggttttcgcgggcacggagggtattaccaccgattcggaggttattttccacggcgaacccccgaagctgcgcgtttcggacaacctggcgggccgtttcttcaacgcctacggcgaacccatcgagggcggcgagcagatcgagggcgaagcccgcgagatcggtggtccgacggtgaatccgttccgccgcatccagccgtcggagctgatcgccacgggtatcgccggcatcgacctcaataatacgatcgtgacgggccagaagattcccttcttcgccgacccggatcagccctataacgccgtgatggccaatgtggccctgcgtgccaaggccgacaagatcatcctgggcggcatgggtctctcgaacgacgacttcctctacttcaagcaggtgttcgaaaacgccggtgcgctcgatcgcatcgtttcgttcgtcaataccacggagaatcccccggtggagcgtctgctcgtgccggacatggccttgaccgccgccgaatatttcgccgtcgataagggtgaaaaggtgctggtgctgctgacggacatgaccctttacgccgatgcgctggccatcgtatcgaaccgtatggatcagattccttcgaaggactcgatgcccggttcgctctactccgatctggcgaagatctatgagaaggccgtgcagttgcccaacggcggctcgatcaccattatcgcggtgacgaccctttcgggcggcgacatcacgcacgccatccccgacaatacgggttacatcaccgagggtcagttgttcctgcgcaacgattcggacacgggtaaggttatcgtcgatccgttccgttcgctgtcgcgtctgaaacagttggtgatcggcaagaagacccgcgaggatcatccgcaggtgatgaacgctgccgtgcgtctctacgccgatgcggccaatgccaagaccaaactggagaacggcttcgacctttcggactacgacgagcgtgcgctcaagttcgcttacgactattcggagaaactgctggcgatcgacgtcaatatcgaaattacgcagatgctcgacacggcgtgggagctcttcgccaaatacttctcgaaggaagaggtggccatcaagagcgaactggtggagaaatactggcctaaaaccgagtagagcaattcaactcaaacagaatggctataaaattccaatataacaagacctcgctgggcgaactcggaaaacagctgaaaatgcggcagaaggcgctccctacgatcaagagtaaggagtcggccctgcgttccgaagtgaagaaggcgaaggacaccgcacaggatttccgacggcagttggacgcgctcacggcgcagtacgactacatggtttccctgtggggtgagttcgatgcggacctgctgcgcatcgccgacgtcgatcttgcggagcagaagatcgcgggcgtgcgtacgccggtgttgcaggacatccgtttcgaggagaaggactacgacctcttctcggctcccgtgtggttcgccgacggagtcgatattctcaagcgcctcgcgcgtctgggtatcgaattcgaggtgttcaaccgcaagatggagttgctggatttcgcacgccgcaagactactcaaaaggtaaacctctacgaaaaggtgcagatacccgggtacgaggatgccatacgcaaaatcaaacgcttcatggaggatgaggagaacctctccaagtcggcccagaagatcgtgaaaaccaaacaacagcaagccggggagggcgcgatgttatgatagcgagaatgtcgaaatacgacctggtactctatgcgggtcagagcagcgacttcatcgagaagctgcgcggcctggggctggtcgatattaccactacggggtgggagccttcggacgaagaccgtcagttgctgctttcgatcgacaaccatcacaaggcggtcgatgccctgacgcggtttctcgaagacgaacgtttcgttcgggacgagcagcccatcgccgacggcggcgaggctttcgatcgctatacggccgctacgcagcaggcagcggcgctccgttcggagatcgcacgcttgcagaaaaccgccgacgagctgcgtccctggggcgatttttcggtcgatacgcttcgcaagttagcggacaggggcgtggtgctacgctatttcttcaccagccgtgcggcttacgagaaggatatcgaagcgtggtcggagcgttatacgatcgctctggtgcacgagggtgaaacctttgattacttcgtggtcgtgacccggccgggcgaggaggtggtgctcgatgcgcaggaggtcaaggcgccgacgatggactgccgtcagaccgaagcgcagatcgccgaggcccgcaggaagctcgcggagctggatcgggaattttcccgtgcggctctttcggtggaggcgatccgccggcatgggatcgagctcaagcggaagctggaagagattcgcgtgaagaatactgcgcagcctgaagccgacggtacgctggttattctggagggatgggccgaggagaccgattccgcgaaggtggatgctctgctggccgaataccccaatctgattttcctgaagagtacgccgacccccgaggacaataccccggtgaagctgcgcaaccgtcccttcgcccatctgttcgaggtgatcggcgcgatgtatgcgctgcctaaatacggcacgatcgatttgacacgcttcttcgctcctttctatatgatcttcttcggcttctgtatggccgagggcggttatggactggtcatcatgctgggcggtttggccgcagtgatgctgggtcgcaagaaggggagttcggccatgaaggagatcggtatgctgacgatgctgtgcggattctcgggcatggtcttcggcctgatgtcgggctcgttcttcggattgcagctctccgaatgggagtggctgggcagcctgcgcgatcatctgttgacaccggacatcctcttcccgctttcgatcggattgggtgccgtgcaggtgcttttcgccatgatgatcaacgcttatgtcacggcccgcagcttcggcctgcgctatgcgctgggactgatcggctggatcatcgtgctggtcgatagtgccgttgcgttcctgctgcccgaaagcgtgggcttcacgttccattcggtcgcttatctggtgatcctgggcatcggcctggtgctgatgttcttcttcaatacgccgggcaagaatatcttcgtgaacttcggactcggtatctggaatacctataataatgtgtcgggactggtgggcgatctgctgtcgtacatccgtctgttcgccatcggcctttcgggaggtattctggcgatggtcttcaaccagttggccgttggtatgagcccggatattccggtcgtgaagcagctcgtgatgttgctgatcctgctgctgggacacggcatcaacctcttcatgtgcgttctctcgtcggtggtgcatccgctgcgtctgacgttcgtggagttctacaagaacgccgggttcgaggccgcgacgcgcgtcttcaccccgttgaaaaacgaataaactaaatgataatcaatattaacaactaaaacaaaattcgatttatggaacctattacgttgggctatctcggtatggccatcatgtttactctggcggccgtaggcagttgctatggcactactatcgcgggcaacgccgcagtcggtgcgatgaagaagaacccgaatgccttcggtaactacatcatcctgtcgggtctgcccgcttcgcagggtctttacggctttgcctcgctcttccttatcatgaattacctgaccgattcggttacgatgctgcaggcagccgctatcttcggcttgggtatcttggtcggcctggtgaactttttctcgtcgtatcgccagggccagctttgcgccaacggtatcgctgccgtaggtaacggtcatgacgtgggtaccaaaaccctgatcctcgccgctttcccggagttgtacggtattttgaccgtggcgatcaccttcctggtaaccagtctgatgaagtaatcgaaatcccggatttcgaaagaacaggcggagcttctgcaagcttcgcctgtttgtgttttgtgaggaagagggtgtgtggaggggttttggagaaggtttttgtataaggcatgagaggggacggttcgattcgaggtggagtaaattgcggggttcggcaatgttgctgtgtcccggcagatcggacggttacggggtggaaaccgctggaattccggggtgtcttcggaatccggtcgtgtcagtcatagacggctgttttgtgtggtcggctttgttgggtatgctgctttattctgttgtttggagcgcttgttcgatttgctcgatcagcaggcgttgtattgttgcgtcgtagtcggtttcggagagcaggattttgccattgggactgatgataaagttgcggggaacgtatcgggtggcgtagagcgagtagattgacatgtcgggatccagacctacggagaatgcgattcccagctcgcggcagaactcttgaacggtctgctgcgtttcgcctcgattgattggaaggaagcgaaatttccggtcagcaaagcgatcgacgatttgggtttgcatctgctgcatttgtttccggcaggtcgggcaccacgtggagaagaaggtaagcaacaccacgttgccttgcaggtcggacagggtgatcgctgtgtcgtcgagcattccgaccgtgaagtgaggggcctcctctccgacgcggacgagcgtggtttccttttccgtcgggatctcttcggaaaggcagcccgttagggcgagtacaagcaggaacagcacaatagtcggctgtacggtccggtatagaagtccgagatgtcgtgtaagtccggatcgagagaagaatcttgtctgtcgaagagcaggccgtaaatatgccgtcatagggagttggttataatcgtcgggtagagttcaaaattcgttccgaataaaaaagccggaattttccggctttttttcgtgcagggaaatacccctcttcagttgatatggcttgccgcatggggatcgttaccgcattcggtaaagctggtcccgcagacgaggcgtgaagcccgcctcgcggatcgcttgttggatgcctgcggcatcgaactggttgtgcgccccggccgaagaaacgacgttctcctcgatcatgatcgaacccatgtcgttggcgccgctgtgcagcgctacctgagcggtggccttgccgacggtgagccacgaagcctggatgttgcggatgttgttcagaaccagtcggctgacggcgattatgcgaatgtattccaatggtgaaaagcgggttgcaactccctgccgctccaattcggtgcccgacgagcgaaaaatccaagggatgaaggccagaaagccgtaatgtccttcgggacagcgggcctgcaggtcgcggatgcgcagcaggtggtccacacgctgacgggatgtttctacatggccgtacatcatcgtcgccgaggtcggcaggttgaggcagtgggcttcgtgcatcacctggatccactcctcgaccgaaggtttggcgggcgagatggctttccgcacgccgggatcgaggatctcggccccggcacccggcagggagtccaatccggcggcgatcagccgtttcagggtgtcgagcgtggtgaggccgctgatgcgggcgatgtgcgccacttcgggcgctccgagggcgtgcaggcgtacctgcggatagaggctcttgagtgtcgagaagagctcctcgtagaaatcgatccccagcttcgggtgtagaccgccctgcagcagcaactggtcgccgccgagggcgagcatccgctcgattttctccttgtattcatccagcgtagtgatgaaagcccgctccgtctggtggggtttgcagtggaaattgcagaagtggcagcccgaaatgcagacgttggtgatgttcacgttgcggtcgatctgccaggtcacgacctccaggtcgggcactacggcacggcgcacgcggtcagccgtgagagccagctcctgcaggggggcctgttcgtaaagccaatacgcctcctccgccgtgaggggatcacgcttcagacatttttcgtatatctcttccgcacggttggggccggtcccggcggttcgctgcgtctgttcccggatcatcgcttcgatccttttttgccccctttgcgggacgttttgccgcccttacccggtcgggacgtgctttggcggcgtaccggaatcgctgcgtgcccctttacgtcgtcctcgcgggagtcggccgccgcatcgtgcaccagttcgaaatcgagctggcggcgttgcagatcggcccgcttgacgcgaatacgcacggcatcgcccaaggtgaagatccgtcctttgcggcgtccatagacctcgtagcggttctcgtcgaactggtagaggtcgtcctccatttcccgcagcgaaaccatgccttcgatgtgggtttcgtccagctcgacgtacatgccccagtcgctcatgcccgagatatggccgtcgaagaactggccgattttatcctgcatgaactccaccattttgtacttgatcgaggcgcgttcggcttcggcagcgatcacttcccgctccgaggcgtgtacgcagagtttctcgaaggtgtcgcggtcggccgatttgcctccttcgaggtagcgggccagcagccggtggaccatcatgtccgggtagcggcggatcggcgaggtgaaatgcgtgtagtaggggaaagcgaggccgtaatgaccgatgttgtcggtcgagtagaaagccttggacatcgcacgtacggcgaggttcgaaatgacgttttcctcgatgcgtcctttggcctgtcccagcagcttgttcatctccttggccacggcgcgtcccttgtcggccttgaatacgtagccgaagcgcagaacgaaggtccggaatttttcgagcttctcctcgttcggaacgtcgtgtacgcgataaaccatcgtgcgccgcacggcacggccgttcactttgtgatgtccgcagaattcggcgacctgtttgttggccagcagcatgaactcttcgatgagctggttggcctccttttgctccttgaaatagacgcccaggggtttgccttcggcgtcgagtttgaacttggcctcttcgcgctggaagcttacggctccgcgcttgaagcgtgttttgcgcatccgctgggccagacggttgagcgtcagcacctcttcggcgaagtcgcccttgccggtttcgatgatctgctgcgcctcctcgtaggtgaagcggcggttggagaggatgaccgtgcggccgaaccatttgtccagtacttcggcttcctcgttgagcgtgaagaccgccgagaagcagagactctcttcgtcggggcgcagcgagcaaagttcgttgctcaatttttcgggcagcatcggaatcgtacgatcgaccagatagaccgacgtgccgcgctcctcggcttcggtgtcgatcaccgagcggggttgaacgtagtgggtcacgtcggcgatatgtacgcccacctcccacacgccgtcttcgatcttgcggatcgagagggcgtcgtcgaagtccttggcgtccgccgggtcgatggtgaaggtcgttatcttgcggaagtcgcgccgggcggcataatcggctttggtgatcgtcgaaggaatggcctgggccgcatcttcgaccttttgctcgaaatggtagggcaggccgtattcggccaggatggcgtgcatctcggtattgttctctccggcgcggcccaatacctcgaccagctctccggcggggcttttggaacccagcgcccagtccgtgatgcggatcacgactttgtcgccgtgctgtacgttagggttgtcccgcttggagagatagacgtccatcggcatgcgccggggatccatcttgacgaagatggcgtggtcgctcacgtcggccgtgcccacgtattgcttgcggctgcgctccacgatgcgggtgatctcgccttcgagggacccggcgtgggagcggcgggtgatgacgaactccacgcggtcgccgtccagagcattcagcgaattgcgctggctgacatatacgtcgttttcgaactcctcggagcggatatacatcgctcctgtcgagatcatctgtacgatgccctcctgacggggacgctccttgccgctgagacggtacttttcctgcccgcactcctcgatagtgccctgggcgagcagttccgtgatgatttcacgggtacgaagacggccctccttggtggcgccgcccgaggccgaagccagatgcttgagggagaacttgttgttcgggaattcccggaacaggttaatgatcagcgaagagcggtcgaatgcggccgacttcttcgtatttttcagtttattcatcggttgaaatagttacgggcgaggagttccatgaaccggatgccggtcggaatggccgcctcgtcgggattgaaggtggatgtatgcagttttccggctccgggaccgacgcccaggcggtagaagatcgccgggtagcgggtgccgtagaagccgaaatcttcggaagtcatgcgcaggggcagcatttgaaagggaattccttcggtttcggccagtgcgacggcctgccggatcaactccgggtcattgaccacgcacgggtagccgggggtgaagtgtacccgggttcgtatgccgtacgaggcgtcgttcgcggcggcgagttcttcgatcctgcgtttcacttcggcccgttcccgttcgtcgaaggtacgcatcgttccctccatatagacccggtccgggatgacgttcgtagcgcccgcagcttcgaccttgccgatcgaaacgacccgttcgggcgtgttcagggccgtgaggtgcaggatcagttgtgcggcggcgctcaccgtgtcgcggtgttcggcacgcatggccgcgtggccgcccgcgccttcgagcgtgaggcgcagttcgtcgttggaggccatgtacttgcccgcgcggaagcccagcgtgcccgcgtccaaagcgggttcgacgtgctcgccgacgacggtcagcaccgtatagccttcgaaggggttttcggccagcactttggaggctccgccgggattcgattcctctccgggttggaagattccgaaaagagtaccctcgaaattccgctcggcggagagccggagcagggtgccgtagagcaccgctgcgtggatgtcgtgcccgcaggcgtgcatcactccgtcgttctcggaactccacgccgcgccgctctgttcgcggatgggcagggcgtcgatgtcggctcgcagcacgacggctcgccgcaggtcgccgcgtccttcgattttggccagtacgccggttccggcgatcggacggcaggggatgcctgcctcgcggagcgcctcggcgatgaagcgggcgctctccgtttcgcggaacgaaagctccgggtggcggtgcaggtggcggcgaaactctacgggtgtcatggttaagcgtttaatagcaattactttgccctattcggaattagaatacgttgcgggcgatcttgcggatgttgtccgtgcgtcccatcgtgtagaaatggatgatcggcacttcggccgccttgagctccttggcctggtggatcgcccattctatcccgacctcgcgggccgcctgtgtgtcctcgccgcaggcccggacggccttcaccagctcttcgggcaggctgacgctgaaggtgcggggcaggatctccaggtgcttgggcgtcgagatcggcttgatgcccgggatgatcggtaccgtgatgcccgctttgcggcagcgctccacgaaatcgaagtacttgctgttgtcgaagaacatctgggtcacgatgtagtcggctcccgcatcgaccttctccttgaggtactggaggtcgctttgggcgttcgccgcctcgaaatgcttttcgggatagcccgccacgcctaccgagaacttggagtggtggcactcctcgacttcgccgtcgataaattctccccggttcatggcctggatctggcgcaccaggtcggcggcgtgggcgtgtccctgggcgtaggggacgaagcggggttcgttctgccgcttgtcgccccgcagcgccagcacgttgtgcagccccaggaaatccatgtcgatcagcgaatcctcgatgtcgtatttcgaccagccgccgcagatcaggtggggaaccacctccacgtcgtacttgcgccggatcgcggccgagatgccgaccgtgcccggacggcggcgcatgatgtgccactcgcggcttccgtcggggcggatgtcctctttgagggcttcgcggtggaaggtgacgttgatgtaggccgggttgaaatccatcagcgggtcgatggctccgaagacgctgcgcgtaccgtcccccttcaggggcgggagcagctcgaaggcgaaacgggtcgtgcgcgaagcgacggcgccctgtatgagatccgtaatattcatcagatgttattgggtatcagtttttcgatcgtttctatgtccatgttgcggcgtgcggcgtagtcggccagttgctctcggtcgattcggccgacggagaaatattcggcgtcggcgaagaacaggccgcagagcgcctcctcaggtgtaatcatatagttgtcgttcagacgcatggcggtcgtcttgtcggcggccagcaggtcgaagacctcgcgtttgagcgagtggtcgggacaggccgggtagccgaaggccatgcgccgaccccggtatttgctgcggatgatctgttcgggtgtgagcgccggaccggtttcgtaaccccacatctggcggcggatgaagatatgcacccattcgcagagggcttcggtcaggcggtcggccagcagcttcgagaggatggcgttgtagtcgtcgccctccgcgcggaacttttcggtcagctccttgagccctatgccgcccgtgagggcgaaggccccgatatagtcggtcctgcctgccttttcgtcggcgatgaaatcggccagacagcgggcctgggcttcccggaccggggcctggctgcgcagcatcggcaggatgtatttcttgtctttcgggccggtgaccacgatgtcgtcgccccggctgacggcttcgaagatgcccgctacgccctggagggtgaggagtttttcttcgcggatgcgggccagcatcttttgcgcgtcgtcgtagagcttgcgggcttcggcgccgtgttcggggttttcgaagatctccggtacgcggcccttgagcccccacgccgggaagaagaagttccagtcgatcagcggctccacatcggcgatacttatgtccggaaacaccagccgtcccgtatgtgccggaacggcgatttcggacgcgggtttcggcacgcgcagcttgcgcacctgaccgaagggtaggatcgtgcggatctcctcgcggcggcggtactggtcgcgcagggtctgttgctcttcgcgcacgcgagccagatactcctcccggccgggaccgagcagttcgccgaggattttgttgttgcggctggcgttgtcggcatggatcaccgggcccgagtaggtcggagctatttttacggcggtgtgtacgtccgaagtggtcgcaccgccgatcagtacgggaatttgcaacccccggcgttccagctcttcgcagacgtggatcatctcctcgagcgaaggggtaatcagtccgctcaggcagatcgcgtcggcgccccaagcgacggcttcgtcgatgatgcggggacactcgaccatcacgcccaggtcgcggatcgtgtagccgttgcaggccatgactaccgccacgatgttcttgccgatgtcgtgtacgtcgcctttcacggtagccaccagcaccttgccagcgctcttggcgttcgcttcggaaccttgctcgatgtagggagtcagtacggcgacggcttttttcatcacgcgggcggtcttgaccacttgcggcaggaacattttgccctgcccgaacagattacctacgacctccatggccggcatcagcaactggtcgatcaccgctaggggcgagcccagcgtgcggtagccttcgagcgcgtcctgctcgatgtagtcggccacgcccttgagcatggcgtattcgatgcgtttgccgagcggctccgagcgccaggcgtcggtatgctgtgtctgcgtcgcgccggttttggtgaattgcgaggcgtattccgtgaggcgttcggcggcgtctgcgcggcggcagaggataacatcctcgacccgttcgagcagtcccggttcgatgtcgctgtagatttgcagcatttggggattgacgatcgccatgtccatacccgcttggatggcgtggtagagaaacaccgaatgcatggcctcgcgcacggcgttgttgccccggaaggcgaacgatagattcgacacgccgcccgaaatcttggcgtggggcaggtttcgcttgatccagcggacggcttcgatgaagtcccgggcgtaggcgtcgtgggcttcgataccggtggccaccgcgaggatgttggggtcgaagatgatgtcttcggcggggaatccgtcgtcggtgagaagcttgtaggctcgctgcgccacgtcgatcttgcgggcataggtgtctgcctgtccctgctcgtcgaagagcatcaccacggcggcggctccgtaacggcggatgaggcgggcgcggtgcagaaattcctgctcgccctccttcagggagatggaattgacgacgctcttgccctgcaccacccggagccccgtttcgagcacctcccatttcgaagagtcgatcatgacgggtactgcggcgatttcgggctcagaacccatcaggttgaggaagtcgcgcatggcttcgggaccgtcgatcaggccgtcgtccatgcagacatcgacgatattggcgcccgcttcgacttgggcgcgggccaccgagagagcttcctcgtaatttttttcgcggatcagccgcgcgaacttggccgagccggcgacgttggtgcgctcgccgacattgacgaagttggcttcgggaacgatccgaagctgttccagcccgctcaggcaggtcacgtgccgccgctgcggcagggggcggggcgtgtagttgttcacgatcttcgccagttcgaagatgtgcaggggcgtggtgccgcagcagccgcccaccagattgaccaggccgcgccgcatgtattcctctacgtcggcggcgaacatcgcgggcgtctcgtcgtagccgcccatgacgttcggcagacccgcattgggatagaccgccacgcggaattccgaaacagcggccagccgctccaggtagggcagcagggccttggcgccgaacgagcagttgaggctcacggccagcggctcggcgtgtgcgacggaggtatagaaagcctcgatggtctgtcccgcgagggtgcgccctgacgaggtgagcgtactggagacgatgaccggcagtcgcatgccgcgttcagcgaagagggtttcgatggcgaagatcgctgccttggcgttcagcgcatcgaagacggtttcgagcatcagcaggtcggcgccgccgtccatcaggccccgagcctgattgtagtacgcctgcgagagctgttcgaaagtgaaagcccgggcgccggggttgtccacgtccgccgacatcgacagcgtatggctcgtcgggcccatcgagccgcccacgaagcggggcttctgcggattgcgggcggtgaaggcgtccgccgcttcgcgggcgatggctgcgccggcccggttgatgcggtacgcctccgctgccagtccgtagtcggccagcgaaatggagttggcgttgaacgtgttggacgtaattacatccgatccggcctggaggtatttctcgtggatttcgcggattgtttccggacgggtgaggttcagcaggtcgttgcagcctctgagaagtttttcgctcgcggcgaactccttgccccggtagtcggcttcgtccaggccgtattgctgtatcatcgtgccgaatccgccgtcgagcagcaggatgcggtgttcgagttcgtgtcgtatgtcgcggttttttgtcacgtcgtgtggtattttattggggtatgatttcgatttcgaagagtttgctccatcttttgcctgtcacgaagatacgttccgaggccgcgtcgtaggcgatgccgttcagtacgtcggtatccggggcgatctcttcgtccgggagcaggccgcgcaggtcgatgaccccttcgacaatgccgctggcggggtcgatgatgacgatctggtcggtgacatagacgttggcccagatcttcccgtcgatccactccagttcgttgagcagttgtaccggggcaccccggaaggtgaccggcacgctgcgttgcacccgaaaggtttccggatcgaggatgcgcaggtattcgctgccgtcgctcatatagagccgctcgccgtcggtcgtgaggccccatccttcgcccgcataggcgaaagtgcggagctgccgacccgtcgccgcgtcatagacgtaggctttgttgttttcccaggtcagttggtagatcttgccgtcgagcagcgcgatgccttcgccgaattcgctgcggggcagcgtagccactacgtccgtgcgtcctgtttcgaggtcgatgcgctgcaggcgggagtgtccgtattcgcccgtaccttcccacatcactccgtctgcgaacaggagcccctgcgtgtagctgtcggtcgaatggggatagctttcgatgacccggtaggtgtaggtgcgcggcgcggcgggggtagcggccggggtttccgttcggagggttttcgtgcgtcccgagcaggcggccagcgtcatcgccagcagtccgatccatgcgatttttgtcattggattccgtatcgtttgtatgctgtccggctgcggcgttggccgtttatagccggtatgtccttattataataggcaacaaagatagctatttttcggaaaaagacgtcgatttcggcgcccgaattacggatcggaggggctgccggtccgggtgcttttccccgaagccctttctgaaagaaaaacggatcggtgcggagatatttatcgggtgtttgttgcttgctaatgaattattttgtacttttgccgacccgaaatgtaacgtataaaacaactgaaatatgaatatcgtaagagaacagcgcgagcagaataactcgctcatcaaggtgaccgtaggcgagaaggattacggcgatgcggtcgaaaaatccctgcgtgagtacaaacgcaaggccaatattccgggcttccgccccggtatggtgccgatgggcgtgatcaagaagatgtacggcaagggcgtgcttgcggagcaggcttaccgccaggcttcggaagcagcgttcaactatctgcaggagcagaagatcgattatgtcggtgacgtgatcccttcggaggagcagggcgacttcgatttcgagaacgggaccgaatttgaattcatcttcgagatcggcgaagctcccgaggtgaaactcgagctgtcggcgaaagataagatgacctactacacgatcaaggtcgataagaagatgcacgacgattaccgcagcaatttcctgcgtcgtttcggccgtctggtggataccgacaaggtaacggcggacgaagcgctggaggtgacgctcgacaacggtgatatgaagattgagggcgcttacgtcggactgatttcgatgaacgaggaggagcgcaagcccttcatcggcaagaaggtcgggttcaagacgcaggtcaatgtcaatgagctttacaagactccggcgcagcgtgccgccgtattgcaggtcaaggagaacgaattggagggtatcaaacccgaattttctctcgaaatcaccaagatccgcaagttcgcggaaccggagctgaacgaggagttcttcaagatggcttttcctgcgggcaacgtcaaaaccgccgaggagttcgaggcgttcgtcgatgccgaaatttcgaaagagctgcgccgcgagagcgactatctgttcacgttgcagttgcgtgatttcctgttgaagaaagccgggctgaccatgccggtcgagttcctcaagcgctggctgtacgtcatcaacgaaggcaagttcaccaaggaggagatcgagaaggatttcgacgctttcgtaaaactgttcacttggaattatctccagaaatatttcatcaagcaggataaccttacggtaacccccgaagaggctactgcagaggccaaggcgttggcacaggcccagttcgctcaatacggattgccgacggctccggaagatatgctggccaattacgccaagaagattctcgaggaccgcgagcagggacagaagatctacgagaagctgtatgagatgaaggtggtcgaggacgtgaagtccaagatcaaggtgaccgaaaaggccgtttctgccgaagagttcgcaaaactggccaaggagatttaagaaacagcggaaaattggtatccgatcagagctttgagggtttgatttttgcaatcactccctcaaagtctgtttagtagtcatacttctgttttttgcttcttccctcgtttttgccggattcgagcctgcatcgtgtgttggccgggtacgggaaatcgagtaggaccggaggcaagtcgcggaaaaatttttgaaccggcttccgatgttttttattaacttgcaaactgttcggttatgaatgaatttgaaaaatacgccacccggcattgcggtatcaatagtctgaaactgcatgatttccgctcgcagtacgcggcctacgtgtcgccgacgatcatcgaggagcgccagttgaacgtggcgacgatggacgtcttttcgcgtttgatgatggatcgcatcatctttctgggggctccgatctacgacgatgcagccaatatcatccaggcgcagctgctgttcctggagtcggccgatccggaaaaggacattcagatttacatcaattccccgggcggatcggtgacggccggtctgggaatctacgatacgatgcaactggtgcagcccgatgtggcgaccatctgcacggggctggccgcttcgatgggggccgtgctgctgaccgccggtgctgcgggcaagcgctcggcgctgcctcattcgcgggtgatgatccatcagccgctgggcggggcccaggggcaggcgtcggatatcgagatcacggcccgcgagatccgcaagaccaagcaggagctgtacgagatcattgcggcccattcgggcgctccgatcgagaagatcgaaaaggatgccgaccgcgattattggctgtcggcccgggaggccaaggagtacgggctgatcgacgaggtgctgaccaagcggggataatatttctgtttcaatctgcaggggacggtcgatttcgggagagaaaatgcatcgtttccgatcagcggaggcagagcggggcgctcgataggccgagcggaataaatgaagaacccggttcgatatttccggtgtgcgacgtcggaacgaggccgatcgacggccgggtagagatgatgacgggagtttgttttcgactttatcccggcagaggctcgtccgaaagttcgaccgggaacgagaacgaaattcgaaggaaaactaaagacctatggctaaaaattacggagaagacctttacggcaacgagagcgatgcgtgttcgttctgcggggccaaacgccgcgacggtgcgatcctgttgagttcgtccaagggttgcaatatttgcagcaaatgtattgcgaaaggataccagatgctcatcgaaaacgatgtgctgcatgacgaagccgcatcccgtcgcaaggagcaaaagaatacttcgttgaaattcgaggatttgctcaagcccaatgaaatcaaggagtttctggatcagtacgtgatcgggcaggacgatgccaaacgctatatgtcggtggccgtatataatcactacaagcggctgctgcatgcttcgggcgaggcgagcgaagtggagctcgacaagtcgaacattctgctggtcggcccgacgggtaccggcaagacgctgatggcccgcacgatcgccaaattgctgaacgtgcccttcaccatcgtggacgctacggtacttaccgaggcgggatacgtgggcgaggatgtcgagagtattctctcgcggctgttgcaggtggcttcctacgacgtggagctggcccagcggggaattgtcttcatcgacgaaatcgacaagatcgcccgcaagagcgacaatccgtcgcttacgcgcgacgtatcgggtgaaggagtgcagcaggctttgctgaagattctggaaggcacggtggtcaatgttccgccccagggcgggcgcaagcatcccgagcagcagttcgtgcaggtcgatacgcgcaacattctgttcatctgcggcggagcgttcgacggcatcgagaagaagatcgcccagcggctcaacacccgggcgatgggttacggacggatgaatgccgattccgtggaccgcaacaacctcatgcaataccttatgccgcaggacctcaggtcgttcggtctgattcccgaactggtgggccgcctgccggtgctgacctatatggagccgctcggccgcgaggccctgcgttcgatcctcacgcagcccaaaaatgccatcatcaagcagtatgaaaagctgttcgagatggacggcgtgaagctcgtgttcgacgacgaggtgctggactatatcgtcgataaagccatcgagtaccggctcggtgcccggggattgcgttcgatctgcgaagcgatcatgatggacacgatgttcgatatcccctcttcgggagagcgccgcttcgaagtgaccttgccttatgcccgggaaaagttcgaaaagaagaaatttttggcgctcaagcaggtcggatagaccggatttgtattaaatttgtaccaccgaacgcgggactgcggcgggggaccggtgtgcagtcgcgctcgttcgatccgaacgagcagaatgaggaaagaaggaagatcttcggcttcgtccttcgtttccatatattttctgccggtaacgggccgagttgtgcatattcggccgattcgtccgggatgggcgccgaatgtcggcccgggctgtgaggccaatacataaaaaatataaaagcatacaatcacttatgattactaaatccgaactcacgcgcgttgcagacaacatccgcatcctgtctgcggcgatggtcgagaaagccaaatcgggacatcccggcggcgcaatgggcggcgcggacttcatggcagtactttacaccgaattcctccgctacgatccggatcagatggattatcctttccgggaccgtttcttcctcgatccgggacacatgtcgccgatgctctactcgactctcgcgctggccggaacctatacggtggaggatttgcgtaacctgcggcagtggggcagcgtcacgccgggccatcccgaagtggacgtgctgcacggtgtggagaatacgtcgggtcctctgggccaggggcatgccatggcgctgggcgccgcgatcgccgagcggttcctcgcggctcgtttcggggagtggcagtcccacaagacctatgcctacatctccgacggcggtatcgaggaggaggtgtcgcagggcgtgggccgcatcgccggccacttggggatgaacaatctgatcatgtactacgactcgaacaacgttcagctttcgaccaaggtcgatgaggtggataccgagaacgtagcgatgaaatacgaggcgtggggctggaacgtcatcaccatcgacggccatgacgtagagcagatccgcgaagctcttaccgctgccaatgccgaaaaggagcgtccgacgcttatcatcggccgtacggtcatgggcaagggtgcggttgcggccgacggatcgagcttcgaggacaaggtttcgacgcacggtcagccgctgacggctgccggagccgatttcgccgctaccgtccgcaacctgggcggcgatgcggaggatccgttcaagatcttctccgagagcggcaaggtgttcgacgcccgccgcgaagagcttcgtgaatgggtgcgcacgcagcgcgagagggagaagacgtggcgttccgagcacaaggagctctcccgcaaactcgatcttttcctctcgggcaaggtgccggagatggactacaagggactcgagatcaaacccgacggtgcgacccgcgccgcctcggcttcggtgctctccttctatgcggagcggatcgaaaatatgatcgtcgcctcggccgacctctgcaattcggacaagacggacggctacctcaagaaaaccaaagccttctcgaagggtgatttttcgggcaagtttttccaggcaggcgtttcggagctgacgatggcctgcattgccaacggtatggcgctgcatgggggcgtgattccggcgtgcggtacgttcttcgtcttctcggactatatgaaacccgccgtgcgtctggctgccctgatgcacctgcatgtaatctatatctggacgcacgactcgttccgtgtgggcgaggacggtccgacgcaccagcccgtcgagcacgaggctcagatccgtctgatggaacatttgaagaatcaccggggggagcgttctatgttggtgctgcgtccggccgacggcgaggaaaccgttacagcttggaaattggcgatcgaggagcatcgtcccgtcgcgctgatcctgtcgcggcaaaatattaagaatctgcccgcactcaatcacagccgccgtgaggaggctgcccagctttcgaaaggcgcctatatcgtagtcgatgccgccaaaccggctgtggtgatgctcgcttcgggttccgaagtcgctacgctggtcgaaggtgccgagttgctttcgaaggagggaatcgcggtccgtatcgtgagcgtgccgagcgaaggacttttccgcgaccagcccaaatcctatcagcagaccgttctgccacagggtgtggtgcgttacggccttacgtcgggtctgcccgtgacattgctgggactggtaggtgaaaacggtatgattcacggtctggatcacttcggttattcggcaccctacaaggtcctcgacgagaagttcggttacaacggccagacggtatatgaagaggtgaagaagttgatcggtaaataagccggttgtaaaacggatagaagacaggcccggatgccgataggcgtccgggcctgtcttctgtttgttccgtcgttctcccgttgattttttcacgggtctttccgctgttttttgcacccgtcgggtttcccgaagacttgtccggcgatgttcggggaagaacgggtgcagctttgaaatcggatcatggacagagtgccttggggcggccttttcctgttattgttgataacttttccataaaatgccggaggggcggaccatcgaatgcgattaaaccctatatttgttttcggtatcggttcccgatgtggagggcgaatccaccgggattaaaagggaatcctgtgaaagtcaggaactatccccgtagctgtaagtttcttttgggcggtacattctctcagccactggccgttcgggccgggaaggcgtgccgtccggaacaagtcagaagacctgccgtaccgggacgagattcgttgctttcgggtgaaaagcgtcggaacggtttcggatgcttcgtcgtatctattgccggttctgtaaattccattcctgcctgtgttgtatcgggtcggatcgctgcgaatccgtcgttcagaagaggtgtatttcggtttttccgaagggtcggtaaaaagtcgtcggatcggacgacaccgatctggccgacgaaggcgtacggtatggctcggaacgtgcggcttgtcgtgtttctgcggagaaagcccggcggctgatatttgttgccgtcgagccgggtcggaatcggccgaatttccgtcggtggagttatcggtgtggggaattcgagcgttgaaagtatgagtataataatataatatttgaggagaagtttaatcgttatggaaacattcattgtcaagagggacggaacgcgggaggcgttttcgatggagaagattcagcgggcgatcgccaaggcattcctttcggtcgggagtttcgctacgcaggacgtgatcaccaacatcctgagccgggtcagcgtgaccgacggcatctcggtcgaggagatccagaaccaggtggaggtcgcgctcatggccgagcgttactacacggtagccaaggcttatatgctttatcgccagcggcataccgaggatcgggaggtgcgcgacaagttgcagttcctcatggagtactgcgatgcttcgaacgccgcgacaggaagcaagttcgacgccaatgccaacgtggagaacaagaacatggctacgctcatcggcgagctgcccaaatcgaatttcatccgtctgaaccgccgcatgctcaccgaccgcctcaaggagatatacggcaaggagttggcggacaagtatatcgagatgctgaacgaccatttcatctacaaaaacgacgaaacttcgctggccaactattgcgcttcgattacgatgtatccctggctcatcggaggaacgatttcgatcgggggcaattcgaaagccccgaccaacctcaagtcattctgcggcggcttcgtgaatatggtttttatcgtgtcgagtatgctcagcggcgcctgcgccacacccgaatttctgatgtatatgaactatttcatcggccaggagtacggcaccgactatttcaaacgggcggacgaggtggtcgatctctcgaagaaacggcgcacgatcgacaaggtcatcaccgactgtttcgaacagatcgtctattcgatcaaccagccgaccggagcgcggaatttccaggccgtgttctggaacgttgcttactacgaccgctactatttcgagagcctgttcggaaatttcctcttccccgacggcagcaagcccgactgggagtcgctcagctggctgcaaaagcgtttcatgaagtggttcaaccgcgaacggacccgcaccgtgctgaccttcccggtcgaaacgatggctttactcacggaaaacggtgacgtgaaggacaaggagtggggcgatttcacggccgaaatgtatgccgagggacattcgttctttacctacatgagcgacaatgccgattcgctttcgagctgctgccgcctgcgcaacgaaattacggacaacgggttcagctacacgctcggcgccggaggcgtatcgaccggctcgaagagcgtgctgacgatcaacctgaaccgttgcatccagtacgccgcacgtaagggtatgccctatcagttcttcctcgaggaggtggtcgatctggtgcacaaggtgcagttggcctacaacgagaacctgaaatacatgcagtcgaaggggatgctgcccctgttcgatgcgggctatatcaatatgtcgcgccagtacctcactatcggtgtgaacggactggtcgaagcagccgaatttctcggcattccgatcaacgacaatcccgattacgaacgttttacacaggaaattctcggaatgatcgaaaagtacaacaagaagtaccgctcgaaggaggtgatgttcaactgcgagatgattccggcggagaacgtgggagtgaaacatgccaaatgggacaagcgcgacggctacaaggtggggcgcgactgttacaacagctatttttacatcgtcgaggacgaatcgctcaacatcgtggacaagttccgactgcacggccgcaaatacatcgagcacctcacgggcggctcggccctgcacatgaacctgcaggaacatttgagccgggagcagtaccgccacctgttgcgcgtggcttcgcaggagggatgcaactatttcacgttcaacatcccgaatacggtctgcaacgattgcgggcatatcgacaagcgcaacctcaaggcgtgtccgaaatgcaacggcaggaatctcgattatctgacccgtatcatcggttatatgaagcgtgtcagcaacttctctcaagctcggcagcaggaggccgcgcgtcgtcactatgctacgcctggccagctttgatgtggtgttccaggagattccgggcgaagtgaccctcgctctgaatctttcggggtgtccgaaccggtgcgccgggtgtcacagtccccatctgtgggaagaggtcggggagccgctggacgataatttgctgaatagtttgttgtcgggatacggaaatgcgattacctgcgtttgttttatgggaggcgatgcagcgcccggcgatgtcgcgcattggagcgcctgtgtgcgggctgcgaccgggggccggctgaagacaggctggtattcggggcgttctgaattggccgcaggtatcgacccgcgcagtttcgattatatcaagctgggaccgtatgtcgcacatttgggaggcttggattccgcttcgacgaaccagcggctttaccgggtgacggacggcgaaatgaaggacattacggcggagttgaggaacaaggatcgtatgttattgggttaattgaatcatattaaaaggctgcgagggctgtgaacaaatagttcacggccctcgcggtgtattgccgggcggttcggggacctgcatggaacgaccgtcgcgaagtctgtttttcggtttgagaagcccgaaagaattcggtggttcgattccatcgggagctaacaacaaaaagtccccgaaaaggggactttttacttgtgcggtcggtcgcgttatagtccgaactcttgcttgatcagatcgacggcatcgagcttttcccagccgaagaattcgatctcgcgctccacctcgcggccgtcctcccacactttctccttgcgggtgtaggggcggttaccgaaatgtccgtaggatgccgtcgcttcgaagatcgggtttttgaggccgaatttcttcacgatagccgccggacgcaggtcgaagagcttggcgatacggcgggcgatctccccgtcggtcatgtccgcgagcttcggattgcggctgcataccgcaccgtgcgtatcgacgaagacggagatcggttcggcgatcccgatggcatagctcaactccacgagaatttcgtccgcgatcccggccgccaccatgttcttggcgatgtagcgggctgcgtaagccgccgaacggtccaccttcgaggagtccttgcccgagaaggcgccgccgccgtgggcaccgcgtccgccgtagctatcgacgatgatcttgcggcccgtgagtcccgtatctccgtgcgggccgccgatgacgaacttgcccgtgggattcacgtgcaggatatagtcgtcgccgatcagtcgcgccaacttatccttggcacgctccagacgggccttgacgcgtggaatgaggatcgtgcgcacgtcctcgcggatcttctcctgcatgcgtttttcggccattttctcggtgacgcccttgctcgtggggatgaaatcgtcgtgctgggtcgaaaccacgatggtatgtacgcgcagcggacggtgcgtctgttcgtcgtattcgatcgttacctgcgacttggcgtcgggacgcaggtaggtcatcacctgcccttcgcggcggatgacggccagttccttgagaatgacgtgcgagaggatgagcgtcgcaggcatgtattcgcgcgtttcgttgcaggcatagccgaacatgatgccctgatcgcccgcgccctgttcctcttcggcctcgcgcacgacaccctggttgatgtccggagactgttcgtggatcgcggagagcacgccgcaggaattaccgtcgaactgatattcgcttttggtataaccgatacggttgattacgcggcgtgttacgtgctggatatcgacgtaggcgctcgaacgcacttcgcccgcgacgacgaccagaccggtggtgcagagcgtttcgcaggctactttggagttggggtcgtgacgaaggaattcgtcgagaatggcatcggaaatctgatccgaaactttgtcggggtgtccttcggacacggactccgacgtaaataaaaatcccattttacatttattttggaagttaaacgtataaaatggggaaaaattggctgctggaataaaaaagctgttttagctattttttattgtggtttgcaatcagtcaaatctttccacattccccgccgatcggcgaggactgcaaaggtaaacataaaaaacggggaataaaaacttattccccatattatcttacgaaaaataggtgccgtcttatagggccttggtatctatcgggttacgttcaaggtcggcagattcaggatttgggctcgggtgaattattctgtgtgccgacggcggagttttcgcttcgcgacacgtctaaaagcaggaaacacaataatcgtcttttctgggcgttctgtaactaaatagaaacgctcaaacagaaacagcctatggaataaaattgcctccgtaataaaaccagttaaattatttcaatattggattatgaaaaaggcattgttattattaggtatgattgccgcaggcgccgcatccggcggtgtcgtcgcctggagtattttatcgccggccgaaaagaacggcacgcatgttgttacgccgcaaagcggggcagtgtctgacgaccccttttctcaggcgggaacccatttcacttcgtatcaggccgagcagtatccggatcttacgtatgctgccgagaatgctgtcaaggccgtcgtgaatatcgaggtggttcaggagatcgaagttcccgagcggcagtacgatccgtttttcgaatttttcggtattccccagcagggccggcgcggcccttcgacacaggagcgtcggggcggaggatccggcgtgattatttccgcagacggttacatcgtgaccaacaaccatgtggtggacgaggctacgcgccttcgcgtgaagctgagcgacggccgcacgttcgacgccaaggtgatcggtaccgaccccacgacggatgtggcgctggtgaagatcgaggccgaggacctgcctacgttgcctttcggcagttcggattcgctccggttgggcgaatgggtgctggccatcggatcgccctataacctgcaatcgaccattacggccggtatcgtgagtgccaaagcgcgtcagttggatgtcattccgagcgaattccgcatcgagtcgtttatccagacggatgcggccgtcaatcccggtaattcgggcggtgcgttggtcaatacgcgcggcgaactggtcggtatcaataccgtaatcaagacgatgacgggtagctatgtcggttattcgttcgcggtccccgaaacgatcgttcgaaaggtggtcgtggatctcaaggagtacggcgtcgtgcagcgggctctgttaggtctggcattccgccccatagatcagaatttcatcgatcagatgggcgaggaaacgggtatcgaggagttgggcggcgtttatgtcgccagtgtgtccgaagggggcgctgcctcgcaggccggtatccgcaagggagatgtgattctttcggtcgatggcgtggagttgaacgaggctgcgacgcttcaggagcagatcggcaagcaccgtcccaacgacaaggtaaaattaatgataaaaaggtcgggttcgatgaaacaaatcgaggtgaccttgcgtaataaagcaggtaagacggaactcctcacgcgggacgacgtcgatgtgatggaagttttgggcggaaagttcgccacggccgatgagcgtctgtgtcgccgactggagatcagaggcggtgtggaagtgctggcaatcaaggcgaacggtattctgtcgaaggcacgggtaagaccgggattcgtgattacccacatcaacgacaagtccgtgcgttcgctctccgatatgcagcggatgaccgataaggttcgcagcatcgacggagtatatcccgacggacgttcggcgagctatgtgcttgtcgaatagggagagcgccaggaaagccgggtatgttttaccgttttttattgccgtagtttaagaacattcttataaaattaaatatgcgtcagttaaaaattacgaagtccatcaccaaccgtgagagcgcgtctttggacaagtacctgcaggaaatcggcaaggaggagctcattacggttgaggaggaggtggaacttgcccagcgaatcaagaagggtgaccaggaggcattggagaagctcaccaaagccaatctgcgtttcgtcgtgtcggtggccaagcagtatcagaatcaaggcctcagtctgcccgacttgattaacgagggaaacctcggtcttatcaaggctgcggagaagttcgacgaaacccggggtttcaagtttatttcgtatgccgtgtggtggattcgtcagtcgatcctgcaagctctggccgagcagtcgcgtatcgtgcgcctgccgctcaatcaggtgggctcgctcaataagatcaacaaggctttcgcccgtttcgagcaggagcacgagcgcaccccttcgcccgaggagttggcgaatgagttggagcttcccaaggagaaggtgaccgatacgctgcgtgtcgccggccgccatgtttcggtggatgcgccttttgccgacggcgaggacaacagcctgctcgatgtgctggtgaaccccgattcgcccaatgccgacagagggttgattaacgagtcgctctcgaccgaggtggatcgtgccttggaaacgctgaccgaacgcgagcgggatatcatcaaatatttcttcggcatcggctgttcggaaatgacgctcgaagagatcggcgaaaaattcgacctgacgcgcgaacgtgtacgccagatcaaggagaaggcaatccgtcgcctgcgtcactcctcccgcagcaagttgctgaaatcttatctggggtagagaaccccgtttatgataaagccggaacttctaaaagttccggcttttttattccatttccgaactttgttttgcaattgtcgccggtgacagtcggtgcggggcgattacctgtcgtcggaatattcgtcttcggtcatcatacgctggatgcgcaggtttttacccaagaccagggtgatggacagcaacgcgagagcacagacggcgcaaagagccagccattcgagccgtcccaatatgcccgatagcaggacccccgctacggatagtgccaggaccgtgtaacagatgacgagagtaatcttaagtggttgcagcatatttttatggtggcgattatattttgcaatgtatccttatccgacggtcgcagcattgaattcgaggggcgctattcgcggcctgtgcccgcatttgcaatgcagccctttctaaatcctcttctcggagagggcttgggtcgctgtgctttcagagaggtactctaacgcgtataatcaggttttagaagttattatgcttaccacaaaatcggtgcctttccgatgctttgcagatattcgttggcccgggaaaagtgtttgctgccgaaaaatccccggtaggccgacagcggggagggatggacggctttgaggatgcagttgcgctggggatcggcgatggcgcctttgcgctgggcgtaacttccccacagcatgtaaacgatgccttgcttgcgctgtgcgatggcccgcacgaccgcatcggtgaaagtttcccagccgtgtcctgcgtgggaggccgcttcgtgcgcccggaccgtcagcacggcattgagtagcagcacgccctgttcggcccagcggtcgaggttgccgctcgtgggaatcggcgagccggtgtcgtcggctacttcctggaagatgttctgcagcgagggtgggaacggcacgccgtccgccacggagaaacagagtccgttggcctgtccttcgccgtgataggggtcctgtccgatgattaccactttgagtttgtcgaacgggcatttgtcgaaggcacgaaaaatgttgcttcctctggggaatatccggcgggaagcgtattcttgccgtacgaagtcggtgagttctcggaaatagggtttttcgaactcttcggaaagaatctctttccagtccgaagcgattttaacatccatggctggtattgaattaggctgttatatatttcgagtaccacgaccgttttttgttgatctcggcaggcagccctcgatcctgcggggtgtcgtttcgttctgaccttcttcccgggaagagtttcgacttttcgtcgaagcatgtcggtcggtttcgagccggagcaggtcggtaatcgagctatataatcaggttaaatttttgctaaaatacaaagaaagttcgaaacggcgtgtcggaaatgcgtaaatttgaaaagtggcatcaaaagaatatatattatttgttatgaaaaaaattgtaattaccatgctcgtcctgttgtcggcggcctatgccgtcgggataggaggcggggaggtcgcccgtaaactgaaccttcgaccgtcgcaaatcgttcccgcagccgacacgttgccggttcggaacctgatctatctgatcggggacggtatgggattgagtcacgtgtcgatgttgatgctcgaggagggatacggtacgaccgctttcgaccgggcgcagaacatcgcattgattactacttattcagccaacaaccgggtgacggactccgcagcggccggtacggcgctggcgacgggacataagaccggcaacggtatgctcggtgtgctgcccgattcgacggctgcggagtcgattatggcggatgcgatccgagccgggatgccgaccggagtcgtcgttaccagtactctgcaacacgctacgcccggcgctttctatgcccatgtgccttatcggcgacagtatcagcgaatctccgatcaactggccggaagcgacttgacggtggccttcggcggcggattgaagtatgccgaaacgtcggagcgggaggacggtgtaccgggcatcgagcgccttcgggatcgcggtttccgggtgctgaccgatccctcgcagctcgataccttgagccggggacctgtgatgggattctttgccgacggtcacctgccgaaaatgtcggaggggcggggcgattatctggagcgggcgatccgcaaggcgctggagattctgtcgcgagaagccggcgagcgcgaccggggctttattctgatggtcgaaggatcccagattgatctgcgggctcacgataacgatgccgaaggcgtcctggcggagatgcgtgatttcgaccgggcggttgccgctgcgatggatttcgccgaccggcatcctgggacgctcgtggtcgttacggccgatcacgaaacgggcggtctttcgattccttcggccgatgtcgatttcgagcacgaggaggccgggatcgagtaccgtttcagcaccggcggacatacggcggcgatggtgcccgtctatctgtacgggacaggcgccgaacggattaacggcgtactggacaatacggagctggcccttcggctggcagggacgctcggtttgagataagacgatgcggaatttcgtgcggacttcgcgaaatgttgcgagggagaatggagtaatttaatttatagcgtattaaatataaaaattataaagatgttaccactaattttcaaataatagttatctttgtaacatcgagtattcgatgacatatttttgatgaaagtgtattagtttcagccttggttcgaaatctggtaaatgctattttgtttattctgctgtatattaataagataacaattataacgccttgcaaaagaaccagaatagaaacaaaatcggtattttaggagattctttggtttttactttacacttgatttcatcccttgcacttggttgcacacaaagtgtttcttaaagctactttccccgctactgacctctctcatcaagaatatcgattggtgatctatagcgaattttgcagttaaaagagaaaataggcaaatgtacattttaagattatacgttcattgaaactttttgcactatgcaaaggtaagtacttctaccaaatcataggcatatggaaaggcaaatatgcttacctaaatttagtttactttggttttgcctacatataggctaatagagtaaactaaactgaattttcaacgatttctatcatctaactaaatacaaaatatacagcataagaggaagcaaatctactatgtatttctcttttcgctgcaatcctattcacacagcaggactacttcaaggcccaccgcaaggcgagtcgcgaggaggagattgcgcaccatggcaagcccgtcggtccgtgccggtacgtcgctacggagtcggccgagtttccggattccggaccgacttcaagccattaacaaaaggggccgtataaactcgttatacagtccctttacttattctgcgcgaaaaatattccgacgctatgtcccggttaagactattcgggtattacttgccaagcctgctgtccgttgtaggtcgtttctaccgacttgtagcccggagcgacaaacgtatcgtccgcttcgcccgtgttgtcgcccgttgcggggttgtagttaatgaagattcctccgtaaatttcaaccgtggcacggccggctttccggtcggcatcctgaatgttgatgaccggataccaaccgttgatgggattgcccttcgtttcgaatacaccgccataaatcttcaggtgagctttttgagaggggcgtgccgttgctaccaaaatacacgagttggcaattccggaagcatccgtaccgacggtgaagtatccgtccttgatcgtcgtagtgccctccgcaatacggatcgctgcattggtccctttgctgccgctgctgccgtcaacggtaatggtgccgtcgataaccagatcggggcaaccgctatagatgcctgcaacgtttgtggctgtactgtttttcggtccgacgatgaagccttttccgctaataaccatctttttgcacgatttgctcacttggatgcactgttgcaattcggagccttcctgcgctgtcaataccgcaccctctttcagagacaaggtggcggaagcgaccgaggagatatagggagaatcatcgatagtcatactgcgcgaaacgatggcgatatcgccgcttttcaaggctgattccagatccgcaggcgctgctacctccgtacccttcaccaccgtgtaagttccgttaggagccggttcggcagaggtcttgatcgccgtgtagccctccgcaacgaagtttttcaccggattttccgtcatcgaactcgacggatcgtaattgatgaacgtaccgccgtatacgttgatggcggcacccgagccgtctttcaggttcagcacccaataaccgcggttgttggcgctcttcgactcgaacgtaccgccgtagatgttgataacggcctgctgatccgcgtagataaggtcgagctgtgcattatggtcattatagtcctgatcgttgacaaaattaccgccgtagatgttcaccttcgcatcgccgtaagcatatacggccatgcggtagccgtcttcgttgggcttggttccgatagccttaatgttgccgtcgcctttgatattcagggtagcgccgcctttcacttcgaatacggtggtgttgccatagcgtggatctgtatcaggaagcgaggtcgtgttgatgatgtccttgccgttcaggtcgatctcgactgtcttgccggtttccacgaccagcggggcttcgaccgtcacgtcttccgacagggtgacgctgccgccgttggcgaacgctgcatgcagttcctccgccgtggtgacaactgtgatgtcgggtttgtagaaattcggatcgatctcgacggtgatatcgccttgcttggtcagcagattacccgataccatggtgcggtagttgcggcggatgggaatgctcttgaaatcgctgttggccgagatctctttacctgctgcatcgaggaacgtcatcttgaagtcggccagcgtagcctgttcgacaggcgcccagatgtagtccaccgtcagctcgccggtggcgttgagcacgtcggccgtgtattccacggcagcctcgccgctttcctcgcccgtcagtgcgttgaacgtgttcggaagagacgtgaaattcactttcaccttcgcgggtttcaggtcggccgcgttgtcgggaatcgccgcgaggtcgagcgtcttcacgttcagctggccgaagggacggcggagcgtgaacgtctccgagaaggactcggtaaccgtgtagtctttcttgcagaggaagaaggcgtcgaacttgtcgtcgttgccggtgtagtctgcatccgatcccagcgtgattgcgctcaggtcatcggtctcgtagccggcctccgagcagtcggcccagaatacgaagtcatacttctgctgagccaccagccgcaggttgaacgttgcggtgttgcccgttaccgttgcggtctgctgctccccgtagggctggccgttccggtagatctggagcaagcagcggtcgatctgcgagccgtcgccgaaatccgccgctgcggcacgggtctgtactccttgcggaatagagacggtaatcgtctgagaggtcgctcctgcggatggagagacctcgtccttctgacatgcggtcagggtcatcgcaaggcccgccgccaataggaataattttctcataactgattggtttttagagcccccccccgaagaagccccgaagaagccccggagaagccccggagaagttgaaactcagtggtttgtaaaaaaatgttattaatagaactcgtttcgtgttcctttgtacccgcaggagcggtcaggctcctgcggattgtttatgttttatcgaaaggcgttccgacacctttcgttcgttttatatctgagatcagctatcgggtggcagggacaacagcccatttcaaattgtcgccgtctgttattgcttgccattgatatccggcagccggagcataaacggtattggttacgtgattgtaagccttgccgctgaatttgccgcctttgagaatcacacttccgctcggccgtccggtgtcattgtcgcctgatacgaccgcactggtaccttcgatctgcaatcccgtcctgacgttgggagcggaaaattctccgcccgtgatcgtgacttcggcgctgctgcttacatatagcgcgtaaaaggcatcctgctgtccagaggtattgaccgtatagaacttgccgctgcgaatctcggccttggcattctcttcgattgaaacagcgccctgaatacccttgacctcgcaattctcgatcaatacctcggagccgaacagacgcatcgcgtatgcccagtgctgtttattatccaaattcgaagaagtggactcgaaaaagctgtcaatcaaggtaacagtcgcggtattcgcaccgttacgccccataccgcagagggtgaactcacctgagataacccgggcatttcggatagttacgttcgcatcgttccaataggcgatcgctgcagtgttgtaggaacttccgtgccaatggtattcggggtcgttgattagtgtgacaccgtcgatcagcagatcgcctcccgtaacatgaatcaacgatttatgttcgtgtacatcggaagcagcggcaactacggccgtagaagctgccgcactgttgtcgagcgtacctttgccggtcagcgtaagacccttttcggcagtcaggaaattcgcactgccaagctggagggtcataccttccttgatgtcgatggtcttatgctcttcgaaagtaagttcttcggagctcttcgccgcaaggtcgatatcggaagcaacctcgatattggctatttcgggatctgccaaagctccgatcagttcatccgcattatccacttttgcatttttaacaacctggaacgtgccgttcggcgctggggtctctgcaattttgactgctttgtaaccctcgtccacaaagtttgtaccggctccttcggccgcattgtcggcgggattgaaattctcgaaagtaccgcccgtcactacgatggatgccttgccagcctgacggttggagtcataacaattgagcaggaagcggtaggggtctccctccgtctcggtctggacaatgctaaacgtaccgcctttgatttcggccttgccttcgtgtacataaaccgccgaaatatttccgacgaaagtaccgtcttcgatgatcagggttcctccatactgcacgtcgcacgcgtagcaatcgttatccttggcctttaccgtaccgttcttgatggtaagtgttcctccgcgaacggagaacagcgaccaatcgtttcctgcccacacatcagtttcgttcgtaatcgtatgcccattcagatcgatctcgaccgtcttgccgttttccacaaccagaggctccttgaccgtcatattgtccgacagggtgacgctgccgccgttggccagtgcggcacgcagttcgggatagtcgttgatgtcgggcttgtagaactccggatcaatcgtcacgttgaacgtaccctgtttggtcagcaggttaccggatacgttggtgcggtagttgcggcggatcggaatattcttgaagtcgccgttggtcgaaatttcagtcgtgccgttgaggaacgtcatcgaaaaatcggccagcgtagcctcctcgacgggggcccagatatagtcgaccgtcagatcgccatcggcgctgagtacgtcggcggtatattccaccgcagctgtcgccgcgccgatctcgccttttttggcgttgaacgaagtcggaacggccgtgaaagccactttcactttcgttggctttaacgtgggatcgggaatcgcagccatgtcaagcgttttgacgttcaactgaccgaaaggacgacgcaaggtaatgttttccgaaaaagctccctttacctggtagtcgagcaatgcgccggtaaaggcatcgaattcgtcattgttacccgcatagttgcctttcaccgtgatattggtcaaatcgtccgtattataatgatctccggtcgagcagtcggcccagaatacgaagtcataagtctgctgggccaccaaccgtaggttgaatgttgcggtcagtttaccatcggcgcctttctgcacggtggcggactgttgttcgccatacttcgccggagtcgtccccgaatggtagatctggagcaggcaacggtcgattttcgccccgttgccgaagtctgccgccgtggcacgggtctgcatcccttgcgggatggtaacggtaatggtctgggaggtggctccgtcggaaacgagcccttcatccttctgacacgcggtaagggtcatcgcaaggcccaccgccaataggaataattttcttataactaattggtttttaaggaattacccccccc

SEQ ID NO: 10449 - DNA, 6930 bp, Unknown
  gut microbiota DNA sequence
gagcggtcaggctcctgcggattgaaagtgttattgagccaccacctcgtagttgtaggtgatgccgtctactgtctgtacattgtccttataaacgtatccgtcggctgcggcagtctggttatcctcgaaataaccgccctgaattgctaccgtaccatcggcgatatacacgtctttcatgcccgggtaaccggagaaatacccgcctgtaatcgtggtcttaccattttgattgtagagtgcgtaatatttgcagtcgttcagaatcgtaccgccggatatcgtcacgttggctcctccgattgactggatggcttcgatccgaccccccttgacagtcagcttggtaccaccgccagctgccatcagcgcataacccgtcggagagttccggttaatgacgttaccgttctcgatggtcatatcggcgctgccggtattcatcagcgtaaagccgggaccgtcgaacgttccgttcttgatgttgcagataccttggttataaatgacgacaccgttggcgtccgtagctttcgtagcggtgaaagttcctccttcgacagtcagtgtagctccctgttcgttcatgaaaatataatcgctggcagtcatctttccaatacctttgacggtaagctctttcttgttgacgatctgttgtttgccgacagtcagagtaacagctcttttaaagtcgatgacggtaggtttctcgattggaatctcgccactcgtttccggaattttcgtcaaatcataatgataccatacattgacgttaccaccgtctttcaagagggcaacgaagcgtttcaattcggtccagcgatccttaacaacgccatccacgatcaatttagccgtgcttatgtatccggcagtgaaattggaagcccgccagcccatatattcatcggtgaaatagccggttgctactccgtctgcctgtttatccaccttgttgttgcggagttccacggtgtacttgtcgtaagtgtcggcttttttcgacacatttaccatattgccgataaatgcgtgggagaaactttgctccatagcatagaacaaatcgccgtcgctataggaatccgcatcctgacctttgtaagtattgttgagagtaatgccgctgaccgagcagccctcaataagcacgttgcgctcgaaagtctggaaataaccgataaggccggcagcttgcgaacagtaggtgaacgtttcgggattaaatacgtcgatagagcaagcggttaccgagcagttgcggaccgtgacatctttcgagcttgtgctgacgaaaccgatcaggccgccgattttctgaacgctcttaatggccgtattcttcatatggcagttttccaccgtaccgtagtccatgcggccgaccaatgtaccgccgcgatagcaggtcacttcggcgccgtcgatcgtgaggtctttcacgttgccctgaagcacatagaagaaacctccgtagtaagtgcctttaccattaggttgacctgtggcgttgtcaacgtagaggttcttgatcgtatggccggcgccgtcgaattccacgaagcctttgccttccgtatcgatcggagtccaagggttatcggcagagcctttaaggtcgatatcggccgtcagcacgattcgggcacacttgccttgggcaatcagctcgatcgcttttttcagcgtagcgacatcgcctgtagcataagtcgtaacagtaccggctcctttcccgaatgtaatttccgtaaccgtaccgtagatctccacattgcctttcaccacgttcagttttcctacggtaacgccctcggggacaatcagggtgttgccggcagttgtggcttcgacagcggtatagctcgtgccgttcagcgtgacagtcgattccggaagattgatgataagtttattcgtagtgggcactgtaatattgacggcctcgggagcctggccgttctgttcggtggtgtaggcgagagtcacctgctggtcggtctcaggcagcgtaatggagatctccttggcagcctgctcggcagtcagggtgtgcggaatctcgatggtcgccgcagtcgttggagcggtcgttacggtaatatccgtagcgccgttttcgattgcctgagctacctcactgacgctttctacttccgcaatcactttatcaatgggactgtttgcatcgaaattcggatcgatcgtcacgctgatcgagcctttcttggtcagcaggttgcccgacacattggtgcggtagttgcgtcggatgggaatgttggtgaaagcgtcgttcgtgcagatcgccgttccgttattgaggaacgtcatcgtgaagtcggaaagcgcggcctcggattccgtggcccagaggaagtccatcgagatcgtaccgtcggccttggccaactcacctgccgtataggtcacgtcggccgatccgctcacttcgcccgtcagggcgttgaacgtcgtgggcagtcccttgaaagcgacactgtagcccgtgggcttcagcgcctcgtctttgatttcgttcaggtcgttggtctttaccaccagcagaccgaaaggacgcttcagggttaccggtttcgtgaaagaaccggtaactttgaaactctctttggcgaaaaacgcgtcgcgctcgtcgctgttgcccacgaacggcccgatttccgtgatcgacttcaaattcgccgtattgtagaccttgtccgtaaagttgccttcgctgccctcggcgcagtcggcccagaagacgaagtcgtaggtttgcgacgatacgagccgcaggttatcgaacgtaaccgtcttgccgctcacgcccttttcgatgcgatcgtacaacttgtcgccgtggtagatttccagaatacagcggttgaccgaggtgccggtgccgaaagcatcggtcacggcacgggtttgtactccgctctgcggaatcgttaccgtaaacgaggatgtcgttgctacgtcggaaacgagcccttcatccttctgacacgcggtaagggtcatcgcaaggcccaccgccaataggaataatttcttcataatatgttgaattttatgggttttcttgtctgtggtaatttatcattcgttatctgttattcgaatgtggccgttacgtgggtcgtgtagttctgctgcagttgcagcatgtcgagtcctttggtcacattgcccaccgtgatcgacaggccgatggattgccccgcatacggcacgaagaggaaatcttcgccgaccgagtttgacccggcagtcgttgccgggaacgcgagtgtcagagtttgcggagcggatgtcgtttctgtcaatacgtcgtattgtgtcggtacgttcgtgtatgtaaccgacacctcttgcccgcccgtgccgaatgcggccgtgttctgcatcgccaactttgccagcgggcgtttcaacgtggccgatacgccgttgccgccgttccactgtacaccgggtagggcgaaagcgaaagcgtcgcgcccactgccgggcgtatagggcgtccgggtaagcgacacttgccgcaggttgtcggtcgtataggttcccttgccgtaatcggcccagaagaggaagtcgtacgtgccgggcaccagtgcgatctcaatggctgcttcgtcaagcgttccgtttgctatcttatgtagtacgcatcggggcttggtgtcatttgtccaggcctcgaaggtataggtcaatgtttgttctgcagccgtcgcgccgcgcgtcgccgccttggctgcaggctcgttcttcagcacgctttccgagtgcaggtagatcacaccgttcacgggcatagtcggggcgggcgtgggtttctcgtccttgctgcaaccggcaaagacggtcagtgcgaataataatatggtaactatctttttcatccggatgtcagtttagtcagggatcgtaatattgatgtcgccgtcgaaaccggggtctatgccgatgccgggggcgtagtcgcgcgtgaggaactcgtcgcgtatagtcgtcagtttgccccgcacgatgggcacgtcgatgccctcgatgcggttcagcaggttgccttcgctgtcgcggatcgtaagatcgaccttcacggccgactccgaaccattgacgaagatgtaatcgctggccaagtgggcctccttgttcgtcagaggcgtcatgttacactcgaaccacatccccgtgcgggcgtcgttgggcttgttcgtgtaggcgttgaaacccgatgggaagtacccggcgtagtccacctgtacccgtatcgtcgaaaggtctggcgtttgggacagcagatcgtcggccacggatccggttatctccgagtgtcgtgcggccaactcatcaagaaacttgtcgatgtcggtagcgatgaactcgatcttggccatcgggcgctggagcgttacagtcacatctacagtttcgttccagcggtcgcgatgggccttgaggtcgatctcctgccgggcaacgtaggtatccttatggtcctcgtcaccgatgtagtttccggcagcgggcacgctgattgacgagagcgaaggaatcgtatagtatttgtcgtccacggaaccgttatccacgtagtccatccacgctacgacgtggtagcgggcagcgtgtagcgccagcgaggtgtggatcgtgtggtgtccgtccgccgccggctcgcagccgagcacacgccgttccgcgagttcgccgccgatctcgtcgcggaatacctcgacgatccagcgaacgtcatacgcgtcaataacctccccttcggagcgtcctgtctgctcgtaaggttctattttcgggtctatcgcaagagacagattcgcattgaccagcgtgggatcgacgccttcgttttccggaaattccagtacggtcttgtcacagcccgtcaatacgagaacgagtaaatgggcaatatatattgttattcttttcatcttccgctcctcccttattttccgaaccgatacaacagattgatgcccaccttcgtcaggccccagtagttgtaagcccgtcccttttcgaagcgggcgccgtttggtatattataataagtatcgtatttcgtatggacgtatcccgcgccgacggtgaactccgctgcccaatggcgggcgaagggcagcacgtaaccgtagctcaaccccacgccgtagaagccgtcgggcgactggtagcgatttttgttgtccacagcgatattgaaagcgccgatgttgagatgcactccgaagaaatgacccttcatcggggctttcagccagtagcggaattcgggctgaacagccagaaaacgcaggcggtagtcgcgtgccacggtgtaggggctgtagatgatcggcagatcgatcgagtagtggtcgccgaaactgtactccacgccgaggttggcgaccgtagcggccaaatatgccacattggttttaatggcccagcgataaagaggacgtacggggtcgaacatcattccctccaatgcctcaacgaccgactgtgtcgattctgattccggctctgcggatatttccgcaggtatttcggagacagggttacatgcagactcaataactggcttttccgatgtcggttcggcttcgctcccggataatgaatcaaccggcataacatcgctctccggttcaggcatctgattacttcccgcactacggaacacataggccacggctatcacatccgtcattcctcgccaccgttgcgtagaattcgtcgtccgaaaatgctcctctttcaatccctcatgaacgataaaataagacttgacctgattgcttcgatttttcgcagctgcaaggtttgtcttgaaagaatcgtaagaggagcaaaaacccagcatacgcactttcatatctcctgattcgattgaaagcttgtgttgtcggatagattgagtcagtgagttgatagcggctgcatttcctttataatccgcccaaaacatccgtcgtttcggggcaaatcggaagacaaccgtatcctgcttctccgatgcgagcacactcgtcttctgccgagtactcttgctggctttggcggatagaacactgtctggctcttgagccgcagcattcagcccgtacagcaggaagccgagtaaaaaaagcctcgggaacaatctcgaacgaccttttcgatctgaaatacttttgtcaaaacaaatcatactaaacaattaaatagacaaagattttattcctcatctgcttataaagatacagaaaatttctggaatagcggcatgaaaggcatgaaaatgcgctgaatggcttagtataaaagcgtttatgaagccaaccggtgccaaaggaaaaaatgaggtaacgcaaaggaaagcggaatattgaagaagaacggttgccaaatcattacctgttaaaaaaaaagcatattcttataaactgcttattttcagcgtgtaggataaatgatgatgcctggcgcaatggtaggagatttgcttctctattccgcattccgccattacctttttcagttgtttgcacatcgtccaatagttgattttcccgaaaaccagcctgtcttccgacagatacttgtaccgttcgattatctgcaagggaatatccagcagcttcacttggaacgggacatttgtcttgtgccgtttcgacaatatccatttctcaccgttcacctccactatttcgtccgttgtgagttctttcatatccacgaaagacaaggcggtgaagcaggcgaaaatgaacagatcccgcaccaatgcgagggtggggttgtcaaactcgtgcgccatgattcttttgatttcgtcctctgtcagatattcccgttccttaacattcgggctgatatggaactgcgcaaacggatttctcggtatcagtc

SEQ ID NO: 10450 - DNA, 1181 bp, Unknown
  gut microbiota DNA sequence
ttagggaaagataacgtgacagatgaacaggttgcaatcataaaacaagccattgaaaaatatggtagtcctgatgaaatcaaatacgattacagcattgccccgcaatggattaaacaaagacttgcattatgaattttactaagcttacaaaagaagaacaacttaccattttggctaatgtagccgaagataaagggattgtggacaatgccgtagaaaaggactattgggtcagtatggtgttacgtgccatattttctttgccgtatgcagcagcttttgttttcaagggaggaacaagccttagcaaaggttggggattgatagaacgtttttcggaagatattgaccttgcaatagatccccaatatttcggctttacaaatattgagactaaaagtcaacggactaagttgcggaaagactccaagaagttcatagatggctcttttgcgctcgatgttgagaacagaataaaagagtttgagctatcagagagctgtaaggtcatagttccggagacatctgtcagtgaccttgaccctgtagtcctgtttgtcgagtataattcagtgctgcaaacgaaaatgcaatatatacccgagcgagtcaaagttgagataagttgtcgttcactcatggaaccgtcagaagatgtgaaaatgcgttctatggtagaagaggcttatccaggtgaagagttctcattacctatattcactgttcctaccgtagtgccaggacgaacattcttggaaaaggtttttcttttgcatgaagagtttaaccgtcccaatggctgcacgcatatcgaacgtatcacacgacacatgtatgacattgtaaagatgatggataaatcgtttgcgatggaagcaatgcaggatgtacaattatacgaggacattgtgactcatcgtaaaaagttcacggcatggagtggattggactatacgagtcatcttccacacacaatatcgtttctacctcctgaaagcatcgaagatgttttgcgtgacgactataagcagatgcaaatcggcttcatctatgccaatgcaccttctttcgatgagattatggaacgattgagtgagttgcagaacagatttaggacattggaatgggaaaataatcgttgacggtatggcggacattctttttgatataaacgaacc

SEQ ID NO: 10451 - DNA, 18996 bp, Unknown
  gut microbiota DNA sequence
aacagagccgatgatataaaaaacgatgagtatgatcggaaaaataagggaaagtctgctggttaactcaaattgaaggaattaaatgactatccctacgtaggtattccggaactgcgtgcggagttcgcccggtggtataagagatggtacggcgtggacctggcccctgctaacgaaatcctgcccctgatcggcagcaaggagggtgtgatgcacatttcgctggccttcctgaacgaaggcgacggggtactcatacccaatccgggctatccgacctacgcctcggtgtcgaagctcaccggcgcccgcatcctgccctacgccctgaaagaagagaacgactggcagcccgatttcgaagcgctggagaaaatggacctgtccggtgtgaaactgatgtggtgcaactaccccaacatgcctacgggagccaacggttcgcgggagctgttcgaaaaactcgtcgccttcggccgcaggcacaacatcgtgatctgccacgataacccatacagcttcatcctgaacgaccgcccgttaagcattttgagcgtgccgggagccaaagagatctgcatcgaactcaactccatgagtaaaaccttcaacatgcccggctggcgtatcggaatggtggcgaccaattcccggttcctggagtggatcctgcgcgtgaagagcaacatggactccggaatgttccgcccgatgcaactggccgccgtcgaagcgctgaaagcccccgacagctggtaccaacggatgaacgaggtatatcgccgccgacgcgcactggctgcccggattctggaaaccctcggctgcgatgtccgcgacgaccaggtgggaatgttcctctggggacgggtgaacgataccctcgcggcgcaactcacggctgccggggagtgcccgaacggtgtcggggaagccatctgcaaccgggtactacaccagtcgcgggtcttcgtctctccaggtttcatcttcggctcggaagggcggaactacatccgcatctcgctctgctgcaacgaggagatgttgcagcaggcactcgaccggatcacgacgacccgaacaaaacagaatcagtaaacagaatataaacagaccggattcgccggttacagccggcgatcgcaaaatcaacaacgacaatgaaaatggaaatagaacctctcacttttccgggcgtggatcccaaacgtccgatgattatcgcaggcccttgcagcgcggagagccgtgaacaggtactcaaaaccgcctccgaactggccgcccggggcgtaaagatcttccgggccggtatctggaaaccccgcaccaagccgggcggcttcgaaggcatcggcgtcgaaggccttccctggatgaagcaggtcaagcaggaaaccggcatgctggtagccaccgaggtcgccacccccgctcatgttttcgaagccctgaaagccggcatcgacatcctctgggtcggtgcccgcaccgtcaccaaccccttcgccatgcaggagctggccgacgcattgaaaggcgtagatatccccattctggtaaaaaaccccgtcaatcccgacctggaactgtgggtcggcgcgatcgaacggctctacaacgccggactccgacggctgggcgtcatccaccggggattcagctcctacgagaaaaaaatctaccgcaacgctccgctctggcatattccgatcgaacttcgccgcaggtaccccaacctcaccatcttctgcgacccgagccacatcggcggtaaacgcgaactggtagctcctatctcgcagcaggcgctcgacctgaacttcgacggacttatcatcgaatcccactgcgatcccgacagtgcgctgagcgatgcggcacagcaggtaacgcccgaagtgctggactacacgctgcaactgctcgtggtgcgcgacaatgcccaaaccacggagaacatcagcatcctgcgccgccagatcgacgaggtcgatgagcaactgttgagcctcctcgccaagcggatgcacatctcgcaggagatcggcacctacaagaaggagcacaacatgcccatcctgcaaaacaagcgttacgatgaaatcctggacaaacgcggcaaaatggggcaatcgctcgacctcgacccggaattcatttcggaaatcatgaaggcgatccacgaagagtcggtaaaggtccagatggaaataatgaaataacgacgttcccgataagcgaagacagcaccgaatttattcggattatgccgtgcgaagaaaacgaagaagcgattcaatgttttcggcaaacggggacggaagttgccgacggcctctgccgagcgaaaaaacgaagaatgaaatagaacaatccccgggcggtcccatgccgcccggatcatcaaaaaacataaacaaaccgatatatgcgcatactgattttgggagcgggaaagatgggctcctttttcaccgatctgttgagtttcaaccacgacgtagccgtcctcgaaaaagaccctcggcgaatgcgattcatctacaatgcccagcgcttcacctcgcccgaagagatcgccgacttccggcctgaactgcttatcaactgcgtaacgctgaacgccacgctccaggcattcgaggaggtatttccctatctgccgaaagagtgtatcatctccgacatcgcctcggtaaagaccgggttgcaggaattttatgagaaatcgggattccggtacgtttcgacccacccgatgttcggccccacgttcgccaacctgggcaacctgcaaaccgaaaacgccatcatcatcaaggagtcggaccacatgggcaaaatcttcttcaaggacctctacggttcgctgaagctcaacgtctgcgaatacaccttcgaggggcacgatgaagttgtggcctactccctctcggtgccgttcgcctcgacgctcgtattcgcctccatcatgaagcaccaggatgcccccggcaccaccttcaagaaacacatggccatcgcccgcggactactctccgaagacgactacctgctgacggaaatcctcttcaaccccaagacgcccgcacagatcgacaacatcgtcgccacgctgacccgcctgtcgaagatcatcgacaaaaaggacagcgggaagatgaagcggtttctggacggagtccggaaaaacctggagtaaaaatcgtactccataaaaaacggccggtatgttaccggccgtttttcatatcgggtcgatccgctaaaaactcaacttcacacctgccgtaaatccggcgctgtactgcggaaacgtactccagtcgtaaatccggcggttgcaaagattgtgaccttcggcgaataccgttacccgcttggacgcgtaccaatcgacattcaaccccagatctaccgtatagggaatgcgcatattccccacgatcccgtcgttcgggaaccacggaatcactcgcgaaatatagcggttggactgcaggtcgaaaacgaggccgaccgagaacttacgatgatgatagcgggcccggaccgtaccctcgaactccggcaggccgatgctcaaggtctgatgctcggtataggtcagtccccgcccgccgatggagaacgtgaaattgctcaccggacggaactccagctcaccgttgagcgacatgacattcagccgtccctgtaccagactgaacccctcataccgggtagtcggcgtatagcaataccaaaagttatgattctcgatgaaagaatagccgacgaacaatcggtaaatcagcttatcctcgacgagacgcccactcacaccgacacggaccgaatagtccaccgtattgcggggcatcgggtccgtataacgaggcacgtaataaagattggtttccataagctcccgcatatcgttgtgcttcagggttccgtccaactcgacataaggtacgaaaccgccgccgcccagatcgaaacgcaagtgagcgtagggaatgaaataattcgccgcatcgcgccccgccacatcgtcccggtagtaatccaaaccgaactccatatcgaccgaccgggcacgataggcataacggaacgctcccgaataggtccggttgtaatagtcagaaggagcggcccaaaccgattcgcccttgcggtcgccaccccaccggccctcgaatccggcccggaagacgagcgtatggcggccgaaacgtcgtccaacggcggcatctacccccaaattccactcgttttcgtacggataatccaacaccggaacgacattatcctccagatagagtttcgaatccagcggattccaccagttgcccgccgtgacctcgacattgaaattcgtccgcgagaggtcgttgaaatcgtcgccgatccgtatctttccctgcaaatcgccgatcacgcggcgatttccgttgtcgaaagtcggaaagtccggatcggggaaaaggccgtaacggtcgatgatccggttccggtagctcacctcgccctccagcacatgacgcccgatgtatttcccggcggcgacacccacccgattgtccatccacagggcgctatggtccccgtcgggcgtatagggaatccgtccgtaccgtccgtcgtggttgatatagcccaacgcatagccgatgtcgggattctgcgtcgatacatacagatcgagcgccgaattgagcggataacccgctccggccttcaggtaaaaaggcagcggacgatcgaactcccaataggtgatcgtcgcaggacggatcgggcgcgtggcgagctgcgtttcgagcgtgagcggcgtgatcgaatagtcgatttccggctgtatggccgccgtatcgaccatattggggcgcacggcaagtttcgtcgcatgctccacgctcggcacataggctttggatacttcgacacgcttctcgacctgggcgttgagcgccccgggcaccgcaagcagtccggcgataaacatcagggacagaatagctgatcgcttcatatcgttaattgagtttcttgattttctctttcgcttccgcaacgattccgtcatcggcgggggtgtagccgtccacgatactctggtaggtcgcccgggcctggaacatgtcgcccttctgcacataaatatcgcccagcacaaggaaggacttggccagccagaaggcatgaggcgttcccttgtccgagaaatcgagcaccagtttttcggcacgagccgtatcgccggcccggaacgcggactcgatcacccggtaggccgactcggctccctcgggtgttttcacattggcgctcaaaaccttgtagatcttttgcgcggcagcggcatctccccggcgatccagaatcccggccttcgcaaactgggatgctcgccatgcctcgtctcccgcagcggtgtaggatgccacatcgtcggccatggacagaatccgctcctcatcccccgccgcgatcgtcgcacgaacgtagccgttcatggcctcggcctttccggcagcggtgctttcggcatcggccaatttgcggtaagccgccgcagcttccgtaaagcgttcatcggcaaaagtcattccagccagcatcttcaaagcccgatgcgtgtactgattctgtcccgcatcggccagagccgcgagcgtttcgatcgcacgggatcgttcgcccgtcttcaggtagcaatcgctcaagcaatagagcgcatcagccgtataatatcccttgggataactttcgaggtaactgcgtagcgacttggccgccgacgcaggctcgcccgaaagatagatccggcgggcggcagcgaacgaaagcgaatcgcgcgacatggccgtaaggtccccttcgacaccgctcttccgggcataatcgaaataaccgccggcatccccttcggagacataaatatcccgaattccctgcaaggcatccttggcatcggaggattggggcgcggtcttcaccaccatatcatagtaggaaagcgactttttcttgtcgcccaggttcaggtaagccagtcccaactcggacaacgcggcgctccggtagggagaataaacataggtttcgacgaaaggttcaagtactgcggccccctcgcggtagcgctcctgcgctacgaaagtccggcccagttcgtaagtcgcatcgtcgaggtaatctcccctgccgtcgcggataatctgctgcaacgccttgattttttcagatgtacgtcccagaataccgagcgtaacggcccgctggtagcgggcgtaatccgctccgtcatcggatgcggccgcagcctgtccgtaatacttcaacgcctcgtcgaactgacgatccgaatagtaggtgtcgcccagacgattgcgggcatccgtgcggtaaccgtcttgggtgggatacagttcgatgaagcgaacgaacgactcccgcgcccggggcatattctccttcgagaagtggcaataccccgtattgtagaaagccatcgcatattcgggctcggttttcggcgcccgcttcaggtaggactcgtaatcgcgcagagcaacgtcgtaatttcccctgccgtaagcgatttcaccctgccaaaaggttgccagcgcattgtatttgggactgattccgatacgggcggactccgccagataacgcccggccccctgcgtatcgcccttttccagtgcgctcaagccgcggaaataggcgatcttctgcttggcggccagcaggtcgccgtcgggatcgggataggaggcgatgatctcgtacgcttcgtcgtaattgtgcgaattgtaataggccgccgccaacagctctttggccgtgcgtacacggggcgacgacggatactgggcgacatagcggttgagtacctgaatcgcttcgttgaaacgtccgccccccagttcgtattgcaattttccatagttgaacagcgcgtcttcggcaatcgcggaatcgaattcggcattcgaagccatggcgaacgactgcatcgcctgctgcttgtccccgccgcgcaagtaacagtcggccaggtggtaggaggcgttctgcgtcagagcgtcgtcggctccgcacgccttgcgcagatactctgcggcatcgtcgtagcgggccgtacggtagagggagaatccgtagagataattttcatcccggcccatttctccgccggcctgcacgaaagcgtcgaggtaatccagcggtttggaatattcgcccaagcgaaaccacgcttcggccatgacccgcgagagttcggcccgctggcggggcgatgcccggcggatcaactcttcgccgttctcgaccacgtagcggtaattcccctgcttgaactcgatttgcagcaggtaatagggcgctacctcgccgtaagcctcgcttttaagcaatcgttcgaacccgcttctggcccagtcgtactgttcccgcgcataagcgatgtaggacttataatagagagcgtgatcgtaaaattcgctttggggattgatccggtcgaaataggtcatcgcccggtcatagtcatcccggccgaattcgatatatcccatgcgcaggtcgtactgctcgcgccgggttctgtccaaagcccggtagttcacccgtccgaaacatgcgagcgccttgtcatactccgaccggctgcaataaagcaacccctgggcgaaccgcaggtcgttgttgtaaaccgactcgggataacgcttggaaaagtcggcgagcatcgcctcggcatcccggctgccgagcttcaaggcacaaaccgccaactgataatcgatctgctggagcgtaagccggtcgtcccggtccgctccctcgcgggccttcagcaattcataacgggcatctgtccagcgcccgtgatcgaaaagcgaacgcccccgctccagatgcgcccgggtttccggtgccgcagcatggctcccgacacaagtgaacaggcaaatgcctatcgacaataaatacaggatgtttctcttcataacgcacacacaataattcgaacgcagatagcgaacacccggtggtaagtccgacctgttcagcgctgcccgaggcgcttcctgcccgaatcaaaatattttttcggtaaagatagtgaaagccgagagaaaaatggaaacttgttcccaattttccgaggcgcatcctatctaagactatgtcaaagatcgtgaaaggtgagggcaatcgtgcgggcttgcacgcaaagattgccgaaccgcctccgatcttttgcaaagatagtgaaaagcgagggtaaccgagagaacttgctctcgaaaattgccgaaccgaatcctatcttctacaaagatagcgaaagccgggcccagcgccaaatttatttagccccagtcccgtgcattcgttcaaatcggagtcatttcccgtaaagataacgatttcccggggcagacgcaccatttgggaacgattgttgcccgacagaaaagaaaaaagaatcttttcgacgaacgaaggcaaaaccgcccgcatattctgccggataaaaacaaaaaaaagaaaattcaacctaaaaatttatcgttatgatccaacaggtaactatacagatgacttcggcacggacctatgtcctcgaaggaaacaagaaatgcgaccaactaaatcccaaagagctgatgttgctggccggcgtaacttgcgcaggcatgaccgcgatggcgatcatggaaaaggagcgcgtatctccgacccgcttcgaactcagcatatcgggtgaactcgacacggaaaccgtacaatcgagcagcgtcttcaaatctttccgcatcgtctataacgtacaatgcgaatgcgaaaacgaccagatgaaagtaagccgggccatcaacctggcccacgacaaacattgcggcggcgtgcagatgctgcgcaagatcgctccggtagccgacgaaatcgcgatcgtcaatacgaaataggccgaagcactacaaattacgaaaaagcaacgaaagggctgtgtcgaaatgaaagttccaggcacagcccttaaggttgtcagaatggatgcaatgcaaggcattgaaggtaaaggcgacaggaatttactgccgtaaatgactcgcccgctcccgataatgacacaacagtgcgcctttatgacacacggtcttttatcggaaggaatcgcccttccgcatattctctacttccgacaatacccggaacgtctgtcccggtactccgtcaggcaggaaaccggaactcacccctcgcctccgcagcccggagcaaccccggcttccgcgcatagcaccggaaatactgacgcccgattcagtctatgtcccgacagttccgcttgtcggcgattaccccgtcgtcgagcacgacaatacccgtatgagcccgcaacatggtcttgagcgtcgatccatcgatgttgtagcaaggaaccggcgtgcttttcccgaacgaatggatgccgtttccctgcaagggttcgggcgtgatgcagacgacatgcgccccttcctgcaacgcacgctccacgagccgctccaaacgatcctcgcacttgcggccgatgcggtcgaaacgcgtcacacagatcaaatagagccgtcccggagtagcgagcacccggtcggtcacatcttccgcgccattgcgcagagcgaactcctcgatcatcggattcatctccggtacctctcccagaattttcgtatcgacccactcccagaccgtatcgtcctgccactccgtatcatcgagcgcaaactcccgctcctcccccgtcatgcgattgcgataaaccagtacggtctgcaactcgccctcgggaccggccgcagaagaggcgtgcatctcctcgcggatattcaccccgatcttatacggcagaaaatcgatcaacggaagatgacaatagcaatagaaccccagccccatcgtcagaaggaagaaaaaaatcgtcaaagcgacctccgaacggcggaaggcaagaatcttatcgttccggtaataagcccacacgacggccgccatcggcagcaaggccaggttcttgaagaatgtttcccagggggagagtttgatcgcctcaccgaaacagccgcaatcctcgaccgggatgaacgtcgcactcaaaaaggtaaggatcgtaaagaagagcatcgacgccagagcgaagatcgataccagccggatacgcaccttgcaaagcagcatgcaacccatcatcatctcggcgccgcacagccaaatcgaaaagaccatgctggccggaatcagataatcgaacccgtaaatcgtgaggtattcgttgatcttgatcgacgttccccagggatcgatcaccttcgtaaagcccgacacgatgaacacgacggccagcaccaggcggcaaactccggtaatcaggctccgggcccgttgcgacagcataggtttcatcattttcgaacaggttatatacgatcttttcttcattttctccgcaggcatcccgcactcgtccggagtcgttctcatcgttaaaactcaaaacttcccgcctttcggtctgcgtccgagcgtcccgcaaagccgtttcggattgccgactttttccggactcccttttcgctcaacgctccgcatccgtcgggacacggacaaaacgactcatccgcttatcgaatataccgaaccgcccctccgggcacttctccggcatcattcgaaaaggcgctcatctcatacactaattccacgcttcgttttctccacccggcacaatccacacaaattcggctctgccccgcttaccgaaaacgttgaattgacttcttcgttttcttcgctcggcagagaccgcttgcgggctctgccctcgcttaccgaaaacgttctatctcggtgcggatgcgggcgaaaatcgcattgggagagtccatcccgccctgcgcatcgctgcaatcgataatccgcaggcggtcgtccgcagcagcggctgcacggtaaacctcccgcacacgacgctgcaagtcgagcgatgcctcatggatgtcgcgttcccctttcaggtattcgcggtcgtcgccttcgcgtacctcggagagctttttctccgtaaaggcgaaaggcacatccagaaacagcgacacgtccggacggggaattccgtaatagccgaactccaggtcgaggatccaccgccgcagctcctcctgccggtccccggcaggcaatttggcgcactggaaccccacgttcgaatagacataccggtcgagcacgacggcgtggcccgcatcgagccaacagcgcaactgcgcggcagcatcggcccggtcaccggcgaaaagcagagcgaccagataaggatcgaccttgtccacagccccgagttcaccccgcaggaagcgggcgatcagctcgccgtacaccggcgcgtcgaaacgcggaaaatggagaaaatggctctccaccccctcttgggcaaacatgcggcgcacaagttccacctgggtcgatttcccggcgccgtccagtccttccaatactatcagcatatccttgctatttaagcatcttcacggcccgctcgaccccggcgaccagggcgtcggcttccgccagcgtattatacatcgcgaacgaagcccggcacatacccgtaactccgtaatgcgtcatcaccggctcggcacagtgctgtcccgtacgaacggcgatgccgagcttgtcgaggatcatgcccatatcatagggatgcaccccctcgacattgaacgatacgatcgcacacttgtccggcgtcgtaccgtaaatccgcaggccggggattcgctccagcccttcggtagcacgcagcagcagcgcccgttcatgcgcctcgacctccgccgcatcgaactgccggacatagcgcaccgcttcgcccagcgcgatcgcccccacgaaattggccgtacccgcttcgaatttcaacgggacaggtgcaaaagtcgtcttttcgaacgacacccgatcgaccatgtcgccgccggagagaaacgggggcatccggtcaagcaaatcccgcttgccgtacagcacgccgatacccgtcggggcatagagtttatgaccggagaaggcgtaaaaatcgcagtccagcgctttcacatccacaccgccgtgcacgacaccctgacatccgtccaccaccacgaccgcaccgacccggtgagcctcgtcgatcaccggacgcagatcgggccgcgtgcccagcgtattggaagcctgcgtcaccgccaccacgcgggtacgagcgtcgagcagcgccggcaggcgctcggtcatcaggcgcccctcctcgtcgaaaggcagcacgcggatttcggcacccttgcgctcggcgacaagctgccagggaacgatattggaatggtgctccatctcgctgaccacgatattgtcgcccgcccggagaaaacgttcgcaccatgcatacgccaccgtattgagcgacgcagtagctccggccgtgaaaacgacctcctcccgggcttccgcaccgatgtactcggcgatacgagcccgggcagcctcgtacatctcggtagcctcctccgaaagaaaatgaaccccccggtggatattggcattcgactcccggtgcaggcgatcgaccgtttcgatcacgcactcgggtttctgcgccgtagcgccgctgtccagataaaccaacggcttgtcgtacacgcgcaccccgagaatcgggaagtcccgccggactttttccacatcgaacataacgctatattttatccaaatgccggacaacggcatcggtcaatatctctttcacggcctcgatccggcagcgcccgaccacgtccgccgcgaaaccttcgatctgcagacggcgtgcctgttcctctttcagaccgcgctgacgcatatagaggatcgcttcatcctccatctgccccaccgtcgccccgtgactgcaacgcacgtcgtcggcgtaaatttccagttgtggacgcgcatcgatgcgcgaagtgcggctcaacagaatattacggcactgctgctgggcatcggtatgctgggcatccggtgccacataaaccaatccgcagaattcaccgcggccggtccccgaagcgacgcccttgatgagcgaccggctcgtgcagtccgggaccagatggttggtacgcagatcgaccacacagtgatcctgctccaacgcgagaaacagcacgtccaactcattggaagcctcccgtccgttcagatcgaaccggtaacgcacattcgcactggtgaactggcacgccgtcatgcgaaacttgctcccggcggcctgctcgacctgaaaatcgacgaatgcctcggccgagaaaagctggacgagctccgcatccgccccttcgagcagcttgatacgaatctccgcctgacagggcttcgtatgcagtacgaccagccggagtgcggctccgcccgcgacctcgacggtcagtttatcggtatcccgcaccaccagcggacgcgacaggtcgcaatcctttccgaggtgcagttcgcggctcttgaccggctcgaaagccggaccgctgaaaatatcggtccactccatagctactccttataatcgttgataagccagtcgtacccctctttctccaatttgagcgccagcgaacggtcgcccgaatagatgatgcgccccttgtagagcacatgcacgaagtcgggcacgatgtaatccagcagacgctggtagtgggtgatgacaatcgtcgcattgtccgaccggtgcaacttggtgacgcccgtaccgacgatgcgcagcgcatcgatgtccaaaccgctgtccgtttcatcgagaatcgccaacttcggttcgagcatcgccatctggaagatctcgttcttcttcttctcgccgcccgagaaaccttcgttcaccgaacgggaaatcaatttggagtccagttccacgatggcgctcttctcccgcaccagcttcagaaactcggccggcgcaagcggtttctcaccccggaacttgcgctgttcgttcacggccatcttcataaagttggccatcgacacgcccggaatctccaccgggtactgaaatccgaggaacagccccatgcaggcacgctcctcgatgggcagcgacagcagatcctgctccaggaaggtcgcctcgccacccgtgaccgtgaatttctcgttcccggccagcaccgaagccagcgtgctctttcccgagccgttcggtcccatgatggcatgcacctcgccggccttcacctcgaggtcgatgcccttcaatatctcttttccggcgacttgcgcccgtaaattcttgactgaaagcatatctattttactttttttacattcataaacgcaccgccgactccgtttctacccggaaaccggcggaaattcttccgacaaactaccctaccgaaccttccagactgatggccagcaacttctgggcttcgacggcgaactccatcggcagtttattgagcacctccctggcgtaaccattgacgatcagccccacggcatcctcggtcgtaagcccccgctggttgcaataaaaaagctgttcctcggagattttcgaggtcgtagcctcgtgctcgaccactgccgtcggattgccgctttcgatcaccggaaaagtatgtgccccgcacttgtcgccgatcaacagcgaatcgcattgcgaatagttgcgggcgttctccgccgctttcgccacgcgcaccagcccccggtaggagttctcgctgcgaccggccgaaatacccttcgatacgatgcggctgcgggtgttacgccccacgtggatcatcttggtaccagtatcggcctgctggaaatggttggtcatcgccaccgaataaaactctccgaccgaattgtcgcccgccagaatacagctcgggtatttccaggtgatagccgaaccggtttcgacctgcgtccacgacagacgggcgttttcgcggcaaattccgcgtttggtcacgaaattatagacgcctccctttccctccttgtcgcccggataccagttctggacggtggaatacttcacctcggcatccttctcgacgacgatttcgaccacggcggcatgcaactggttctcgtcccggcggggcgccgtgcacccctccagatagctgacataagccccttcgtcggccacgatcagcgtccgctcgaactggcccgtacccgccgcattgatgcggaaataggtcgaaagctccatcgggcaacgcacgcctttgggaatgtaacaaaacgaaccgtcggaaaagaccgccgcgttgagcgccgcataaaaattatcggtataggggaccacgcttcccagatatttctgaatcaactccggatagtcccggatcgcttcggacatcgaacaaaagatgattcccttttcggccagcgtctccttgaaggtcgtcttgaccgatacggagtccattacggcatcgacggcgacacccgccagcgccatctgttcctcgagcggaatacccagcttgtcgaacgtgcgtttgagttcgggatcgacttcgtccatcgacgcgagtttcttggagggcttcggcgccgcataatagatgacgtcctggaagtcgatcggagggatcgtcagatgcgcccacgtgggaggcaccatattcagccagtgacggtaagccttcaggcggcgctcggtcatccactccggctcgcccttcttggtcgagatcaggcgcaccacctcctcattgaggccgcgcggaatggtttcggtttcgatatccgaagtgaaaccgtacttgtactcctgcttctcgatattttctataagttctttatctttctctgccattgtatgcgaaataattatgcaaaattacaaaaaaaatgcaaatccttcccgcccggccgtttttttagccccgcagaaagcccccgcgcatcaaaagcggttaaaatatatatatttgtgccgatttaacaagcaaactccatgcaatccggcatcaaactcatctcgagaatctacctcaaactcgttctgctgcaagtagccgtcggcacgctgctgcgcatcgtcctgctgttcaacgaacagacctccgacatctcgttcactttcggccaatggctgaaaatcttcctgttgggcgccgtgaacgactggtgcgcccttacgatcggattcgccgtgctgtggcttttcgccttgagcatcgccccgggcaaatacgcccggccgctgggctacatcctcttcggcatcctttcggtcgcatggatttacgtcacgttcttcaatacgatcttcgacgaatacggtagcgtggtacctctgatcgcctcgatcctcttcggcttctgggccgtgagtttcgggctcaggctgttcattccccaaatgcgtccgggatggagccgcacctggctcgccgtcctgacgggactttacacgggcggcattatcctgaacgccgtttccgaatggtttttctggagcgaattcggcgtacggtacaacttcatcgccgtcgattacctggtctataccaacgaagtggtcggcaacatcatggagtcctatccggtcgttccgctcttcgccggcgtgctgctgctgaccgtaggatgcacctggctgctgttcagacgggagatccgccgtgccggggagttcggcacctggcaatggaaagcggccgtatcgcccgcctacctgctgctcaccctgggctgctgcctgctcctgcagttcaacacccgattccagcaaagcgccaacacctatgccaacgagctgcaagccaccggagcctacaagttctacgacgcatttatgaagaacgaactcagctatccgcagttctacctgaccctaccgcagaaagaggccgaagccaacgtacacgcgatctacgggagtaccggcgacaacctgcgccacattcccggcaacccggatacgctgtgccgcaacatcgtgctgatcaccatcgagagcatgagcgcctcgttcatgcagcatttcggctatccggacgcgatcacgccccacctggactcgctctacaaaatgggaatcgctttcgaacagtgtttcgccacaggcaaccgcacggtgcggggactcgaagccgttaccctctcgctgccgccctgccccggacagagcatcatcaaacgtccccgcaacgacaacatgcactccacggcggccgtactccgggagaagggttacgatgcctactacttctacggaggcaacagctacttcgacaacatggaaaccttcttcggcggcaacggctaccgaatcatcgaccaaaaaagctacaaacccgaagagatcaccttcgccaacatctggggcgtttgcgacgaagacgcctacgacaaagtgatccgctcgctcggcgagcgggccgatacgaccgcagcgcccttcttcgcccacgtcatgacggtcagcaaccaccggccctacacctacccggcaggccggattccgattccgaacgatgcgaaactgcgttcgggaggcgtcatgtacaccgactacgcattgggacgcttcttcgaagaggccagccgccaaccctggttcgataacacggttttcgtcattacggccgaccattgcgcctcgagtgccggcaaaaccgaaatcccgctggagaaataccacattcccgccctgatcttcgctccgggactcatcacacctcaacaagtagataaggtgatctctcaaatagacctgatgcctacgctcttctcgctgctggggatggattacgactcccatttcttcggtcaggacgcattgtccgacgatttccgggaacgggccttcgtcgccacctatcaggacctgggttatctcgaaggcgacgtattcaccgtactttcacccgtcaaccgggcggaacagtaccggatttcacccacggaggaagaccgctacaacctcgtgctggaggagggcatcccctcgcaggagctgctcgaccgggcgatcagcctttatcagacttcgtcggcgtggaatacccggccgtagatagtcgaaagcgggaacctgcatgatttttgggttgttttattttggaagtccgcaaaattgtcctatatttgcaccactctttgagaaaaaagagggtttggagagttgggtgagtggctgaaaccaccagtttgctaaactgacgtacgggattactgtaccgggggttcgaatcccccactctccgcaaattaagattttacaaataaaaaaggttacgacagatgcgtaacctttttatttttccagagcgtctgcaagcgagttcccgcactccggaaaagtgaaaaagtatccgtgtaaagagcggattccgtttattcatcgactttgcagggactcttccattatgggaaggacgagcggcacgtggtaacacgaagtcaatccccttctctccgcagaacaaaagatacccggatggaccgggaaaacgataaaacaggattgagtttactccgaccctatttttttattcgaacaacgacgtaaagttatcttctcaaccggtgcaaaaagcccacgcacgccaacggaaaaaaaatcaaatccgatcgttgtcattcatctcccggccatagcggattgcctgcgcccggatcctctattcgaagatactttcgctaccttccgataaaatcgggaaatagggtttccaatacaaacgcaggctattcaaccgaaaaacagagggataacctcaacaaaccagatcggataattacacagaccgttccaaaaccaggcttgtcaggcgaaatagcggagacagaagccaatagaacaaaaaacccattggattgcatattaagacacaacaaatgcgtttttcagtcgtaaaagcttgaaatatagacttttttccgggggggggg

SEQ ID NO: 10452 - DNA, 63949 bp, Unknown
  gut microbiota DNA sequence
ccagaggttcggtgtcgtttctgggtcagaaacagagatcccgggtgccgaaaacagaatcgcacacgattcgttctgcggccaacctttagttgctgcgcggtggaaatcacacaaaaaccgcgggggattgtggagtatgcccttttcacaaatacggtacatacttttacacaccgctccccgagaaagcaaacacagggcagcgaatcgatacgccaccgaatcctctcccgacctcaaaagatctgcaagagagttctacggtcggattcggtgggaccggaacaccggtctgctgccgcaggcggaaaggcatcggacctgtaaacaagatcggcagacaaagggcgcacccggagcgctgcaattacgatttcgggacattcggcgggacctaacaccgccttcaaactatgtcagacaaaaacggcgaagagtgctggtatgcactgaaagtattttataatcgggtattcgaactcgaaaaacagctctcgcaggagggggtgaggagttatattcccctgctccgggaggagatagcgacaggatccaaaatagtgcgaaagcgcaagccggccgtttcatccctgatgttcatccgccaaagcgagcactacctgctcgaattacagaaccgattgaaagcgagttgtccgttcatggcctacttcgaccgcgaaacgaaaaagccggccgccattccggaccgggaaatggagctgttcatgcagattacctccaccgacacgcccgacctggagtatttcagcgacgaagcgatcgactaccgttcgggtgacaaggttcgcgtcacgggcggcccgttcaagggagccgagggatacatcaaacggatccggggcaaccgccgcctggtcgtcgctctggaaggcatcatcgccgtagcgacgacctacatcccgggacgtttcctggaaaaaatgcccgaaaactgaccttcgcgcctcgaacaatgaaagttgcacggtaattgtcggaaaacgggacagcggtcctgcgggtcttaaacccgacgccctgttccgttccgaatacggcccgcttcgaaaatcgacagattacaacatacacgacaagagctgacgaacaatcagtcctttgcaaaatatttattctaacgaaccatgtaccgtctgatagaaaaattgcacttggaacgctatctgaactccagattgatccttgccatcgacctggtcgtatcgggggtagcttcgctatgcgcactggtgttggtgagattgctgcttcctcccctctccaacatttcgaaattcgccctgttatggattggctgcgcggtcgtatattcgttcatcacctttttcctgctcaagacctatcggtcggtcatccgccactccacgttgcgggaaatcgcaaaattcgtcgtggcggtcatcggcaaggaactcctgttgggactgaccattctgctctacccgcctacaccgctgttcggtatgcatatgctggctctgctgctgttcgatctgctgctgaccctttgcggcctgatcctgatccgggtagcgatgattatcgtgtacgacctggtcaaaaacaacctgaaatcccgcaaacagcaccagttggtgttggtttacggattaagcgaaaaatcggtatcgctggtcacccgcttgcaaagttctccgcattacaaggtcgtagggttcctgactttcggccggagaatgaaaaaccacaccatcgcggagtgtccggtctattatttcgaaaatgaatacagcattcgatacctccggcaacggtacgacatcgatgccgtgctgttcccgaccaacgaagaggcacagaccgagcaggagcgcctgatccgctactgcgtcgaaagcaatctgaaaatcctgatcgcaccgccgatcgacgaggtcatcgacggcaagatcatgcggcagtcgatccgcgaaatcaagatcgaagatctgctggggcgccccgaaatcaagatttcactggacgaaatccgagccaatttccgagagaaaaccgttatggtcacgggcgctgccggttcgatcggctcggagctgtgccgccaactggcatcgttcgggatcaaaaaactgatcctgttcgacaatgccgaaactccgatgcacaacctgcggctcgaactcgaagagcgcgtcccgaagctggaattcgtccccgtgatcggtgacatccggctgcccaaccggttggatttcgctttccgcacgttccatccccaagtcgtatttcacgccgccgcttacaaacacgtccccctgatggaggaaaatccctgcgaagcggtgctggtcaatgtcatcggcacacgcaacgtcgctctgaaatgcctggagtacaacgtcgaaaagatggtgatgatctcgaccgacaaggccgtgaatcccaccaatatcatgggctgtaccaaacgcctggccgaaatttacgtacagtcgctcgggctggccatcgagcagggaacgatcgagggggccacgaagttcgtaaccacccgtttcggaaacgtcctcggctcgaacggctcggtaatcccgcgtttccgcgaacagatcgccaaaggcggaccggtgacggtcacccatccggacatcacccgcttcttcatgaccattcccgaggcctgccagctggtcatggaagccgcaacgatctccacaggcaatcaaatctgcgttttcgatatgggtaaatcggtgaaaatcgccgacctggccaaacgcatgatcgaactggccggatacgaacccggcgaagagatcaagatcgaatacacgggactgcgtccgggtgaaaaactgtacgaggaggtactctcgaacaccgaaaatacgatccccacgacacacgaccggatacgtatcgccaaagtgcgcgaatacgactacgccgaagcctgcgctgcgaccgaacagctcgaacaattcgccaggatggtaaacgtcccggacacggtttgcctgatgaaaaagatcgttccggaattcaaatcgaaaaactccgaattcgaacgcttcgacaaagtgcagcccgcataaaacataaatcatcactatcctcaataaccatgaaaggaatcgtactggccggaggctccggcacccgtttatatccgatcaccaagggtgttagcaaacaactgctcccgatctacgacaaaccgatggtttactaccccatctccgtcctgatgctggccggaatacgcgatattctcatcatttccacgccggccgaccttccggctttccggcgtctgctgggcgacggatcggattacggtgtacggttcgaatatgccgaacagccttcgcccgacggactggcccaggcgttcctgatcggcgagaagttcatcggcagcgattccgcctgtctggttctgggcgacaacatcttccacggctcgggtttctcgacgatgctccgggaagcggtccgcacggccgaagaggagaacaaggccaccgtattcggctactgggtcgatgatccggagcgttacggcgtggcggaattcgacggaaacggcaactgcctttcgatcgaggaaaagccggccaatcccaaatccaactatgccgtagtgggactctacttctatcccaacaaagtggtcgatgtggctaaaaagatcaaaccttcggcccggggcgaactggaaatcacgactgtaaaccaagtctttctgcaagacagccaactgaaagtccagaccctcggacgcggcttcgcgtggctcgacacgggcacgcacgactcgctggcccaggcctcgattttcgtcgaggtgatcgaaaaacgccaggggctgaagatcgcctgtctggaaggcatcgcctaccgcatgggctggatctcggaggagaagatgcgggcgctggcacagccgatgattaaaaaccaatacggacaatacctgctcaaagtaatcgacgaattaaaacgcgaacaaaaataatgaaagtcattgccaccgcgatcaaggacgtggttattatcgagccgcaggtcttcggcgacgaccgcggctatttcttcgaaagctactcccaacaacagttcgaccaggccgtccggcccgtacgcttcgtgcaggacaacgaatccaaatcccgccggggcgtgctgcgcgggctccatttccaaaagggggccgcagcccaatccaaactggtacgggtcgttcagggtcgggttctggacgtcgccgtcgatatacggcgcggatcgcccacgttcggcaaacacgtcgccgtcgaactgaccgccgagaatcaccgccagctcttcgtaccgcgcggattcgcacacggtttttccgtattgagcgacgaggccgtcttccaatacaaatgcgataacttctacgcgccccagtccgaaggagcgatcgcctggaacgaccccgacctggggatcgactggcaactccccgcagaggaggtgatcctctcgcccaaagaccggacacatccccgcctcaaagatgccgaagaacttttcgactatggaatcgactactatgcataacatactcgtaaccggtgccgacggacagttgggccgcgaaatgcgcacgctcggcgcagcttcgcggcaccgctatttctttaccgacgtcgccgacttggacatcaccgatgcgaacgccgtacgacggttcgtcgaaaacgagcggatcgacgcgatcgtcaattgtgccgcctacaccaatgtagataaggcggaagaagaggtcgaaacggccgaccggatcaaccgcgaagccgtgcggaacctggccgaagccgccaaagcgtgcggcgccacgctgtttcacatctcgaccgactatgtgttcggcggcatgggaaatattcccttccgagaggaggatccgaccgcaccgctgggcgtgtacggcaaaaccaagctcgcaggagaagaggcgatcgtgacttcgggatgcaaacacctggttttccgcaccgcctggctctattcgccctacggcaggaatttcctgaaaaccatgttgcagctcacggccgacaaaccggaattacaggtcgttttcgatcaggtgggaactccgacctgcgccgccgacctggcccgcgtgatcttcgaccgcatcgaatccggcgactatgccggacgggagggcttctaccacttctcgaacgaaggagtctgctcctggtacgatttcgcccatgaaatcgccgcgctggcaggccatacctcctgtaagatccgtccctgccactctgcggaatttccgtccaaggtgcaacgaccgaattattcggtactcgacaagaccaaaatcaaaacgacattcggaatcgacatcccccactggcgggattcgctcgtacgctgtatggcaaccctccggtaagccgaagcgaaccgccgggatcatcccgaacaacaaaaaataaaaacagaaaaagcaaatacatgaaacgcaacatcctcattaccggcggcgccggattcatcggctcgcatgtggtgcggctcttcgtaaacaaatatcccgactatcggatcgtcaatctcgataaactgacctatgccggcaatctggccaacctgcgggacatcgaaaatgctccgaactacaccttcgtcaaggccgacatctgcgactacgacaccatccgcgaggtgttccgcaagtacgatatcgacggagtgatccacctggctgccgaaagccacgtcgatcgctcgatcaaggatccgttcaccttcgcccgcaccaatgtcatgggcacgctttccctgttgcaggcagccaaggaacaatggaacggcaactgggaggggaaacgcttctatcatatttcgaccgacgaagtatatggtgcgctgcaattcgacggcacgctcttcacagaggaaacccgctacgatccccactccccctattcggcggccaaagcctcgtccgaccatttcgtgcgggcctaccacgacacctacggcctgccgacgatcgtaaccaactgctcgaacaactacgggccctatcaatttcccgaaaagctgatcccgctgttcatcaacaacatccgccacggccggccgctgcctgtctatggcaagggcgagaatgtccgcgactggctctacgtcgaagaccacgcccgcgccatcgacctgatcttccacaaaggccgcatcgccgaaacctacaatatcggcggattcaacgaatggaagaacatcgacctgattaaagtcatcgtccgcaccgtcgatcggctgctgggcaaccccgaaggcgagagcgagaagctcatcacctacgtcaccgaccgtgcggggcacgacctgcggtatgccatcgattcgcgcaaactgaaaaacgagctgggctgggaaccctcgctgcaattcgaggagggcatcgaaaaaaccgtgcgctggtacctcgaaaaccaggagtggatggaccatatcacctcgggcgaatacgagaaatactacgaatccatgtataaaaaccggtagtaagcccggcagtgcatgattctgacacacaagacaacccccttttgcaaacatcaataaatctaaaaaacaaaatcaatgaatatagcaatcgtcggcacaggctacgtgggtctcgtatcgggagcctgctttgccgaaatgggaatcgatgtcacctgcgtggacatagatccggaaaaagtcaaatgcctcctcgaaggcgagattcccatttatgaacccggcttggaagaacttgtaagaagaaatgtcgaagccggccggctccattttactacggacctactcccctgcctcgacaacgtcgaagtcgttttctcggccgtaggcacgccgccggacgaagacggttcggccgatctgcaatacgtgctcgaagtagcccggacattcggccggcacatcaaaaaatacacgattttagttatcaagtccaccgtaccagtgggtactgcgaaaaaggtaaaagcagtcatcgaagaagaactcgcaaaacgtagcgaacagatcgacttcgaagtagtttcgaaccccgaattcctcaaggaaggcgccgccgtcaaagacttcatgtcccccgaccgggtgattgtcggtgtggaaaacgaccgggcaaaaaaagtcatggagcagctctaccgcccgtttctgataaacaatttccgactctacttcatggatatactttcggccgaaatgaccaaatatgcagccaatgccatgctggccacacgcatctccttcatgaacgacatcgccaatttgtgcgacctggtcggagcgaatgtcgatatggtacggaaaggtatcggcaccgacagccgcatcgggccgaaattcctctacccgggctgcggatacggcggctcctgcttccccaaagatgtcaaagccctgatttgcacagcccgggaacataagtatacaatgagtgttatcgaagcggtcgaagctgtcaacgagcgccagaaagagatcgtggtcaagaaactgcaagataaacttggaatacttcaaggcaagacgatcgccctgtggggcttggcattcaaacccgaaacagacgatttgcgcgaagcaccggctctggtagtcatcgataaactcctgactgcaggagctgagatcaaagtatatgacccagtcgctatggcggagtgcaagcgcaagatcggagaaaaagtaacctattgcaaagacatgtacgatgcagtgttcgacgccgacgctctggccgtactgaccgaatggaaagaatttcgcgtcccctcatggtccgtcatgcgaaaagtgatgaaacatcccgttctgatcgatggacgcaacatctacgataagcaagaggcgattgccgaaggattcgattattcgggaatcggaaaataaaacgacacgaaacagcaaagacagacaatcaagacagccgcaaggttgagcacaagatatgaatacaaaccgatgcaaaatcattaatctgccaaaaataggcgaccatcggggcaatctctctttcgtggaagagttgagccacattcccttcgccgtgaagcgcacttactggatttacgatgttccgggcggagagttccggggcggccatgcctacagggacaatgaagaatttatcatcgctctctccggcagcttcgatgtagtgatcgacgacgacgcagaaaaacaggttttcacgctcaacagatcctattacggactttatgttcccaacggattatggcgagaactggaaaacttttccacgaactcgctggcactgattctcgcctccacaccgtacgatgtcaacgattatatccgcgattatgccgaattcaaaactttccgccatgcaaagcaacacggtctatgactgcaccatcgtccatttggacaaacaccaccacgccaaaggaaacattaccgtcgtggaaaacggaataaccgttccgttcgatgttcggcgcgcctattacttgtacgatgtcccgggcggagaatcccgaggcgggcacgcccacaaggaactttcgcaactgatcgttgctgccagcggcagtttcgatgtcacgctcgatgacggcaatatcaagcggacatttaccctgaacagaccgtaccaagggctttatatcgtaccgggaatatggcgggaactgaacaatttttcatcaggttcggtatgccttgtgttggcctcgcacccgtatgacgaacacgactatattcgaaattacgaggaatatattcaattaaaaaatgtttgaaattaaaaaatactctcctgctgaccgtaccgcctgggaccagttcgtcaagacctcgaagaacggaacttttctgttcgaaagagcctatatggactatcattccgatcggtttaccgacttttcgcttctgatcttccgcaaaggcaggttgtacgcgctgctacctgccaaccgggttgcagatacgctccattcccatcagggacttacctatggcggattcgtcatgaacgacagggcgaccgtttcggatgtattggaaatgttcggcacagtaaatctttttctacgacaaaacggcttttccaaagtggtatataaggcgattccctatatttacgaccgaatcccggcacaggaagacctgtatgcactgttccgcgccggagccactcaaatcgccggcaatatttcatccgccatctattccgaagaccgattgaaattcaccgaatcgagaaaatcggggttgagaaaggcccgtgcagccggattgcgagtaacggaatccgatgatctcgcaaccttttggaatatcctttccacgaatctggaggataaatacagcgtaaagccggtacacacgctcgcggaaatctccttactgaaaagccggtttccgaaacatatcaaactgtacctctgtctgcatgaggatacccctctgggagggactttagtatatgaaacgggccgagtcgtacacacccagtatatttcggccaatctcgcaggcaaaaattcaggtgctttggacctactattcgactacctgatcaataaaaaatatgcggatattccgattttcgatttcggccagtccactgaaaacagcggatatatactcaatgaaaatttgattttccagaaggaaggcttcggcggacggggagtcatgtataatgtttacgaatatacgatcgagtaattctgcagtgcattcgtgcaaatcatcgcatcgcatcgaatcatgcaacagagtaatattatatcatggaaaaaatcgtactgataggaacggcagatacagcgcgggatgcgtattgctttattcaagactacaaattattcgaagtgatcgcattcgcagtcgatcggaaatacaagacagacgatatgttctgcggcctgcccgtatattgcatcgaagaactttcttcacagataaacaagacggaagtggggcttttcattccggtccaatggaattacctgaaccgccagcgcagggatctatacaccagattgaaaaacgaaggttaccggttcgtcaatgtaatcgccccgaacgccatcatccactcaggaggcacgatcggcgataattgctggatatcggacggtaccgtcatcgaatctttcgttacgataggcaataatgtcttcgtcaaatccaaagcatggatcggacactataccacggtggaagatcacagcttcatcggcgcagcctcgatgatcgcagggaaagtcgttgtcggagaacaatcatttatcggaatcaatgcgatggttttcgatggagtcaggataggccgcaaatgtcttgtcggggcatgtactgtcgtcaaacgctcgctccctgattactcccggatcaaaacggcaacgggcaacagcgaaataaaacaatatgacgaaagctccatcgaagagaaactggtcgccgctaaaaacatacgataaaaaatggttaaatttttagatttgcaggctgtcacggcaaaatatgccgacgaaatccacacagctgtcaaccgagtcatcgattcgggatggtacttgcaaggagtagagaaccaacatttcgagcaaaattatgcacggtatatcggaacgcgctatgcggtgggctgtgccaacggattggatgcgctgatatggattttccgtgcctacatcgaaatggggataatgactccgggtgacgagatcatcgttccggccaatacctacatcgcctccatcctggccattacggaaaacggcctgactcccgtattggtcgaaccccggctcgatacctatcaaatcgacgagcaagagatcgaaaaggcgataacgccgcgcaccaaaggcgtgcttatcgtacacttatacggacaatgcgcctatacggaaaaaatcggcgaaatttgtaagcgacacggggttaaactcatcgaggacaatgcacaggctcacggatgtcggttcgccgggaaacgaaccggttcgctgggcgatgccgccggccacagtttctatccagggaaaaacctcggagctttcggcgacgccggagccgtgacgaccgatgacgacgccttgaccgaaacgatacggacgttggctaattacggttcgtcgaaaaaatacgtattcaaatatacgggacgcaacagccggttggacgaaattcaggcagccgtactcgatgtaaaattaagtcatctcgaagaagacatagcggcccgaaaagatgtagctcgctactatatcgaacatattcacaatccccgaatcgtactgcccactatcgaggactgggatgcaaacgtattccatatttttcccgtgcggtgcgtcgagcgagaccggctgcaacaatatctggcccaacgcgacatccagacgatcatccattacccgatcccgccgcataaacaggagtgttacaaggagtggaacgaattgacgctccccattacggagaaaatccataacgaagaactcagcttgccgatgagtccggtaatgaccgaaaaagaaataaaagaagttgtcgaagcaataaattatttcaaataaagaattgaacagccgtttccgacggcttcatcaggcatgggtatcgagagtcgcaccgtagaaaaagagggatacaagaccgcattcaaggcaaccgccctgttcggcggagtgcaggtcgttatcatactcatccagatactcaaggcaaaagtcgtcgctctctggttaggggcgtcaggactcggaatcatgagtcttttcaatgccgcgacctccctgatattttctatttcgaacttgggattacaggagagtgccgtccgggatatcgcctatgccaaaggcagcggagatgaaaacagagtcgccggaaccataaaagcgatcaaccgctgggtaattgccaccggatttttaggtgcagtcgttacgatcgccctctcgccctggttgagtgaatggatattcgaaagcgacgcatatgtcaccgctttcattctgttgtcgtgcgttgtattcctgatgggaatttacagcgccaattatgccacactgcaaggcactcgaaacctgaaactgatggcccaagccaatgttttcggagccatctccggtttcttgtgctcgttgccgatgttctattttttccgagatgaaggcattgtatgggcactgatcctgactgccctatccacgaccgcagtcagcctattctacgtaaaaaaggcctatattcccaaagtcgatcagactttcgccgaaagctaccggattggactgaaagcggttcgcctggggatcatgctggctttaagcggaataagcgtcacattggtgcagttcgccataaagacttttatcgttcgaatgggaggactgaacgatgtcggactctacgaagccggttgggctctcaatacgacctacctcggactggtttttaccgccatggcaaaagattactatccgagattgtctcaaatcgccggtgacaatgcccaggtaaaagtgatgatgaatcaacagaccgaaatcgcattggtccttttagcaccattgatcatcatcatgattgttttcatgtcatttttcatacggttattatactccgccgaattccttgccatcgtaccaatgaccaaatggctgcttatcggcgctttagtccgggccggagcttggggaaccagtttcgtattcctggccaagggtgacggaaaattatttctgttcaatgaattgggaattaaaataatcacattaccctcctatttgctatgttactattggttcggattggtcggcatcggttatgccaacgtgttcaatttcctgatatattttctgtgggtcggcatcgtagcatatcgcaaatataaaatatcgtacagtccgattttttggaagttgttcattacgttcctatccatcatactgctttatccgatcggagagcagctttggaatgcgaaatacctgacaggcatagcaattactctctgcatctgcggactttccctgtatgaattcaacaaacgtatcgatattcgggacttttgggcgaatatcgtatcgagatttaagagcaacaagcaatgaatctaacaaaagagtatatcctttcatgttacgataaaacgaaacgtctggcaaaaaaatcgttcgaaaaaggacgatacaaccgatccctaaagtacataaatatcgcagccagaatcgcataccaattcaactggatctaccgggacgatgacctggaggagcttttggcaaatatctcgaagcaaacaatttcgaaacggaatcattatacaccgatagaaaaccgctatgtattatacgtagcttccatgatcgataatagaggtgagatacaacaatatttgagagcattgatagcctgcgaaggtgaactgctagtgatcgtagagaaatacggaaaagaagccgctgcaacgatcgcagaaatcaaggcttatccgaaagcaaaaatttatgcattgcaaggcgacgaaaccgatgtagaatctaatgcgcaaaaactctatgacaaaatagtaaatttccggccttcgaaactattcatgcacttacgccccgaatccggttttgcgatcactgttttcgacgctttgcccgaagaaattatcaactaccaaatcaatttaacggatcatgccttttggctgggatgcaaatgtttggattatatcttcgaatttcgtccttacggttgtaccgtgtcgcaggaaaaacgaaaaatcgataaagataaaatcctattgcttccttactatcctattttgaaccatagagattttcaagggtttccttcatcttgtaccgcagacaagatcatcttgttctccggaggagaattgtacaagatatacggcggaaacggattgtatttcaagatcgtcaaacatattctcgatgaaaatccgcaagcaatcctattgtacgccggagatggagatacaggaggggtaaatgcctttattgcagaaaacaaatacgaaaacagattcattcttttgggattccggcaagatataaatgaagtattcaagcactgcgatatatatctctgtacctatccttctgccggtggacttatgtgccagtatgctgctgtgaacggcaaacctatcctagcttataatgaaccgaaagcccgatcgaagtttatcgaagatcttatttgcgtcaatgcaaatgtccaactaacatttaccgatccaaaaagattgactgaagaagccgggcgcttgataacagacaagacatatagaaagaaaaagggggcagaattacaacatgcggtgatgacccaggaacaattcgaacgagagttcaaatcaataatcaattcgaataaaaatcgacgacaatacgaacaccaaaacatagactacgatgctttttttgcgcggtatcttgaattagaaaacgaacatacggatactttcaagcttcttatcatcagaaaattcaaattcgcaacattgaaatattttccccgaatgaccgtatggttcatcgtatatatgttaagcggcaaagggttcaaattcgtcatcaaaaggaaagtaggtcctttcttgcacaaacaatataataaactaaaaacaagatatgaataaaaccgctattcataatatagcaattgctatactgactcttcctgtgtttattttatccgttttcaagccaatagtcaaggtattctccaaactttcaaaaatattctattcccaatggaagagaacggaattcaaaacttgtcctcgcaacgtaataattgaatataaaatagaagtcgggggggggaataatatttctatcggtaatcacgtcagaataggaaaagacgtaatgctctatacgcatccgcattataatgaacaagaattcacaccatcaataattataggggataactctcgtatcggcagacgctcacatcttacttcaatacaaagtatttgtatcggtaacggtgttaggatgggaaatgatatctttataacggacaatgcacatggaggaggtgataatatagtccatcaactagatatagctcccaatttacgtcctctgtactccaaaggtcccgtcataatcgcagacagagtttggattggtgataaagtaatcatcttaccgggggtgagtataggtgaaggagctatcgtcggtgcaggggcagtcgttacgcataatattcctgcttacagcgtagctgtgggtaacccggcccgagtcgttaaaacgttaaaataaatctgtaaaaaataacccgatgggaacagggatatcgaaaataaacagttataatatagaattatggatttttgccatttgtctggtattatccattcctccttatttcctttggcaactgtcgtctccctattttgtaataggatgcctgttaattgcagccaaacatgccaaactatccgaccgtactgcgaacgatatgtttttcatgtttttattgactggtatttactttttttacggatttctcaacagtacttctttacaaggaaccctctatgtttgcctgattcccattctattttatgccgacagaaaattcctgacagacgccttcgaaaaattcgtctatgttttttcaatcacattggccttttcgataatccaattcatactggtacagattctcggtatttctatgcccgccaaaagtatccaaccgttgaataaagccaaacaagccagttatctggcgtacactttttatgttaccaccaatcagtggggagcggatattttacctcgttttttcggctattacgatgaacccggcgtagtcggcaccttatccggtctaatattgatgaccaggaaattcaatctgaagaaactcataaatattccgatattcataggcggcctgctatctttctctctgtttttttatgtgatcgcaattgcctatactctgatattcgtattatccacaaaaatcaagtatatggtgctcactcttatcttttgcggaatattatacggtttttaccacaaatattatcaagataacgaggtcatcaaccgatatattatttccagaatggaatatgaaaacggcaatttcagtggcaacaaccggactcatggcggtatggatgcttggtataaaacctattttgagaattcggacgactactatttcggtttaggtgccggtgcaagtcaaatatacaacccaggcggagcatcctataaagatattatcataaattgcggaatcgtattttttgcggcatatatgggaatatttaccctttttggattttacaaccttaaattctcgaaagaatttttgctgtatctgataatgttatacgggaccatattccaacgaccattcatagactctttcgtatatatattccttttatatatcccggtaatttatctgataaataaccaaaagagggaaagtatcagcaactaaattccaatataaaattacacgatggatgtttcagtcatcatagtaaattataatacacggaaacttaccggcgaatgcattgacagtatattcgaaaaaacatcggggatcactttcgaggttatcgtggttgacaacgcttcgcaggatgatagtatagaaatattccgaaaagatccacggatcatcttcattgaaaacacagaaaatcagggattcgggaaggccaacaatttagggatcaagtatgcgacgggacgaaacatactgttcctcaattccgacacactcttaatcaacaatgccttgaaaattttatccgattacttggacaacaattccgatgtcggggcgtgcggaggaaatttgtacggagaagaccgtaagccaatagtatctttcgaacaaaaccgcccatccatttacggatatatagacaacatatttctgaacggaatatcgagattgcgtttcggacacagcataaagttcaattacggtaataaacctttgcaggtatcttatattacaggtgccgacctgataattccaagaaagattctggaaaaggtcggcggtttcgacccaacatttttcatgtattatgaagagatcgaattatgttgtagaatcgtaaaagcaggatacaaaatcatgtccgttcccactgccaagatcgtccatttagtgggtcgcagctgctgcataaacgattggggattgaaagtacgtgaacaaagccggcgtatatatctcaaacgaacactatctccgataaaagccagaatagccaactggctatattatctgttgataaatacgcgcatcattgaacattggatcgccggaaacaacgggaaaacagcccaatggattacgacccgaaaattattttggaaaaaagacgacgaaatatttcaatagtccaatactgaatcacggttaatcgaagtcgtctaattatcaagcgatgaaaaaattcctcaaaatatttcttatacatcggcctgttctccctgcagtcatattatctggattccgcccggtgtaatcaaagctgggaataaagtaaatgcaacgtgtcatttgagttgaaaaagattcgaattcaagaagtgttcccttgatatagagatcgccccgacaataaaaataatcgaagagaggaaaatctcgtcaatcactgggtcgctttccaccgttacgccgttataaatacatggtcggcatataacggcgagtccaccggattaccggcctgcattataacgatcaaaaatgactgcaacatcggcaaacggacacaattcaaccatgaataagataacgcaccgaaatgaaacgttattgagtaaagattgacgatttccgacaactcgcacgatactgtcaacaggagggcaaccgacactttaccgtataaaggaaaattattttcaaaaactctgtatcaatcggaaataaagcaatcatcttaccgaatgtgtaaaccgtaatcggtgccggaatgtagtaaccaaagatgtgcctgccgtactgtattacctacggcaaaccagtcaatatcataagaaattgttaaagaatgagtaaaaaagcccgtgtaatagcattttatttacctcaattccatcctgttccagaaaacgacaagtggtggggaaaaggattcactgagtggaccaatgttggtaaagcccgacccttattcaaaagccattaccaaccgcgtgttcccgccgatctaggatactacgacctcagaatggccgaggtccgggaggcacaggcccaaatggccaaggaagccggaatcgaaggtttcatgtactggcattactggttcggaaaagggaaacgacttttggaacgcccgttcagcgaagtcctggaaagcggtagccccaattttcctttctgtttgggctgggccaaccatacatggaaaagtacgacctggagggggggggatatttaagtattagcacgcccgagattttaatagagcagacatacaaagaagaagagtatgacgatcatttcaacgacatgctgcccgctttcaaagatccccggtacatcaagatcgataataagccgatctttataatatatgatcctaaagcattcgacgcgcggcgattcatggacagatggcaagaattggccgcaaataacggaataggccggatttatttcatgggattctcctctggggttacaggaagtgaaacccataaaattctggagatgggtttcgatgccgtcgtaacaggaaataacctgcgggcggaagccaagattcggggttcattcggatacctcgtacgcaaggcaatcaaccgaatgtgcttcggtatgatgctagacaaatacaaatatcaggacatcatcaagaactattttacagaggacgatcacttggaatgcgtttttccggctgtaattcccggttgggatcgctccccgcgcgcaggacgacgagccacgatctacacgggtgctactccggaattgttcgcaaagcatctgaaagaggccgtaaaaatcgtatcagaaaggaaatcggacgagcataagataattttccttcgatcgtggaatgaatgggctgaaggcaactacgtggaacccgatttgaaatacggtcacggatttctggaggccattaaaaagaatatcattgaatgataacaacactctggaccaataaaaacgattcaatatgaatgttgaaaaactaatcgccctcctgcccatgaagggccactcggaacgagtaccgaacaagaacatgaaaatgttttgtggcgagccactttatcatgctgttatgaaatcgttggaggcatgcgactatgtatcggaaatcgtcatcgacaccgatagcgacataatcgcagaagatgccgtacgaaacttccgcaaagtaaggatcctgcgccgcccgcaagaattacaaggcgatttcgtatcgatgaacgaaatcatcaattacgacctaacccgtcatcccgaggaaaaacattttctgcaaacacactctaccaacccattgatttcatcggcgacactgaacgcagccattcaacgatattttgcagcgctgggcgaagggtacgactcgctgttcggcgttacgaaattccagtctcgtttttactgggcgaacggctcggccatcaatcacaatccggcggaacttatccgcacgcaagatctgcctccgatttacgaagaaaactccaatttctacattttctcggtcgattcgtttcgtgccgcaggaaacaaaagaatcggattgcatcccgaaatgttcgcagtcaacaagctggaggccatcgacatcgacgacaaagaagattttattttagcggaaacactttacgcaaacagaaaataagcgagaattatgaataacctgaaagaaaaattaaagaagaacttgccgacgatcggttcctgggtgaccatcggccatccatcgatcgtagaaataatggcaacagccggtttcgaatggctgaccattgacctcgaacacagcgctatcgatatctcaaaagccatggagcttatcacggtgatccaagccaacgacatggcggctctcgtacgggtaagcaaaaacgaagaggtcgtgatcaaacgggtactcgacgccggagctgacggcgtaatcgtaccgatggtccgcacagtagaagatgcacaacaggccgttgactacgtgaaatatccgcctttcggaaagcggggcgtcggactatgccgcgcacaaaaatatggtatcggatttgaggagtacaaggcatggcaaaaggacggcacaataatcatcgcccaaatcgaacatatcgactcggtccacaacatcgacggaattatcaatgtccccggcatcgatggcactatcgtaggcccgttcgacctgtcggcatccatgggcatgcccggcgagtatgacaaaccggaggtcatcgcagcattacggcatgtcgaggagcgttgcaagtttttcaacaaacccctcgggttccatgtaatcgacccggaccacaagctgatcgaggaaaaactgtcccaaggatacactttcctggctttcagcctcgacttcttctacctcggcaataaagcccgtgaacaaatggcattattgaaacattaaattgcaaagaaaatgaaagggaaagtcgtgattttcggcggtgccggttttattggctcctatcttacggaggaacttctaaaaagggaatattccgtcatcgtagccgatatcaaacagaaccagtacacggaaaaagcggagttcgtctattgtgacatcacttcgcccgagcaaattgcacaggcgattcccgagaacaccgattatatttataatttcgcaggattcgccaatctggaacgctcggtcaaacatccggtggacaccgtaaggctcaatatcatgggtaatctatacatacttgatgaattacgccgtcgcaacatcaaacgatatgtattcgcttccagcgcttatgccctcaacgacaaaggttcgttttacggagtttccaaactggcttccgaaaagctggtcgaggagttctaccgacagtatggaatcaagtacaccatccttcgttacggttccgtgtatagtgaacgcgacttcgacaataactacatctactccctgatcaaaaccatcatcaacgaacacaaagttgtccacacgggtgacggaaacgaaatccgagaatatatccatgcttcggacgtcgcttcgatggccgccgacgtgatcgccagcgaggagtatgccaatcaatacatgattctcaccggagtggagcgtatgaaacgcaaggagcttttcgagatgattcgcgagattttgggtgaagacttcgaagtaatactccaaaattcaggttacgtaaaccattaccggatcactccctactctttccagcccacaatgagtcgaaaaatggtggccaacacctacgtcgacatgggtcagggaatcctcgaatgcatcaagcaagtgtacaaagaaaaagaaaatgacaagtaaatgggttttcctctcgtacccgttatctaacgtgctgtccgcctaccggaatggcatgcgcattgaaatatcgtccgattcggcgatcggccggggcgacgcgacgaataattcgacaatccgcatgagctcccacttcgggactcatctggattttccgagtcatttttttcaaactggggcacggagtgaagattactctccggagttttttcttttcacgcgtgtgggatacatcgacgctgttcccggtccaggttcgcctcttgtttcagtaaccgatctcgaaggccccctatgcggaatggatgaaaatatcgaatgtctcgtgatccggaccggcatgggtttttatcggttcgacgacaaatactggaacgacaactacggattcgacactggggttgcctcttatttgagaaagaagttcccgcacctgcgcgtgctgggcttcgacctgatcagtttgagttgcgtacatcgccgcgaaaccggccggatcgtacatcgggaattctttgaaaacggaatactgcctttggaggatatggacctgcggcaactgaacgacagctctatcgagaccatgattctctctcctttgcgtgtaacggggacagaagcggcccccgtcacggcattcgcaaaaataatatcgaaatagaataatgataaaagcaatcttttgggatttcgacggtgtgatcgcggaatcagtaaatgtcaagaccgaagcgttttacaatctctacctgccctacggaatcgaaattgcggaaaaggttcgccgtcaccatctggacaatggaggtatgtcgcgtttcgaaaaattccgctattaccaaacccgacttctgggtgagccggaaccggtggacgaaaaggcaatcaagaaattggccgcacatttctctgaattggtactggagggcgtaatcaatgcgccgtttgtaccggatgtcgaaaaagttcttcgggagaaaagcgggaaaatggacttttacgtcatatcgggcactccgaccgaagaaatgcggttgattgtcgaaaaacgcggtctcacgtcctgtttcaagggtgtattcggctctccggaaagcaaatcgcactggtgcgcggcattgcttgccgaacacggttaccggcccgaagaaaccctattcataggagatgcgaagagcgactacaacgcggctcgggagaacaaactgaccttcctcctgcgccgccataacgataacaaagagattttcagcgattataacggactcgccatcgaagatttcggcaacttcgatactgtccttgactggattaacaacgaaaaacaatgaaaatactactgacatccacctctttcatggatacccccggtccccatcacgaccgactgcaagaactgggcctcgaagtggaccgtatgcgcggccctctgccagaaaaggatttgcttccgattattgccggatacgatggtatgatctgcggtgacgatgagctcaacgaacgggtactgacagaaggagccaaggggcgcctccgttttttatctaaatacggaatcggtttggataagattgacctaaaagccgcagaaaaattgaatatattgattgccaatacgccgggagtgaatcacatcacggtggcagaacatacgtttgcccacatcctggcattctaccgcaattattttccagtagtaagcggcacaaaaaccggacagtggaaacgaattaccggacatgaaatttccggaaaacggctggccgtcttcggtttgggacgcatcggcaaggaggtcgccaaacgggcgaaagcattcggattggaagtctgcgtattcgatccatttcccgacatggattttatccgggacaatagcttagtactggccgatagtcctcaagagcttttccgagatgccgatataatcacacttcattctccgttgactgctgatacacggcatatcataggtgagcaagtgttccaaaacctgacgaggaaaccactgatcgtcaatacggcacgagcgcatttggtggacaagaaagctttggtgcgtgctctcgataacggctcgattgcaggatatgcgaccgacgtaatgtgggaggaacccatgccgccaacagaatccctgttcagatacgacaatgtttacataacaacccatatcggttcgcggactttcgaaagcgtatcacgtcagggttgtgctgcagtcgaaaatctggccatgttgctgcaaaaacttccacaaaacagaaactgaataaaaaaataaatgatgaaagctgtttttttcgatgcctgtcctaccatgctggcaaaaaacggattgcctatagccgaaatattcaaaactaaagaacccgatttctctgctatttttgtttccgccgatgctgccagtcaaacggacccggaaatggaacggagttccgaaaacaaaataaccaaagacaacagatatcgtttaatccatttcaaatcgttcaacagaaaacatatcgaaaaatttttgagaaaagaggcgcccgatctatttttcgtcgatgcttttcgtatctatgatcaactgtggatcagtatatgtcacaaactgggtatcaaagtattcagccaacaacacggatttgaaatcgactccgtattctacaagccagcagcaattatcagcaaatataagaagctcatgcgcttcacggtagctgcttacaacctggcccggatttccgacacctctttccttaaactctattatcaatactgtcgatatatcgtaaaaggcacgccactgcgacagacgctactggccaacccagattttcaaccgaccattgcattcgtatattcggagtattacaaagagttctggcaacgcaaattcggattcgacaaaaaccgaatggaaattattatgccaacggatttactattggtgaaaccggtccgcgaacaaccgcaacaagatgcctgctgttacatcacccaaacgctggttgaagacgcacgaatgatgcgaggagacttcctggagttgctcaaaagctacagggaagtcgccaagtcagtaaaaaaattcattatcaagctccatcccagggtgagtcccgaaatatatgaagaaattttcggcgatctggacaatgtcgaaataacccgcgactttcccaattgcaaattctatctgacccactactcttcaatggcctatgcagctgctttcgtctccaacaatgtcatcctgcatgaattgccgggacatcctactcacgagctattccgagcagtagccacatcagtcgtacattcttcaaaagagatcatcgattacatcaaatcccatgaacaggataccgacttggcaaaaatcgaggatcgagtgaaggctctggcctactataccagttacaacgacgcggaacatccatacgatgtaatgtataaaacagtgaagaaagccgtttcgagaatttagccacaggaaaataatcccaggaaattatggcaaagaaatattccgcatccggagaaaatcgggggttatccgtcgattcgaagtcaccgctttccgatacggagaatctcgccctccgaatccttttgtccctgcttcgtgccggattacagacaggctccggtacggaacagttacccggtgttatcgaagaggcgcagtggaacgaagtctatcgcatggcttccaggcacggcattctgggaattatctgggacggcatacgcaacttgtctgccgaatccctgattccgagaactttgaaactgggttgggcctacaataccgaaattatcggtcaaaggtacgaccggcagaaaaaaacggccatagaaatggcggaactgcttgcccgggaaggaatcagtgtactcgttttcaaaggattgagcatgagcatgtattatcccgtgcccgaacaccgtgaatgcggcgatatagacatctggctcttcgggcaggcagaaaaaggaaatcgggtcgcaaaagccgccggagcgaaagtcgagaaggaaaattccaaacacgacatcatctactttcacggtgtccccttcgaaaaccacaaagaactgacctccgagctgctgaatagtcgcaatcgactgattaacaaggatcttatcactcgcgtaaaagacgatcgcacacaacctcttttcgctacggacacactgcgcactccgtccagggtcttcgacgaactgtatattccggtgcatgccgcaggacattttgtcgtcgaaggcatttcactgcgacatctttgcgactgggcgctgatcgttcaggccaacggtggaataaagagataaattcgccctttcccgggtccattattaacgagttcaacaatcattctctcactatgaaattgcataatatcccattttcgccaccggacatcggtcctgcggaggcgcaggaagtcacccaggccctcctttccgggtggatcaccacgggcccgcgcaccaaagagttcgaacgggaaatcgccgcctattgccatacggaaaaagccgtgtgcctgaactcggcgacagcctgcatggagatgattctccgcgtactgggtgtcggccccggagatgaggttatcacttcggcatatacctatacggctaccgcgagcgtcacctgccacgtcggagccaaagtcgttctggtcgatacggctccgggatctttcgaaatggattacgacaagctggccgatgcgatcaccgaaaaaaccaaagtcgtgattccggtggatctggctggcatcgtctgcgattacgaccgtattttcgcagcggtcgaaagccgcaaacaactattccgccccacgaacgaattgcagaaagccttcggccgggtcatcgttcttgcggatgccgcccacgctttcggagcaaaacgtgcgggccgggtctgcggcgaaatcgccgatttcacctctttctccttccatgccgttaaaaacctcactacggccgaaggcggggcccttacgtggcgtaatattcccggcatcgacaacgaatggctttacaaacaattccagctcctttcgctgcatggccaaagtaaggacgccctggccaaaacgcaactgggagcctgggagtacgacatcgtttctccggcttacaaatgcaacatgacagacatcatggccggtatcgggctggtacaactcaagcgctaccccgagctgttaaagcgccgtcgagaaatcatcgagcgttatgacaaggcgttgcgcaagctcaacgtacaggtactcgaccactacggttccgctcacgcttcgtccgggcatttatacctggtgcggctactcgggaaggacgttgccgaacgcaacgatttcattaccaggatggcggaacgaggcatcgcctgcaacgtccactacaagccgctgcccatgatgacggcttacaaggcgctcggcttcgacatcgaggattaccccaacgcctatgacatgtaccgcaacgaagtaactcttccgctgcatacccgcctgacggatgaagatatcgactatgtccttacgaattttaccgaaatcctgtccaaataaacacaccgcttgaaacgcacgttcgatctcatagcaagtagtctgggtttactgttattgagccctcttttcctcatgctcgccatttggatcaaaatcgattccgaaggtccggttttttaccgccaggtacgtgtaggaaaaggaaaccgggattttcgattattcaagttccgctcgatgcgcgtaggttccgaccaaaaaggacttatcaccgtcggaggacgcgatccacgcgtgactcgttcgggatattacatccgtaaatacaaactcgacgagttgcctcagctcatcaacgtattcatcggcgatatgagcctggtgggtccccggccggaagtccgcaaatacgtcgatctttatacccccgagcagatgcacgtactcgacgttcgacccggcattacggacctggcttcgatccgctaccgcaacgaaaacgaactgcttgcacaagtcgaagatcccgatcgctactatgtggaagtaatcatgcaggataaactgcgtatcaacctggaatacgcacaacatcattcgttcgcaggcgatattcaactgatattccggacattccgggccattttacgatgaacgatctcacaaataccctccttcagttattacgtgcagccctcgagccgaccgtatcaccgccttctatcccccgcctgacggaagaggactggaaccgtctttttacccttgcggcccaacacggcgttacggccctgctcttcgacacgattctccggctcccggaacagcaacagccctccagagccctcaaaatccgttgggccctgagttcggaagccatcgagaagcgccatgcccaacagacccgtgccgcacacgaactgacaacgctcttcgcttcgcacggcgtccgtacgatccttttgaaagggctgggcctcagcatttactacccccggccggagcaccgcgaatgcggcgacatagatctgtggctcgacaactgcgacaagggcaaccgtttgatcgaagagctggggattaaaatcaattacgatagtgaaaaacatgccgttttccattacaagggcgtcatggtcgaaaatcacagccatctgcttatgccgtcgcaccgccggacggagcgtgccatagacgattttctcgtgggtgaagcagagaacagccgattagcgccggcgggctattacaccccatccccgatgttcaacgcactctatctgctgcgccacatggcccggcatttcgggacggaaggcatcaacctccgacatctgctggattggggccttttcctgcgcagcgagcaatcggaaatcgacttcgagaaaatccttacgctttacgctgcaaccggttacgacacggtctataacattttcacggcattggccggcgaattgctcgacgaggatttcacaccgctgctctctgccgttccggatccacagctcaaacagcgggtactgaacgacattctcggcttcggagtgtaccgcactccgtcaggtaaccgcctgacccgtatcggccggaaaacccgcaaactcttctcatgccgctggaaataccgcaccttactgcccgagaatttttggcgggacgtaatcctgccttcgctcctgttccacctgaaaaatccgaaaaatatctgaatcgaagcattccgcacgccatcggcagagcagaaccgcatctcgattgccgcggaagggtgttcccatatctgcacgaaggacatctgcaaccgcctgtcgaaaaagtccgctcgtttcgtttttccgtccgccagggaggtagcctgtaaaatccgattgccataaaaatatgaatcgaacgacagggagtcaaagactccctgtcgttttttcctccgataagaaccttctacttctcttttttcttatcttgcgatcgtataacagaatcctgaacaatatgcccatattcactcctccatcccctgccttgcaaaaagcctggtggaaagaaacgatcgtctatcaaatctatccccgcagtttcaaggacagcaacgacgacggtatcggggacctgaacggaatcaccgaaaaactcgactacctgcatgggctgggaatcgaaaccctgtggctcaatccgatcttcgcctcgcccaacgccgacaacggctacgacatcagcgattaccggcagatcatgcctgacttcggcacgatggaggatttcgaccggctcctgaaagaaacacacgcacggggcatgcgtcttctcctcgacctggtgctgaaccacaccagcgaccagcatccctggttccgcgaggcccgcacctcgcgggagaacccctactacgactactacctctggtggccggaggaacagggccacccgccctaccgcaagagccatttcgacgagaagggcgatgcctggtgttacaacgccccgacacgctcctactacctgcactattttgcccggcagcagcccgacctcaactggcaaagccccaaggtgcgggccgaaatctacgacattctgcgtttctggctcgacaagggggtcgatggattccgtctggattcgattccctacatcgcaaaagacacgtcgtttccggagatcgaccttcgcaaatacccggacgtatttccctattactcgctgggaccgcacctgcacgactacctgcacgaaatgaaccgcgaggtattctcccgctacgactgtacgaccgtcggcgaaggctcgaaaaccgcccccgaagaggggtggaaattcatcgcacccgaacggcaggagctcgacatgctctaccacttcggcgcggcggacatccgcaacgaaacggaggcggacgatcccgcaaccggtatcccgtacagcctgctcgccctcaagcgtatgtacgccgaatgggacgcagccgtaggcgacggctggcctacgatctatctgggcaaccacgaccagccgcgcatggtttcgcgcttcggcagcgacgcccccgagtggcgcgacctgtcggccaaaatgctcacgatgttcctgctcacgatgcggggaaccccctattggctggccggcgacgaactgggcatgaccaacatccgattcacccgcatcgaagagtacgacgacattgacacgcgcaaccactaccgcaaactcctgcgggaaggcggcgatacggaacaattcctgcgcgagcagcaggaaatcggacgcgacaacgcccgcacgccctaccaatgggatggaacgctctacgcgggattctccacggcgaaaccctggcttcgcgtcaatcccaaccacacggaggtaaacgccgcccgggagctatgcgaccccgattccgtattgaacttcttcagacgggtcgtaacgctgcacaaagaacatccggacctggtttacggctcgttccggctggtcgatgcagacaacccgcaggtattcgcctacctgcgggaagggacaggccgaaactacctcacagtcctgaacttcagcccgaaggctgcccggttcgacccgaaaacggatttgaccgaagccatgccattgctgcataactaccctgccccaccgatagccgaaaaagaaggcccgatcgaactacggccttacgaagggatactgtaccggctcgcataacagcgaaccgcaccgaagctgcgtttaacccattccgaacgcccccacaagtaaaggccggccgccaaactcccgccaaagaaccgacattttacaaatgcaaaagacggaaaccgcagggtttccgtcttttgcattttcgacctaaattcctattcccactcgatcgttgcgggcggcttggaagagatgtcgtacactacgcgattgaccccgcgcaccttgttgatgatgtcgttggacaccgcagccagaaaatcgtacggcaggtgcacccagtcggccgtcatgccatcggtcgaagctacggcacgcagcgccacgcagctctcgtacgtgcgctcatcgcccattacgccgacgctcttcacgggcagcagaatcgctcccgcctgccatacctggtcgtaaagtccccactcgcgcagggcatcgatatagattttatccacattttgcagaatttccaccttctccggggtaatatcgcccagaatacggatcgcaaggcccggaccggggaacggatgccgccccaacagctgcggatcgatgccgagggacttacccacgcggcgcacctcgtccttaaagagcaggcgcagcggctcgacgattttcaggtgcatctcttcgggcaggccgccgacgttgtggtgcgacttgatcatcgcggcaggtcccttgaccgatgccgaagcggactccaccacgtcgggatagatcgtaccctgcgccagccactttacgttctcgatctgcttggcctcggcattgaacacctccacgaaatcgcggccgatgatcttgcgcttcttctcgggatcggtcactccggccaggtcgcccaaaaaccggtcgtgggccttgacacccttgacattcaaacccatccccttgtacgattcgagcacgctgtcgaactcgttcttgcgcagaagccccgaatccacgaagatacaataaaggtttttgccgatcgcccggtgcagcagcacggcagccaccgacgaatcgacaccgccggaaagaccgagcactacacggtcgtcgcccaacttctcacgcaattcccggacggtcgtttcgacgaaactctccggcgtccagtcctgtttgcagccgcaaatgccgaccacgaaattccgaagcagcgtaatgccgtccgtcgaatgatacacctccggatggaactgaataccccaactccgctctccctcgatacggaaggccgcatagcgcacgtcctccgtgctggcgatcacccggtaggtgtcgggaacagaagtaatcgtatctccgtgcgacatccacacctgcgtaggcgacggaactccctgcatcagcggatcggacggctcgacgaccgtaagcatcgcacgtccgtactcccggctgggagccgactgcacttcgccgccgtagaaatgagccaggtattgtgcgccgtagcagacgcccagcaacggcagacgacctttgatcgccgtcagatcgggcttcggggcattttcgtcccgtacggaaaagggacttcccgaaagaatgacgccccgcaccgaagcatccagttcagggatcttgttgaaagggtggatctcgcaatagacgttgagttcacgcacgcggcgtgcgatcaactgcgtgtactgcgatccaaaatccagaatgactattttttcctgcatctattctatttggtttttattttcttcactcgcattttccgaattatcctttttcatacggtacaggttcacggcgatacggacgacgaaaaaatagaaaagcgccgatgccaacaccagatggcgcatccatgcgtgccgacagcccgtaaaccaccagatcgccaaaagcgtcaggacaacgaacaccgccgcccaatcgtatcgggtcgttcgcaaccgatttcttcggatattcggcatcagtgcgtcaggagtttagcgctcgctgctgtaattcggcgcctcgctcgtgatggcaacatcgtggggatggctctcctgcatacccgacgaggtgatgcggatgaattgagcctgcttgagcgcctcgatgtcccgcgcaccgcagtaacccataccggcgcgaataccgccgaccaactggaaaaccgtttccgaaagcattcccttgaagggcacacgggccacgataccttccgggaccagtttattgatattcacatcgcccttctggaagtagcggtcggccgaaccggctttcatagcgtccaacgaccccatgccgcgatagctcttgaacttgcggccgttgtaaatgatcgtttcgcccggagcctcctccgtaccggcgaacatcgaaccgatcatcacgcagtcgccgcctgcggcaagcgccttgacgatatcgcccgaataacgcaaaccgccgtcggcaatgaccggaatgccgtacttgcgggctacggacgcagcgccgtaaatagccgacaactgcggcacgcccacgcccgcaatgacgcgggtcgtacagatcgaaccggggccgatacccaccttcacgccgtcggcaccgttagaaatcaggaactcggcggcttcggccgtggcgatattgcctacgaccacttccagatccggataaaccgccttgatcttgtgcagcgtattcttcacattgaccgaatggccatgggccgtatcgagcacgacggcatcgacatcctcatcgacgagcgccttcacgcgatccatcacgtcgggcgtgatgccgacccccgccgcaacgcgcagacggcctttcgcatccttacaggcgttgggatggtcctgcactttcgtaatatccttataggtaatcaatccgacgagcttgccgtcggcatcgactacgggcaacttctcgattttgttgcgcagcagaatgtcggccgcacgctgcaagtcggagttgtgagtggtcaccagcccctccttggtcatcacctcgtcgatcttgcggttcatatcgcgctggaaccgcaaatcgcggttggtcacgatgccgatcaaatgctgatccggagccacgacgggaataccgccgatcttgttctccttcatcaatgccagcgcatcgcctacggtatcgtccttggaaatagtgatcgggtcgtagatcataccgttttcggcacgcttcaccttccgcacgtgagccgcttgctcggcaatcgacatattcttgtgaattacgccgataccgccttcgcgggccaaggcgatagccagaggcgcctcggtcaccgtatccatggcggccgatacgatcgggatgttgagttggatgtttcgggaaaaacgggtcactacgctgacctcacgcggcaacacttcggagtatgcgggcaccagaagcacatcgtcgaacgtaagtccttcgggttgcaccttctcattgataaaagacataggagtgagattttgttgcctgcaaaagtaatcataatttttggattatttttcgtacacgccccgaatttccaaaaaatcggctccacagcaagaaaaacatccttacagcagggcgaccgtttcaaaatcacgggcatcaagccaccacgacgctgccgaagcgtattgtttgcctctggggagcgaggtttcggcatccaagtatcacctttttcaaaaaacaattcccgtatgaaattttattacaattctatcgtttaattaatatagtgggcttgattttaagtttttacttcataaaaatatagacggcgcatcggcaaactatcgtcctgcaagccgaatcaccgaaaagatacatgatacgttagacactcttctatcatgaaaagaattctgctttttattacggcaacgcttttgctcgcctccggaacctcctgctcggacgacaataccaatttcgatccgatcggtgacgaactgggaattccttataaagatggtcacgatgtctatggcgtggaagtttggacgccggaagaggtcagtttcacggactattactcattgatcgactcgacaattcacgagaaaaacacaactaaatcgatttggtggctttccccgatcggagaaaaaaataatatccattggaattattcagctcctgttacaatgagaatggatgaagtatctccctctatgacagcacctaacaacaatttgaataaatcacaaatcgatatagatttaacgaatgtaacagacggttttaccatcgaagcaatcattactattggagatcaatcgatacggcgttttcagactatccctgtaaaaaaaagtgtatataaatgcgacattttcttttatacattcggggtgaatttagaacaaatggaacacgattggatcaataatgaaggaaccatgaataccgctaccttgaaaacggcacggttcgtacaatcatttcaaactattgattttttaggatttacagatccgcctctcaaaaattagtgaaattatacggaacggcttccggaaagaataatttatcactcgatctgttaagggaggggtgcatgcgttgctatataccggaagaaccggaatttgaattacaaagtgggacagagaatatttatcgtgttctgaatcctcaacagtgggaaatcaatggtttgcgctgcacactcgaaaatacgacctggcgacagttaggtgcttcagacgatacggacaatacggagttcgcgtgccttactatcgaaaaattataacctttcaaagaaacggatgctctttgagcatccgtttctttataactaatcattttttaatacgtagtacataagtaccattattttttgtatcttcatcaagaaatatctgacctggttgcatatttactggaaaagatccggtaggaataccaacaggtagattattgatcttcaacatagtatttatttgggaagtttccaaataaaaaatagagttttctcttctttttaagtccagtagatttggtgatatggtattcacatatgcattactgggcgccgacactacaacaccaatggaagtcaattttgcagtggcattttcacctcttactgtaacggtatcgaactctccgttcgaagctttcacagtcccggacgccgtaacggtattaacctccaagtcatccggtatatccatggggaaatcgccctcgatctttgaagcggtcagggttcccttcgtcgtgatattgcctgtggcgacgatggtccccgcatcgatccgactcttgacattcaacgtatcggtttccaagctatttgctctcatatttacgacatcgagcgctccattgccgatatggatgcgatcttttccagtcgtactgtatgagttgacagcatcgtaccatacaattaggaactgtccgctcgatgcgaactcttgcactatggccgactggcgtttgacatcgctgcgattaccgaactgggcgatccagtcgcccggctggggctcgccggttccttcggaatcagtactcgaaaactcgatccaatcttctcccgcagctgttaccagtttccaatattgacgaatcgtacttccagttgccggatttttctgcacaaaaaagaattgatcgtcttctgcgaattcgttattgccacatggaaattccaaatcggcatgccaaatattatcctgggcttgcggcgtatagagtgtcggtgaagaggaaaactcgaccttcgcattccggaaatatacaatggctccggcggtattattatatatctgaaaattccgcataccggtcggtgtcaaaaccgtcgatatccgaatccatcgccccacttgatattccgcaagctcgacgatacttttcgtttcatccgcagctcccaggcgaatctgcgccggagcctcggcgaagacatcgaccgaagtcgccatcggccgtccctgggaacaaagcggggcatcttcgaaatagtcgagccagacccctgccgatgatccggcacctacggttttcatacacgatttaccgtgaaaatttccgaacgaaaggttgctgccgttcgtcgttttccagttggcagccgatgccagcgaagtgtccgcacccggcttcatcgctgcgattttgtttccctttacctgttccgcagcgacgatccgggcggatgccgaagaaaaaatcacgcggtcgctcatcatagtactgaatgttccgggacgggatgcctgttcggaacggtcggcggacaacgcccttgcacttgcgttctccagtctggacggattttccgtcgcatcgatctgtttttccataaacgatacaggtttaattatttatttactcgggtcggcagcgggaatcttcgccagaagatacccttccgccattcattctcaatcgatcttcacctgcggtcaaaacccgaatcggcctgtctgccgggatttcggcctcattcttttataaagacagcaaataatattgcattccaaacgaaacgtgtgctattttcgaagatcgggacaaatccgttcccgtccctttcccgaaccttcgagatcggcaatccccgtaatggatccggcactctcaccccgccgccgacatatcgccgtacatacagcggtgaaagccacaatacggtctcgcgccgtccatccggcacgaaagcctattcccctcaagcatcgaacaggacataacgaaaaaatatcggaagctccgccgggaacttccgatacacataaaagaggatataaaaacccgtatttctaatattgctccgactcattcgggaaatcgcccgatttgacgtcctcaacataagacgtgaccgcaccggtcatcacctcgtgcaaatcggcataacggcgcaggaaacgcggcgagaaacccttattgatccccagcatatcgtgaatcacgagcacctgtccgtccacgccgcccccggccccgataccgatgatcggaatccgcagttcggaggcgacccgggtccccagcgccgcaggaatcttctcgagcacgatggcgaaacatcccgcgtcttcgagcagatgagcgtcccgcaccagcttctcggcctcctcctcgtctttggcccgcacgttataggtaccgaacttatgaatcgactgtggcgtcaggcccagatgccccatcacggggattcccgccgaaaggatacggttcaccgattcgaggatctcctcgccgccttcgatcttcaccgcatcggcctcggtctccttcatgatgcggacggccgactcgagcgccactttcgaatttccctggtacgtaccgaacggcagatcgaccaccaccagcgcacggcgcacggcgcgtgcgaccgagcgggcatggtaaatcatcatatcgagcgtaatgggcaccgtcgtttcgtaacccgccatcacgttggccgccgagtcgcccaccagaatcacatcgacccccgccgcatccacgatgcgggccatcgaataatcgtacgaagtcagcatggcgatcttctcccggcgctgcttcatctcccacagacgatacgtcgtgaccgccctcactgtactctctactgacatagcattatatattttcaattttcgaatcgggaaccctccgggtattcctccttttcccaccggtaacccggggcaaatttagcgttttggccggacttgccaaaaaaagttccacaaaacgactcctccggccaccgaaacgttcaccgaatgtttggttccggcctgcggaatctcgatcgccccgtctgccgcatccacgacctcctgcgccacgccgtccacctcgttgccgaacaccagggcgtatttctgccccggtcgaggccggaattcatccagcatgacggctccttcgacctgctccacgacgtaaatgagatacccctgcgcacgcagcgcagcgatgcagtcggtcgtcgcggcgaaatagtcccacgcaacggtcagctcggctccgagcgccgtcttgtggatctcccggttgggcggggtggcggtgatgccgcacaaggcgatacgttcgacggcaaaggcgtccgccgtgcggaaaaaggccccgacgttctgcatcgagcgtacgttgtccagcacgaccgccaccggcattttctccatacgggcgaactccccggcagagggacgccccagctcttcgttggtaatctttctcatcgttacaacttccctgttttcacggcaaaagtaagcaaatccgaatattttagctaactttggcgacctaaatacacgcaaaagcgtcccgttccgcagacggctccgcccggcggaccggcaaccggacggaacgcgcgacaaacgactacgatcgcctatgaagcaaatcgcacttatcctgacacttctgctggctgccgccggcgcctcggcccaggaggttttcatcggagccgacttcgacacccggttcgacaaccgcgaacactcggactgcaacatcgacgattcgcacacgttcttcagtatgcgcctgaccccgaaagcgggtgttatctggtccgaaaagaaccggctggtggtagccgtcgatctgttgcaagacttcggcgacaaggaacacaagttcttgagtaaagtggacccccagatctactaccagttcaactcgaagacggcacaggccgtagccggtattttcccgcgctccctgctgctggcccgatacgatccgttcttcctgggcagtgcctactcgttctataataatcgcatccagggcctggccgcccactataaatcccaaacgggctccttcatcgagttcgccatcgactgggagggaatgcgctcgtaccagacgcgcgagaagttccgcatcctctcgggcggcgaatacaagggacgccattggtacggcggctatgtcatgaccctgctccactacgccaaaaccgacaatacggagttggacgaaggggtcgtggaccacatcctgctcaatccctacgtcggctaccgctacgaaggagcctacaccttcgatgcccggctgggttacctgcaaagcctgcagcgcgaccgccgcaccgaagagggctggaaagcgcccaaaggcgggcgcctcgccctgtcggtaagccgctggggtgtctgtctgctcaacgaactctacgtcggcgagaacatgctccccttctgggacatctatggcaccggactctatgccagcggccccttttacgcaacccccaagaagatctacaaccagacggccgtcacctacaaccgccgcttcttcaacaacacggtgggcgtttcggccggattctatttccattacgacggcgtgggcctgggcctgcaacagatcctgaaagtatcggtcaatctgcaaaaaaccgtttaccgtcccaaaaaatagacgcaaaggcggaaaaaagttgtaattttgtgaaaaatatacctgctatggcaatcgcaaccaacgacaccaataccaaggagaaagccgcgaactttctcgaagagatcattcaggagtccatcgccaaaggcgacacgcgcgtacagacccgtttcccgcccgaacccaacggctacctgcatatcggccacgccaagagcatctgcatcaacttcggcctggccaagaaatacggcggcaagtgcaacctgcgtttcgacgacaccaacccggtgaaggaggacgtggagtacgtggattcgatcaagcgcgacatccggtggctgggtttcgactgggcgttggaacgctatgcgtcggactatttcgaccaactctacgactgggccgtcgtcctgatcaagaaaggcttggcctatgtcgatgaccagacgcaggaagagatccgcctcacgcgcggcacggtatccgagcccggcaaggagtcgccctggcgcaaccgctcggtcgaggaaaacctcgacctgttcgagcggatgaaaaagggcgagttcgccgacggcgagaaggtgttgcgagccaaaatcgacatggcgcacccgaacatgctgttccgcgacccgatcatgtaccgcatcctgcacgccgagcatcaccgcacgggtaacaaatggtgcatctatccgatgtacgactatgcgcatggccagtgcgattcaatcgaacggatcacccactcgatctgcaccctcgaattcgacgtgcaccgtccgctctacgactggttcatccaagcgctcgacatctacccctcgcaccagtacgaattcgcccgtctgaacctcacctatacgatgatgtccaagcgccgtcttctgaaactcgtgcaggagggcgccgtgatgggctgggacgatccccgcatgccgaccatctgcgccctgcgccgcaagggttatacgccggcttcggtgcgcaacttcgccgaaatggtcggcgtagccaagcgcgacaacgtgatcgacctgggcaagctggagttctgcgtgcgcgaagacctgaacaaggtcgccgaacgccgcatggcggtactcaacccgctgaaagtcgtcatcaccaactaccccgaaggcaaaaccgagcttttcacggcgatcaataatcccgaagacgaaaacgccggcacgcgccaggtgcctttctcgcgcgagatctatatcgaacgcgacgacttcatggaggtcccgcccaagaaatactaccgcctgagtcccggtacggaggtgcgcctgcgctactcctacctgatccgatgcgaagaggtcgtcaaggatgcagaaggcaacatcacggagcttcgctgcacgtacgacccggagtcgggcaacggttcgtcgagcgacggccgccgcgtgaagggcgtgatccactgggtatcggcggccgatgcgatcgaagccgaaatccgtctcttcaacccgcttttcaaaaccgaagatcccgacgacgtggccgaaggcggcagttgggaggacaatctcaaccccgattcgatgatcgtcacccgaggctatctggaaccgtcgctcaaggaggctcccatcgggcagccgttccagttcgagcgcgtagggtatttctgcgccgacacggactccaagcccggacacccggtattcaaccgcacggtgaccctcaaggattcgtgggccaagatcaacaaatagatatttcttctacggtaaaatgaaaaagccggagctatcgaagctccggcttttcgattgataaatcgtgttttcaatattcgccgtaaactccatatcggatattcacggaaaatttccgacgccctgtcgttgctgtattcaggagtaaaatatatcttacattttaaaatacagaggggttctaattgccttcatactccatataatacatatcgatacctttggcccaatagtccttatgcgtcgctttcaacacaaagccttgcttctgatagaacttataaaccaacttgcgaagttctgacggttatcttgcggacacgatcaattgatttcaacttgtcgattctatattcgagcagttgcttcccaagcgattttccctgataatcgggatgtatgatgtcccaacttattttgccgacggttttatcatcggcaaaatttattccgccgcaaccaacgatcctgtcattcgtgaccagcacataatacgactctatttctcgatccagataatcactcaaatcaatttcttcttccgccgcaaaatattctggtgtattccgccggatcaattccatcacatcatccttgtctgtcgtccgatattcccttatcgtaaccatttctccgttttccctctcaacactctatttaccgcccgcataagaggaatacacttcccggcaacgcaacgaccgttatttcttccgggcgatcgttcgaaacggcagggccagcaccccgaagaacgcttcgccgaagataccgcccgacatcttggaggttccttcggtccggtcggcaaagatgatcggcacctcgccgatgcggaatcccatcttccaggccgtatatttcatctcgatctggaatccgtaccccaccatctcgatccggtcgaaatcgatcgccgcaagcacttcccgcttatagccgacgaatccggccgtcgcatcgcagacgggcatccccgtcacgatccgcacataccgcgaggcgcaataggacatcaacagccgcgacataggccagttcaccaccgtcactcctttcgaataccgcgaaccgacggcgacatccgctccggcctccaattcggcggtaagccgcagcagatcgtcgggattatgcgaaaaatcgcagtccatttcgaacacggcatcgtacgggcgagccagcgcccagcggaatccctcgatataggcagtgcccaaccccagttttcccgagcgttccaacagaaacagacgatccggaaactccgcctgccgctccttgacgatcgctcccgttccatcgggcgagccgtcgtccaccacgagcaaatggtaaccgccctcgagcgacatcaccttcgagatcatcttcgaaatattctcccgctcgttataagtaggtatgacaaccagtttttccatccaaatactttcttcagggtaattatgtatttcagcgtacctttatccgacagtcacagctccgaatccggcagccgcttatttgagattcgcagccgcatttataattctgcctctccggatctcctctcggagaggacttgggccgctacacacccccaaaggtacacaaaagtatattatcgccagcttaaatcgcccccgtccgaacatcgacacataaggcagcggtcgcattcgaatcgccacccctttacagcaacttgccgaaccgtctgcgacctaataaataacgcagaacgatcgacccgcagtatatgccccggggcttccccttcgccgcaccgcgaacagcccgccgcttggcggccagcgccttgtgcgcccgcagaaaatcccgccacgcacgtcccacggcccgcacgtaatccggacacccctgcatcaggtacgacagcgccgcgcacgagtcgagcaccggacgcacgatagccacgacgctccgctgcaccggcgacgcacacttgtagagcatcgccagattattgcgatggttgtaaaacaccttcgaaggcgatccctgcgccagactccccccgccgaggtgataaacccggctccggggctcgatccgcacccggtaaccggccagctgcatccgccagcagaggtcgatctcctccatgtgggcgaaaaaatcctcgtcgaaaccgcccatcgcccgaaatacttcggcccggcagcagaaagcagcgccgctcgcccaaaaaacatcgcgggcatcgtcgtactgcccttcgtcccgttcgacacactgcaaaatacgacctcggcagaaaggataccccaggtagtcgatgaaaccgcccgaagctccggcatactcgaaccgcgcaggctcgacgagcgacagcagcttgggcgctacggcagccacggtccgatcccgatcgagcgtttcgacgagcggttcgacccatccggcaggcgtttcgacatccgaattgagcagaatgaaatagtccgcatcgagatactccaacgcccggttataacctccggcgaacccgtagttacggtccagtacgattcgccccacagcgggaaattcgcgttcgagcacgccgagcgaatcgtccgtcgaaccgttgtcggccacgacgacgccgaccccttcgggaaccgatgcgagcaccgaaggcaggaaacggcgcaaatgcccagcaccgttccaattcaggatcactatttctgttttcgttcgcattccatgcgggccagatcggccggggacttgtgtttccaccgcttgtgcgaccacatccacaggtcggggtattcgcggatcttctgctccaggcgccgcacgtagcgttccgttatttcatggggagccacctcctcttctccgtcgtaaatccggtcgaaatccatctcgtaataacccggcttgacacgccgcagccagcagcaatacacgggcaggccgcaacgcagcgccagcttctcccctccgtcgaaaaagatcgtatcccgattgaggaagcggaaccaatggctgtcgggacggcgcggcggattctgatcggcaatcagtcccatcacgatattcttgccgtcgattcccttctcccgatttcgcagatagaagcgcagggactcagccatcggtaccgggcagatattcgcatggctgcgcagacgtttgtacaattcgtcgaaaacgcgactccgcaggggatgatagaccgccacgaccacctgcgaagggacgataatcccccagaacgaacagtactcccagcaccctaaatgagccgtcagagcgatccagtcccggccctcgaccgcagccatctgcttttccagatcctttacgacgacgacctgacggcatttctcgtcggtgagtccggccagactgaaggtatccacgaaaatctccgccaaagtacggtaaaaacctctccggatagcacgcaactcctccgggcttttctccggaaaagagttccgcaaattctccgtcacgacccgataacggtaacgcaacaggcgcaacgcaccgaaaacgaccggttccaccacgtaatagcgaaaccaatacggcaaaatggagaaaaacttacagaaaatccagaggctttccagtccgatccttccccaaaaacccagattcgggcttttctgtctttctacctccggcttattcattcgatttcggttctacgaacagtttcacattatcgaccttcgtgcggaccgaaagccacttgcgcaactgctcccggtctatctggcgttggaaatccttcggcgtaatgacgcagaccaacagcgtatccagcggtttgcccgcaacgtcgaacatcacccctttggtaagcgacatcgactccacgttatccgacatcacgcccacctcctgcgaaatatcgccgatatcgacattcgtcacctgatagcgagccagtcgctgtttcatctcggcgatttgccgattcttctcgtccagcagctccacgtaactcgactgcagcgactgcaaatcgactttatccgaggtcgatgcctggcgcaccaccaattctgtccggggcagcccgtagctggcaagctgtccccgcgcattctcgatcacatcttcgccgagcggctccccgaccaacagcagttcgatacggggcgattctccgccccggcggtagatcttgctggattcgatcacacgggtctgcgggaaattgaacacctgggcgatatacttatcggcctgcacctcgaaaatcgaaacccgcaccatatgcaagccgatgaatacgctgggaataaacgtaacgagcgtaatcgccagcatcgtccgcttcacgaaacgctcgcgggatttgttgagaaacgtcttcttcctgtacttcagaaaccgggtaaaaatataagtagccagggcgataaaaaccgtattgatgaaaaacaggtaaaacgccccgaagaaaaaacgatactgtcccgtcgccagaccgaaccccgccgtacagagaggcggcatcaacgccgtagcgatcgcaacgcccggaataacggtcgaattacgatcctggcgcgattgcgccacgataccggccataccgccgaaaaaggcgatcaacacgtcgtaagtcgtcggagtggtacgtgcgagcaactcactgctcgcattccccagcggggagatgaaaaagaagagggtcgaagtcgaaatcgccacgacgaacatcaggacgaagttcctgacggattttttcagcaggtcgaaatcgttgatcccgagcgaaaagccgatacccataatcggccccatgatcggagaaatacacatggcgccgataattacggcggccgaattgacattcaggcccagcgacgccaccatcgtagcgcaaatcaggacccacaaattgacgccgcgaaactccgtacccttgctgatgttggcagctacttcatcctgcgaggccttgtcatcctccagactgaaacggtcccgcataaaggcccggaactccgcccaaagtcggaacgaatgacgggactgctctttcaattcactattttccatatcactcatttactcttcttcggattctgtatccatattctttcccggtttcggaagccccgccaccacgatcacgaactctcctttgggcgtatgttcccggaaatagtccgcaacctcggcaagggttccccgcacggtctgttcgaactttttggtcagttcccgcgacacggccgccatccgctccggaccgaacacctcggcgaactgttcgagggtcttgaccacccggaaaggcgactcgtaaaaaatcatcgtacgcggctccgacgcaaggctctgcaaatgcttgttgcggcctttcttctggggcagaaaaccctcgaagcaaaaccggtcgcacggaaagccgctctgcaccagcgccgggacgaaagccgtagccccgggcaacgtttccacttcgatccccgcttcaagacaggcccgcaccagcaagaatcccgggtcggagattcccggcgtgcccgcatccgaaatcagagccgctgaacggccctgggcgatgttgtcggccaccagaccaaccgtcgcatgttcattgaacttgtggtgggcatacatctttttctcgatgcccagatgcttgagcagcaccgacgaggtgcgcgtgtcttcagccagaataaaatcgacttcggaaagcaccctgacggcccgaatcgtgatgtcgtccaaatttccgatcggcgtaggaacgatatagagcttagccatcgtcaggagagtttacgttccagcaactccatcaggaacctcactccgtcggacgaagggttccaatcgtaattctcggagatatagataatgcagtcgtccaggtcgtcaaactcgttcagacggtcgatcgtccgttcgtaccgctcggtatcgccgccgaacaagtcccgcagcaacaggaatttgtcgttgataccgatcgcctgcttcaggtcggtgatccgctccttgcgcacgatttcggaagccatgtccttcggcgcggcgatcgtgtcggccagcgtatgcacgtcaccgcccaacacctcgcccagcaccggctccggctcggcggcaaacgggtatttcggggcatcggttttagtcgaagtcgtttcggcgacgcccgtcttttgcgaagcggcaacggaagcatcggcatccgccgcattatccgcttgctccgaaatctctgcggcaacagagtcggattccgatgtttcggactgtggctccggtatttgcgacgttacggacttcttcggttcatccattttttcgaggagtgtttccggctgcggagccgctgcatcgtcctgctcctttccagcggttgcctgttgctgcggagccgctgcatgccccggcttctgcccggtcccgaccggaatcttcgaagcagcggcttcctgcggcccgtccgtctcgtagagggacatgatgacccgccgcttctccctgtgacggatcaccagatcgtccagatcgaacagactgtccgatacgacgactttctgcttcgattcggcatcggcttcagaggagggagcaaccacctgaccggcagacgatccggcaagcccctcccggccggtccgaaccgcagcatcgtgcccggttcccgacgctttgtcggactgcccttccatcgaagcatcctgccgcgaaagaccggacgtcacagataccgcgaccgcgacagctatagactccgctgcaggtgcagattccgatacaggcacggattcaggggcagattcgtcggcaagcaccggatccggctcggccacaggagcagacgcaacgacaagtacaggttccggctcaggttctgtaacggcagatgccgaaaccggcttcacggagggcgcagattccggcacagcagcagacaccccggcggattcacccaaagcttcgggcatcgcagccggctccggcagggagtcgcggacaggctccgccagcaaatcgtccaggtcgatacttatttcggacaccggcgcaacttcggcgacggactgctgcgcagcgacggacgcggaagcggaggaatccccttcgtcgaaattcgcaaaccgtatcgcttcatacaattttttgagcttgtccaaaaccaaatcccgctcgatgccggggacatcgtgcgaacccgcccagccatcgaccagttcgatcaaacgggcaagttcttcctgtatcttgttcacctccataacaaaatcggtttatcagagccaaaggtacgaaaaatatcggatgcgggaaacggtttgtccgcagattgccaaaaattcaccgatgcagctcgacgattattttccgaatcggaaaaactatgtatatctttgcttcggatgcaaaaccgaacgaaaaaccttcgaacggacaccgcacccgctttgctgcatatacccacactaaaaaaatcatcctgaaatggatattctggaactgcgccgctattgcctctccctgccgctggcagaagagtgtaccccgttcgacgaaacgaccctggtcttcaaaatcgggggcaaaatgttctgttacaccgatatggtggaattccgatggatcgctgtaaagtgcgatccggatcgggccgttctgcttcgcgaacgctatccggaactggtcactcccgctttccacagcaacaaacgccactggaacggcatccgtacggatggtgatctgcccgacgcctttatccgcgagcaactccgccactcctatctgctcgtcgcggcaggcatcacccccaaagccttgcggcaggaaatacgaaaccagatcgaaaaagccgggctccccgaagagtaacccggctttcgcctctttcccgaatcagccccgcatctgccgccgcatcatccgacgccagcggaaatacccggccagcgacatcgtcaggtaaatcgtgtagagcaatgcggtgagcgggatctccttgtagaaatagagcccgaccgtcaccaaattgactacaaaccatacaaaccactgttccagatacttgcgcgaaagcatccacattcccacgatgctcagcgacgtggtcaggctatcccagaacggcacggtgctgttggtaaaggtcacgagcacccagtagatgaacagatggatcgccgcatacgccgccgcgatcatcggccagcggcgtgcgggcgtacgggaaataccgccgcccttttcggttttgggagcgttgcgccataccagccacccatagacacttgccagaaaataatagacgttcatgccgaaatcggcataaagccccgtctggaagtagagcgtaccgtgcacgacgggcatcaccagccccacgagccagaggtagatgttggcccggtattcgagccacagatagagcagccccagcgtaaagccgacgatctgcaggatgagtttgagttccatcgcctaaaaccgcaccgttacgttggccagcacgttgaacatcgcctggggaaaatagaaggccgaatcttcgcgcacacctccgacaatcgacgaataaccgtagccgttgttacaatactccgtattgaaaagattgttgatctgcacgccgaaacgcacgcttccgatcttcgaggcagccaattcataccccaggttcaggttggtgacacagtagtcgtcgagcgacagcgcatcgttgcggccgttggtaaagtattgtttgccgacatactgcgtatgcagcagggcgctgaaccctttgacatggaaatccaatagcactccggcgatgaccgacggagagtaggaaagggtcgaggtcccgagatacagctccttttcgcccaggtagttccagtcggcgtcgtactccgaaacatattccgtatagttctcgatccggttctggctcagggtcgcattggctcccagcgaaaaccagcgggcgatgttcagcgaagccgagagttcgatgccccggcggtaactgtctggaatattgcgggacagctcctgccccgtgtccgagagttcgcccgtagcgaccagctgatccttgtaggacatatagtagaagttcacgcccgcctcgaaacggtcgttgtggaaaagatagccgaactcccagtcgtacagccgctccgaggtgggatactccccgttcttggtatcggtgaagttgctgcgcgtaggctccttctgcgccacggcgaacgacacatagaccttgtgattccgggcgaaagtgtagttcacgcccgctttggggttgaaaaagtgataggtacggtgaatatccaactcctgaagcgccgaagtggtgctgttgaaattgtcgttggtgcccgtaatgttatgccggatgaaacggtactgcaggtcggcatagaggttcagcccccgcgcagcctcccagttgatcttggcgaagacgttggcatcgtacttggtcgaggcgttacgataatattcgtgacgcgggaagccgggtgcatcgacgaccgacatcacgtttccccagtggccgccgtcatatacgttgcccgcaccgcccagggccagttgtacgcgaccacgagtatagttggccgatgccaccacgccgccgaaatggttgtccatcgacttgcggcgaatcagattgctttcggtaatcggctcgttcggatcgtccgtagggatcggcgcgataccgtactcactcaacgtctgtccgttcttatactggttgtaataacccgaaccgtaggtgtagtggcccgtgacattcagcgtccaacgggcgttgaagcgatgattgacgatcaactgattgttgatctgggtatagttatccgtctggttatcataaaacgaaatcgatccgtcggcatgtttgacaagcccctgcgaattgtagcgccggtcggtttcgagctgctccttcgtcacgccgtcataagccagtccgactctggccacaccgccgaaggagatcagcttcacggccgtacccccatcgtagtacccgacctgcaacatgtaggactccaggttggtgaaggcccgatcgacataaccgtccgaggagatatgcgaaagccgggcatcgacggtccaatggccgcccatgagtcccgaaccgatctgcaacgactgtttgttggtgttgtaggagccataggaaagggacgcttcgccagaaaattcgctcgacatcggggcggtggtcatattcaccgaaccgccgaaggctcccgtaccgttggtcgaggttccggcaccgcgctgtacctggatcgttccgaccgaagaagccatgtcgggcgtatcgtaccaatagaccgagtggctctcggcatcgttcatcggcacgccgttggttgtgacattgatgcgcgaagcatccgaaccgcgcagacggaacgccgtaccgccgatgccgttgccggcatccgaagtggcgaccaccgacggagtcatttgcaacaacgtcggcatgtcgctgccgaaattccggcgagaaatcgcttctcggccgatatcggcatatgccaccggagttttgcgatcgacgcgggtagcggtcacctcgatctgctgcaattcgtacagtttcatggaatccggagtcatggagtccgtttccaccggttcgtccgcgtgcaccggcatcgcgcaccagacagccgcagccgtaagcggcagtaagaaaatccttttcataactttaattgaattaaaagaacagaaaaggggtatgtcgtatcgattatagattcccggtttcagcattacccgtatccggtacaatgggtataatctcagcctgacagtaaggcaccccttcaagaatacgggcgcaaagataacattaaatttcggaaaatcgcaccgcatcacaaaaagagtacgccacccggctcgaccccaggaatggcgcacagctttgttcgaacaactcactccgaatgcggcggacagcgacgaaaaaccgactgttcggatatttgccgaaaaaaacgtttacaacccggaaccaggcaaaacccgggaccgttttccggctccgacagttgaaaaatccggtatcttcctcgggacagggcaagcctggggagagtcatcacctaccggaaagtaccgaaccgatagacggtcttctggcaataaaatccgtcaggcgcaagcagcggagaaggaaattccggccgattgaccgcatcgggatacccctgacagacgacggcgaccccttcgtaatcccggtagcggccgcccgacttcgtttcggggcatccgccgcccaagcgattgccggtgtagagcgtcacgccgggctgcgaagagagaatctccacccggcgtcccgaacgtgcatcgcgcaattcgccgacttcggtcaggatattctgccgccaaccgtccacggggaagaagtggtcgtacccccgcagcatccggatccggtcgaaatcggaatcgacgccctcacccaagcggcgcagtgaacggaaatcggcgggcgtaccggcaacaccgagcagtttcccggtaggaatcagacgatcgtccgcttccaaaacagtcgaagcatcgagccgcagctcgtggtcgagtaccgacccgctgccctcgccgcccagattgagcagcaggttgcaggccatgttcacgggcgtcgtccggtcggttcgagcgatataagttatttccagcgcattatcttcgtcgaaatcgaaagcggcctcgacctgcaaattaccgggatacccctgatcgccgtcgtcggaagagagcgacatcacgacccggttggtttcgacacggctctcccacaagcgcccggcgaagcccttcacaccgccgttgagatgcccggccatgccgtttatatccaagcggtattcttcgccgtcaatccgcatcgtcccgtaagcgatgcaaccggccacgcggccgatgcttttgccgcacagggccggatcgccgaaataactgcggaaatccttgtaacccagcgccacatccgccaaatgtccgtcacgatcgggaaccagaatcgacacgacagccgcgccgacattgcaaagccgcacttcggcacctgcggcattgcgcagcgtatagagcacaacggcctcgccctccgaagtggcgccccagatctgctgttcgatctccatccctattcgcccggcttcagattacgcagcaggttgtcgatacgacgcagggtctcctccttcccgatgaaagaggtaacgtcgtacataccgggacccttgccggctccgaccagcgccaggcgcagcgtgttcatcacctgtcccagcgaatagcccttctgctcgatccagccgtgcacgatccgctcggtattttcgagcgaaaaatcgtcgatgccggccagcacctcgcgcagttcgcgcagcatagccggattatcgcccttccaatacttcttagcctgcttctcatcgtactgagtcggagcgacgaagaagaacgaggtcagatcccacagatcggtgatgaacgtggcccgctctttcataatgcctgcggcacgcccggccaactcgtccgaaacctcgatgccgtgctcgcgcaggatcggctgatacagtgcggccagttccgcgtcgctcttatggtgcatatactgggcgttgaaccacttggccttgtcgggctggaagcgggcgcccgatttcgaaacgcgctccagcgagaagttgtcgatcagctcctgcatcgagaagatctcctgctcggtgccgggattccaccccagcaacgccagcatgttgataaacgcctcggggaaataaccgtcctcgcggtaaccgcgtgcggtttcgcccgtcggggatttccagaagagcgggaacacggggaaccccatcttgtcgccgtcgcgcttcgagagtttgccaccgcccgtaggtttcagcagcagaggcagatgcgcgaagcggggctgcaggtccgtccaaccaaaggcccggtacagcagataatgcagcggcaacgacggcagccactcctcgccacggatcacgtgcgacacctccatcagacggtcgtccacgatattcgccagatggtacgtaggcagcgcatcggccgacttatagagcaccttgtcgtcgagcgtcgaagtgttcacctcgacatgcccccggatcaggtcgtccatttcgacgatctcgttttcgggcatcttgaagcgaatgacccactggtcgccccgcgcgatgcgggctgcgacctcctctttcgagagagagagcgacgtaggcagtttctcgcggatcgaatagttgtatgcgaaagtttcgccgcgcgcctcgtactccttgcgcagggcgtccaactcctcggcagtatcaaaagcgtagtaggcccatccggactccacgagctgtttcgcgtatttcaggtagatgtcgcgccgctcgctctggcggtacggcgcatgagggccgccgacgccgacaccctcgtcgatctcgatgccgcaccacttgagcgactcgaggatatactcctcggcacccggcacgaaacgctgcgagtcggtatcttcgatacgaagaatcatcgtaccgccgtgccgacgcgcgaacaggtagttataaagcgccgtacgtacgccgccgatatgcagaggccccgtagggctgggtgcgaagcgcacccggacaggtctttccatatttcgttactctttgttgatttcctttttatcgtcatgttcggattcggccgtcttgcgaccggccgcatcctgcgccgctgcaccccctcgggcaggtttgcacaaagtcggcgccacggcccacagcgcacacatcacccacactacgaaggcacccgataccacgcgccagaccgcatcgttcctcaaagcgaccgctgcgagaagcaggacgaaaaatatccgttccgtccatcgggaggtaagcgcccgggcgatttttgcacgatttcccataccgtttacttaatgcggtattcgacccgcatggtgatacgggcttttttctgccggctcgaggtgttgaacgatcctccggccgagaactcctcgttggtattggcacccgtgatctggaacacgcccatacgggccgaagccactccgccgagcttcgctccggcattgaccgcgatcttctcggcacggacacgggcatcggccgatgctttctcgatgagcgacaacttcacgtcgtcgagcttcgtatagtaataatcgggctgcatagcctcgatcgaaacgccctgggcgatcagcgaagagatttcacgcgaaacattctcgacggcatcgacactcttcgactcgacggtgaagccctgcgaaagccggtaaccggtaaaccgctgtccggcccaactgccattggccgaatagaccggctcgtactgcttggtgacgttcacgaactggaagaccacggcttcagcagcgatccctttcgagaggaggtagtcgtacaccttcttcttgctggattcgatctgcgcgtatcccgcttcgacgttctgcgcctcggcggtgatgaaaccgttccagacgatcaggtcggacgagaactcggtttcgccgaggcccgtcaccacgatcgtctcctgcgcgtggtatttatatgtgtacgcccttgcgagcaaccaggcactgacgacgatcgccgcaccgatgatgaggtacttccaatacgctttcataaccgtaatattttaagaattatatttgctaacccgccgcaattcatcggccgcttccggtccggcgttttcaacaggacacgatcaccgcatccggcggcgccccgcccgctaccgtaaacggcagcgcggcactacacgttgaacaggaagtgcatgatgtcgccgtcctgcaccacgtactccttaccctcaaccccgatcttgccctggtcgcggcaggccttttcggaacccagcgccacatagtcgtcgtacttgatgacttcggcacggatgaagccccgctcgaaatcggtgtggatgatgccggcggtctggggcgctttcatgccccggcggaaagtccaggcacggctctcgtcggcaccggtcgtgaagaacgtctgcaaatccagcaatttataggccgctttaatcagacgcgccacgcccgactccttcaggccgatctcttcgaggaacatctggcgctcctcgtactcgtccagctcggcgatgtcggcctcggtagctgcggcgacgatcagcatctcggcccgctcgtcggcaatggcggcctcgacggcccgggtatgttcgttgcccgtcacggcgctcttctcatcaacgttgcagacgtagagcaccggtttgtcggtcagcaggttcaggtcggcgaccagcttgcggtcctctttctcgagctccacggtccgggcgctcaaaccctgctccaggacggccttgtactgcaacaggatctccacggcacgtttggcctgcttgtccccgcccacgacagcctgcttctgggtcttggcaaggcggttctcgatggtttcgaggtccttgagctgcaactcggtatcgatgatacccttgtcgcgcacagggtcgatcgaaccatcgacatgggtaatgttatcgttctcgaaacaacggagcacatgaataatggcgttcgtgttgcggatgttggccagaaacttgttgcccagcccctcgcctttcgaggcacctttcaccagtccggcgatatcgacgatctcgatagtggtgggaaccacccgcttgggattgtcgatctccgcgagccgaatgagccgctcgtcgggaacggtgatgacgcccacgttgggctcgatcgtacagaaaggaaaattcgccgcctgcgccttggcgttggacaggcagttgaaaagggtcgatttacccacgttgggcagccccacgataccgcattgtaaagccattgaatatctttcgtttttaatattatccgttcgacaggcatcggcaaaatgcaggtgcccccgcgaagacggtcgatataccgtcgttcggaaatgcaaagatacgaataagccgcgtgcaaaagcaaatttatttgcattttgcccaggcgaagtattttagacgaagtcaaagatacgaaaatctccccgataacttgcgtttgacgaagactttgttcgttgattccgaacagacaagcccggcacaggacccgggactaaagaccgaacaacagctccggtataaattataaaacggtaaaaacagccgggtttcgacaagacgacaagcgcggagcaagagggtaaccgattacaatcttgtcaggtacgcaaccgatgcgccgataaaaaaccatactcaccctttcgcattccgagaaagagttccgcagcgccacaggaggcggcaatttcagcaagagtgcgcagcaacgccgcccgctgcgggtgcaaaccgtccccgttgcaacggcgatggaatatgcgacgaaggccggaaatccatgtggattccggccttcgtcgcataatacgatcaaatcagacgatattgcacgaacacaacggatagctctcccgcttgaggaactcctccgaaaccacgatccgaacagctcggtgcaatacggaaaactccaacggagactcccccaacaattcgccatcgacctcgacgctgatctccggcgaagattcgatgcggatacggctgcccctctcctgcaggatatgccgaatccggtaaatcccgccgttgaacagataacggaagcggaacaggatatgccagaaatggacgggacggatcagcgacacgtccagcagtccgtcgtcggccaccgcctcgggcaactgctgcataccgccgccgttgtatttgcagacaccgatggcgatgctcatcaacaggttgttgtaaaccagccggtcgtcgatccaaaccttcacgcccgtcgatttgtagctgaagaacgaacggatcatgcaccacgtatagagccacttgttgctgtgtcctttcttcttgagatgggcgtatttcttgactaccatcgcatcgaaccccataccggccacattagccatataacggtgctgacggtagtgagcctcttcgtaagaaacgactccgacatcctgtaaaaacgaatgtccctccttgatagcgcggatcgcatcctgatagcgattcggcacgccgaacgtgcggatccagtcgttccccgctcccacggcgacaacggccagcagcacctcgcggggatcgaccgtctgctgaataaaaagaccgttcacgacttcgtgcagcgtaccgtcgccccctacggcgataatgcggcggaatccctgcttcacggccgacacggtcagttccgtcgcatggaacttatgttcggtgaagaccggttcggtctggattccggcatcccgcaggagcttggagatcaggggaaaatggtcaagcccgcggccacctccggccacgggattgacaatgacgaaccaacgccgaccaccgccgggcaaggacatctcctccaaaacgacttattttaggggagcgttcttcagcgtatcgaccaggaattcatagaacttgccgacggaagcgatgttcaccttttcgtccggagagtggggatagcaaatggtcgggccgaaagaaatcatatcaagcttagggtaattcgtaccgatgatgccgcactccagaccggcgtgaatggccgtaaccgcaggttccttgccgaaaagcgctttgtaggaagccttcatcgcagccagaatcggcgaatccagattgggtttccaaccgttgtaggcacccgtgagttccaccttagcgccggccagctcgaacacggcggagatcgcctcgcccagctcctccttctcggagttcaccgaactgcggagcagacactgcaacttcaccgtcttgccgtcggataccacgcgggccaggttgctcgacgtctgcaccagtccgggcatcgacaccgacatcttctgcaccccgttcgggcagcctacgaccgcacggatcagattctccgccacctccttggcgatcatcgtttcaggggcttcggtttcggtcagtttgatggaaacagcgtcctcgatcccggcgaactcggccttcacgaccttttcatacgctttcagctctttggtcagctgctcgagatccttggtgcggaccatcagcgtagcggtcgcctcgcgcggaatcgcattgcgcagaccgccgccgtccaccgagcaaagcaggatgtccatcgacttcttctgctcacggatgaaacggaacagcaatttgttggcattggcacgctgttcgacaatctggataccggagtgcccacccttaagacctttgacaaccagcttcacggcccggtaattccgtgccggagtcggctccgccttatacttgaacgtgatgttggcatccacgccgccggcgcagcctacatacaactcgccctcctcctcggaatcgaggttaagcaggatgtcaccgtgcagcacccctttcttcaggccgaacgcaccgtccatacccgtctcctcggtcgctgtgaaaagcgcttcgagaggaccgtgttcgagcgtatcgtcctccaggacggcaagaatagccgccgcaccgataccgttgtccgcaccgagcgtcgtaccgttggccgtcacccattcgccgtcgatatacgcctcgatcgggtccttggtaaagtcgaacttcttatcgttgttcttctgaggaaccatatccagatgcgcctgcagaacgatacctttgcggttctccatccctttggaggcaggcttgcggacatagacattgtgggccgcatcctccttgcactccaggccgagactcttggccacgccgatcacgtacgcacggatcttctcctcgtgggaggaaggacggggtattttggcgatttctgcaaaatgcttccaaaccaacgcgggtttcaaagcggtcaaattcttatccatagtagttctattttaattggttatcgtttctattttccagtttccggagcaggtgccgcttcgacggcagcgctgcggtcgaaagcctcgacgatctgcttgacgagcggatgccgcacgatgtcgcggcggtcgaactccacgatgccgatcccctcgacaccgcgcaaaatctccatcgcccgcgtcaatccgctgtcggaacgacggggcaggtcgatctgcgtcacgtcgcccgtgacgatgaatttggcattacgtcccatgcgcgtaaggaacatcttgatctgcggcagggtcgtattctgcgcctcgtccagaatgacgaaagcgttgtcgagcgtacggccgcgcatgtaggccagcggcgcgatctgcacggtcccctcctcgatgtatttttgcagcttggcgggcggaatcatatcgttgagcgcatcgtacagaggttgcagatagggatcgagcttctccttcatgtcgcccggcaggaaacccagcttctcgcccgcttcgacggccggacgcgtcaggatgatccgcttgacgtgtttttctttcaaagcccgcaccgccagggcgatggccgtataggtcttgcccgaacctgcggggccgatggccagcagcaggtcgttgcggtcgtaggactgcaccagcttgagctgattgaccgtgcgggcccggacgatcgtgccgttgttgccatagacgatcacgtccttatcgacgggagcgtcgtgttcgatcaccccggtcgaaaaagcctgttgtaccgactctttggagatatagccgtatttgaggtagtaagcgatcaatccgtccagtcgtttccgaaaccgttcggaatcgcttcgggggccgagcaccgtgagcgcagatccgcgagcgatgattttgaggttgggatgcagctcctgcatctgttcgaggtaaatattctgggggccgtacagctcccggggatccaccccctcgatgtcgatcttcttatcttcggaatccatcataagctaaaaaacaaatcctacgctcaatgccagggagtaagagcgcatgttgaacccgaccgcctcttcggtgggataataacactttttcgaatcgaactgcccgttgtaacggaagtcgatcagtgtatgtccgaaattcaaccccaggcccaacatataggaaaccgtcgggcgcatactgccgaagaacatctcgttgttgccctcggcatacttgcaatcgttcatcaccgtaaagacgggaccgacgttgatccgcagcatcggaagcgcccgaagcgagaagatgaggggaatatcgatcgaattggttttgattttcagagttccgtagtcggcatggctcaacttgatcgactgccgcacgtaaagcacctcgggaccgatggtgaaatagcggaatttcaagccgatctggagtccggcctgccaaccgagccggttatctataccgaaatccggaccggaagtcgaaaaatggggaaagttgagtccggccagtacgccccactccactcccttgatcgccgatccgctgcggctgctgcgtccataatcgtcgtatctgcgggactgacccgaagaagggagagtcaaaatactcaacaacaacgctataatcaggaatttacagtttttcataactctatttcttggtatcggatttcaatacggcagcggcccagagcaggtagcagacacaagccgtcacccagatcaagcccgcctggggatgaccgaagccgcggatcagcgcgccgcagatcgggcccgaaagggcgccggcggaaatggccaggatcatcagtccggcgacttcgttcgaacggcccggagcactcttggtcgccacggcataaaacgtggcgaaaacgcaggccatcgtgaagccgaggatgccaaccaacgcataaacgaccgcttcggagcgcaccgcgaaaagggcgatgcaaagcgccaatgccagcagcatattccagcgcaggtatttgacatcgacgacacggatcaacacccaggcaccgacgagcgtacccacgatgcgcaaagcgtaaaatccggtggtcgtaagaatcgaatcgggattgtcgatcaaccgcaccgaaacgaagccgataccgacatccgcagcgatgaagcaggccacgcccagcgtacagagcagcacggcgcggttacgcaacagacggaaacactcggccataccgaccgcacgggacgattgcgccggttctgcgaccgcagtcacctgtaaccagacggccccgacgagcgtaagccccgcataaatcggcaacaacagacgccagtcgccgaaaagcgaaaccagccccgtgatgatcggggcgagcagcaacagagccgtattgcggaagatctgtccgacggtcaggtagctggtcatccgctcctcgggcacgatggtcgccagcagcggattgaccgccacctgtatagcggtattgccgatgcccagcagaccgaagccgatgaaataccaactcaaggcactgccgacgcccgcagcatagggcacgagcaacccggcgatggtaaaggcataaccgatcattgccgttctcttgcggccgatgcggttcatcagcgccgcgacaggcgtggaaagaagcaggaaccaaaggaaaaccatcgacggcagaaaactcacggcactctgctggctctcggcaaattcaccgctgatgatgttggtcaccggagccacgatatcgcagaagcccatgataaagaaccccatcagcacaggtgccagcaatcgtttgtccactctcctttccgtcatagcacgtccttcaacattcattatttggtcaaagttaagtttttttctcggaatacacagagaaaaccgtgcatttttttatccggaatccctgtttttcggcaaaaaaagcattgctattccccattttttgctatatttgatgtagtctgaaggtatttaattgactacaaatag

SEQ ID NO: 10453 - DNA, 34343 bp, Unknown
  gut microbiota DNA sequence
gtacggttcggagataaaaggaaaaagtataatccgcaaatccaaatgttcgacggattttaaacgaaacgacttcctcaaaaaaaacgaagcgtacccattgggtgcgcttcgttcacttaaattcgcttatcgaaagttgcgtatttctctatttgtggaactcgccgtttgatacctttttgtagatcgtttaaacagcgttttaatgtcctttgcatagccggaatgatctcctgttcataaaactcccgcggtcgaaggttgtagtcgatcttaacgatctcttgttcgcagatgtcccccgtatcaaggccactatccgcccaaaaccatgtcgcagccgtaataggttcttgacgtctatacgcccagcgtatcgaggatgcacctctgccatacggaagcggtgacggatggaatatcagcgttcccaggttgggttctgccagttcttcgttgctcaccctttcaatcaataacggagcgatagcgacatccacaaaaaaataggtttcattccaaactgccagccccagcgacttaaccactcgttcggcctctttataggccgttgtatcggagtttcctaatatcttaacaaccattattaatatatttaaacgcttgtacggctcggaaatgaccgccatagccagacgttggtcggcctggttgtcctttccttgccgccgatttaatcaatgagcttatggacttcgttttattcgccccatacaggcttgccgccgtctgtacccatttccgggaatgacggagtgccccgcatagctgcgggtgcgacgtatggaagaatacgggcagcattttgccgcatcggccatgtccttgacgatgatattcgcaaacggcggcgaggaactttgtgccaactccaattccttgccattcgggcatcacgaccaaccgcgtcgccctataagctcctgcggtgaataacggtgagactgctacatgacagacaggctcaccgttgatgaatccgacgaaatactcggcagccacaggggcaggcaggtctaaataataatgctgcttaaacaatcgggggaacacagttccccggactttataaatttgaagtttgagctgggggcggcgttgaaggcagtcccgattgtaaaaccgggcctcctgcatatcatatacccaatccggctgcagccattcgataatatcgtagtggcaggaaagcaggacaacctgcccatcaccttttcgccatgtctttgcgaaagcggccgctccgaccttggcgatttgtcggtcgattaccgaagtgaactcgtcgacgactgcccgtttgggccgttcacataccaggcgggccaggccagcgcggaacttctcaccgttactcaagacgggaaatggccggagccatgccgggacatcacccaggccgacggctgacaatgcacccgttacggcattgaaatctccgtctggggcgatgcaatcgacgataggcttcgtggcatcccacccagcgtacaagtcatagatgggctcaccgaaaatgcggctgcctatacttgtcttgccgcttccggaaaggccgacaataagaccgattttccagtccagcccctcgacgggaagctcggccgagcgttcccaatcacagccgttctcagcattgaaaaggctttttactcgtgcggctcggtaactgttgaagtcgctgcaatggtgttttacttttacaatcatacagtaacaattttaagagtcaaaccttgagcgaggagccgttcgtaaatctcccgctgctctttttcatccttgcagatgacgattacgccatactgctctttgtaattaaatgccattcaaatattgttttgaggtgaataatatttatctttgtcgcatctcacccacatactgcatataaatgcgccgaagacgcgacagaaggctccagccctcggtcgtgcgtcttcggcgcgcgcttgcgtaagtatgtgggtgagatctctacttacggccgggggctttttcatgcccccatgttatggatcagtttttcatcatcggcggtcgtttttcaggtgggatgtatggatatttgcggttagggatgtaggtgatccacgcgaacagatgccgccaccatcgacgggtataagagggatcgtgctggttgtagatcgcctcggtttcaaaacaactgttcccataggcgcggttgtagggcggcaggagaacttctattgcgaccgaaaggccgtaaatcaataagggcgccggaacggccgccagcatccaccatgcggaaaccccgaacaggaggtgtgccgccaccgtacccagcagacaaacggcgacgatctccagttgctgccgcatgtggattttctcgtgattgagtagtcgggccgtcaatgcgacgccctctttcacgaacagccagaccagcacggtcaatgccgtgaagcggccgaacggaataaaacgattatatacgattttcatcatattacggaaactctataacaggaatatttatcgatatggccgttcaacatcataaagctcaaagtaatcagtttcgagcctttggggatggcgatgctcgaattggcggcatcgcctgccagcaaaagagaaatggtcaggttattctccagtcccgctatgcatctcaataccaattcgataatttgaagcggagcggatcctgccggaatcgtactgtcgatcgcaaacgaggtttgggttcgtcctatctctcgtatatacgaaacatatcctcggccttcgaggtagcttacattggaacttaatttcaatgtactgccgagggtcattgttgaagatgaaattagaccttgcgttggaatgacatccaatttctttttgtcggctgccgacatcaggccgtttgccgaccgggtggctacggccgtcgatgctttgccgttccaggtcgttttctccgcgtcgcttacgaagcggtggttcgcgtcttgtgtgatgttcgaggccgaaacaggcccctcaaaattcccccccccggcatatgagagggcgttccaggcagtggcgccatctccgattttgtgtttgcgcgtgtcggattcatagacgacctctcctttcagcaggacgggatttttggccgtgagagtcgctgcggtatgtaccggatgctggatccggctctgtatggttttgttcatatcgatcaggtttcaaaaaaggtgacgagtctgtatatccgcatccccaaaatgagtgcgctgtatcatatttccccccgtaggagctcatactttctgcgtccccgtcaccagaatattcagatatgcaagactgacggtgtcaaaccgcagttgcttgcagcaactttgaaataactgcgcggtccttcgatgcgtctttgggcatcgccgacgaaaaggactacgccggagtagaatgatacgtacatttttagttttccgaactcgtcctgcccggcccctcgcccgcagatgttgattcctctgtgcagatcgaacttgaccttcccgcaataagacgtatcgctgatccgtgtcacccacctgccgaacagggcctcgacggagatcaccggaagccagccgctcttgtccgctttgtcggactcgaacgggatcggatcgatgcgtgtcgatgtccacgacaactcgtcgcgtgaaaatctgtcctgcacgagtttgaacccgctgctggtcgggcgcagcttcgcagcgctcgactttcggactcgtgcattcttgtagtggagtattccgacgctgcagcgtttaagaatcggatccgcagggtcggtcgcgggtttgacgtaaagcattcccccttgcaccttccaccgcaatgcgggtactttttcgacatcggaggcataggccagtgtgttccaggccgtcgtgccgtcgccgagtttgtggcgtccggtatcggattcatagacgatttcgcccttgagcaggacgggattcttggcggcaagtgcctccgccgtatagaccggaagctgtgtccgggtttggattgtcatttttgctgccatagcgtcaattcattccggggattgaacattggatgaccagctcgccgcccgtcaggtcgtcgagcttcttcttgtctgcggccgacatcagcccgttggccgattgggtggcgacggccgtcgatgccttaccgttccaggtcgttttctccgtgtcggtcacgaagcggtgcgtcgaatcctgtacgattaccgaagcgggatgcgtggccggatgctggtagttgttcgccccggcagccacgccgtcgagtttcttcttgtcggccgccgacatcagaccgttggccgattgggtgacgacggccgtcgatgccttaccgttccaggtcgttttctccgtatcggtcacgaaacggtgcgaggcatcctgttcgatcatcgtcgccggatgtgtggccgggtgctggtagttgttcgctccggcggccacacccgcgagtttcgccttctcctccgaggtgtagtcttcggtagaaaggcccttgcccgcaaccttatcgaccttctggccgatctgcgtggcgacggtcgtagcgaaattcggatcgttgcccagggcggccgacagctccttgagcgtatcgagtgccgcagggctgccgtccaccagttcggcgatggccttatccacgtatgcctttgccgattcgagcgtcgtgcggtccccgctctcacgggcggatttctccgaagccacggccgcatcggcgtggctgttggccgactgaagcgtcgcggcatcgccctgcccacgcttctgggcctcgtccgccacggaggtgtcggtgtaggtcttggccgaagaaagggtcgtggcatcgccttgtgtccgctcctcggcttccgctgcgacagatgtgtcggtataggttttcgcggcttggagggtcgtcgcatcgccctgttcgcgcttaccggcttcggcagcaacggaggtgtcggtataggatttggccgaggagagcgtcgcggcatcgcccgcggccagttccctgcggatcgcggcctcttcacctttggcacgttcgatctcgtcgtcgagtctgccgtcgagcgcctcgatgtcattttggacctcattgaacgccttctcggaggaggctacatggacggagaggtcgtcggttactttctgcactctcttctccagctcccgcccttcggccgtattgtatttcccgttgagttggtcggtaagcccctcgaccccgctcatcgggattttgtcctcggtcttatggaagaagctgtcgaagaggtccgagaactgctcggccgtcgggtacattccccggccgaaccatttgcgcagctgcgcacgtactctgattgccattctgtaatcgcgtgataagaattttacttcgtccgcatgacataggccagcgtgtaatagggcggtcggttctcgtgcgagctgccgccgcccgtgcggtccgtcgttccgaagggcgtcgtgcggtcatgccacgacacggcctcgggataggagttgttgccgccgctgcgccagctgccgttacctccggtccaaagattctccccgtgtgcgtgcgagggcatctcatcgacggtgagcgtgtgtttcttctcgccgcccaccttgccgtagctgccgtagtcggcatcgctgacgttgtagcccaccacgaagcggccgcgcaggtcgggcaggcggaaatagccgctcgtggtcgagagcttccggccgttgcagtcgtaggcattgttgtaggtgctgccgatggccttgtagagttcggggtactccgactgcttgagctgctgcccttcgcagagagcatagccgtcggggatgcgggatcctgcccagatttcgaccatgcccagcggcgtgcgctgaatcttggccagggcggtctgcaacgccacgatctgcgcttcgagctcgggcagcgactgcgcctcgcggaagtcctcccatttgtagttctcctcgccgacgcctggagccagcgaccgctcgacgtaggcttgcggatattcgtacccctgggcctgtaccgggatcgcggcttgtttgaggtacatgccgcccgaaatggagccgccctcccagtagagcacctccccctcggggtgttccttcgtgcgcaggaacacgtagccctcgctccgctgcgtgccgccgcccgtgagtgcgcatcccagcaggatcgccttgtcgcccgccaggttgccgatgatcgacaccacgtgcgcgttggtctgcatgtagtcgagcatctcgcagtcggccggaaagtctttgttcgattgcaggaggaacctgccctgtatctgtttcatcgtcaaatgtagtttatggagaatcgtttcgaagccagcttgtacgcatccaccacggcccggacctgcgtgatgtccagcttgtcgtagagcgccagcgggatattcacccagaagtcgtagccgctcaccccgccgtagccgcggcggttgagaatcaggatccggcccgatccgcggcgcgggaccagcacctcggcgtcctcctcgcgtttgtgcagggtgatgaagcccacgttttcgaccgtttcggtgattgtgatcctccggtcgatgggatcgaacttgtcgttcagcagcgcccgcaggtagcacacctggccgttgtgttcgaggcggtagtcgctctcgcgcttccagaggatgaaccgcgtgtgcaggtattgcaggggcgacacggcggcgtaggccatcgcggcgaagagcggccgccgccagaaggtcggcagcagcaggagcgccaggcgcttgaagttcacgtcgtacttatccattgtatgccttcatattgagtacgacgtcgcccatctcgaaatagcccgcggccgggatgcaccgcgcgtcgatcgtaaccagcacctcctcgcctgccgcgacggtcgtcgccccgcggaactccacgatccgcacgccgtcgagcgtctggagcgcatcgacgagcgccatgttggtatattcgccattgaagggcaggttctcgatgtagttgcggacagcctcccgacaggcgctctcgaccgtttcggccacgagcatcgggtcgtagtacacgtccgcctcgcagttgaagcggtcggggtcgatgttcaccagcgccgtgcgcacgcccgcgtccttgatctcggcgatgtaggccgcaagctgcgcctcggtctcggcgtcgagcctgcaccgcttgccgtccttctcgcccgcgaccttgatcgtcaggagcgaagcgtcccggttctcgaccgccacggcgtgcttgaccacccgtgccgccgcgatggcgtcctcggtcatcccctcagtgtcgtagcggtccgtgtccgcgatcagcgtcttgcccttcatgaacgcaagcaccttgtcgcggtaccaccgcggacggtgcgggatgatctcctcgatgcgtgtgtccacctcgcccttgtacgtgtcgaagagcttctccagcgtccacgccgcaacggcgaaaatgtagaacagaatcccgatgacggataccttgctgaaatgcgacgtgaagctgtcgcccggcgtaaatccgaacaactccgcaacggattcgttacgcatgaaatccgcgcagatcgtttccttgatttcctcgatcgttctcatcgtaccacaaagtctatttcaatccccataaacccgataccgccgtaaggaaccatttccgtctcctcggccgaaggtgcggtagctggttttattctatcggccgccagttcctgcacgacagactcctctctggttgtcgtcatgacgatatcgagtttctgccccgtgttcagttcgtcggtcagcgcaagaccgttacgttcggcaatttcgaacgcggcctcgacagtcccgcattcctgaactgcgatatccagcagagtctggttatttcgtgtcgtagtctgcatcgacggtcagtttattgttcgttatatcgacttctacatcgttcacccgcataccgtcagccttcagttgagccgtaatctcgcgtgcccatccagtcgtttcgtggtcattggcgatgttcgtgatcccgaccccgagggtcggatattctttcaattctcccttcattgcctgaagaatcgcagcttggttctgaatcgtcacctctccgacctgcaggccctgcacatagacgttttggtcgttacgccgaggatcgatttgcagatctcctgtctcgggatcgatcagtatgccgatattcttagccattatcagtgtgttgcttttttatcctccaaatcttcgagagagatggttgcggccgccatttgttcggagaaaatccctgctcccgttcctccgttggccgcagctccaatgcctactcctgtcagtccggcagcgacggccgtccgcatcgtttcgcagtagcgctgaacgctttccagcgaacggcgcaacgcagcggccaataccaggccgccctgcttcccgccgttgatttccacaccgtcagccgtaaccttcaactgcatccgaccgaccgtagccgaaacattgctcccgttcattgtgacggtcgtatcgccgtgacggtaggtcagcgcttcgatctctgaataaccgatcacggagcattcgcgcagctcgccgcacgaaaggtcggctaccagaacaatacttcccgttgcaggtttcaacagcaggccgccgtccgctccgccttcgatggctgccagacggatgcccggaatctccagttcgttataccgcgcccgacaggtgtcgccctcgacggagacgacctccatcgggcgaaacaggaatacggactgttccgtgcccgtaatctgctgcaaaagctgttttatcttcgaggcgttatccattgttttctatgcgttttccgatggtgacgacccggctcgcacctttgtcgcaaaaagtcgtttcgacgcccaacacgtaatagcttccgttcttgtattcgtactccgtgtcgcggatctcggccagccatgtcggctcgacatagggttcgagccatccggtgaacgagccctcgtagccggtataggcccgcaccttcagctcttcgtcggcccgttgttcgagcgatttccgatccgaaacacccggcaatttgagtgtaaacttgtcgccgcccgtcgtaccgcgttcgatacggatcgtcttgcctttggcatcggttccctcgacgacagccagaaacttccgcttcgaggcgtcccggtacttgaggtcggacttctcgatgttcacggcgaagtcgtaaatgaccttctctccgatctgggcgtattgcggatggacgtgcagggtttttccgcgcaggtagatgttggccttcgtttcgctctgcaccttgcgcagcacgtcgtaccccgtcgctgcatggatagtgaagttatcatacgtgaaatcgtaatcgcatgccacttcatattttccgacctcttcggcgaccgaggtcaataacgttttcaccgttacgcttttcaggacacggtccttgaggtctttgcggaatttgtagagttcatcttcgcaatgaatacgcacggagtcgttatcagtagcgatttcggagacatacccggaaaattcatcgcgcaatatccgatcatatcccaggcggatccgaacagcatctccttcggcgattttctgttcgaccttcaatgcccggttgaaaagcgtccccggcagcgtaatatcggccgtatcagccaggttttcgacgctgcatttgatcgcaaccttttcgagcgccgccagccgatacttcccgatcgttatgtcaaagttcatcgaatacatttcgaacgccgttaaaccggaataaaaagcgaaaccggattgtcgctgtatgctttgatctcgtagttctggttttgcaggccttttgtgtgcggaaagctgacactctctatggccagacgcgtaataccgaacagcagcagaatatcatgctccacgtcgaggtgactggcagtatcgaacagattacgcaactgctggacgctctctttcggatattcgttttccgcggcgataaatatgccttggatcgaaatttcgtagtcgccctggctccatcgctccttgaccgttcccgttcctttgcctttggcaggagttcgtcggatgatttcgttcttgccgctgatcgacaccaggggttcaagcgggaaagtgaaccagttcagaatcccgtcagtcgaacgcttgagccgcaacggcatgacggattttatcgttccgacggttgtcatttccgaccggatttcgtccgcatcggccgtccgcaccccgtccgtgtccctgagtaggaaatacggaggcagagctccgaagccgccgagggcctgcgtcgtgcggatgcggagcggatcgcgcaagccatccgatgaaacgatgacgtcaggggtcgctttcccaatgttgaaaaataccttgcccatcctattgtgccgttgcggccatttgcaatacctgaatcagtctgttctccagatcgcgctgcatgtcgtcgcgcgaaccctcgtagccgccctcgaaaaccagcttatcgaccagcgccccgagtgaaatgttgatcgtcgtggatcgtttgccgcccgtggcgatggccgaaacggctcccgccccggccgtactgccggaggttccgttgcctctgcccggggtattcgctgccagctcgcctcccatgccaggcagggagggcgacgcgatccccagcgaggttttcaatttcgcggcgacgtcgcccagcgaccgttcggaatcccaccgaaggcggatgccgtcgagcgacgccctggctttggccgcatggtctgcgacccgtttcgccccttcgatgatcgcctgctggcggttctcgatatcggcgttgatccgggcgatggcggcctggttctcggcgctgtcgcccagccccacggcctccttgaacttgtaccatccgagtttgatcttgtccaggccgatcataaggccgtttatcatcgtgctgaaatagagcttcacgctctccacgaatcccaggaacgaatgtttcatgaatccgaccgtgccgtcccacagcgtaccccagccctgcaccttgtagcagacatagccgattacggcgatcagtccgatgaccgcggcgatgatccacgtcacgggacacgccagcagggcaaggttcaacccgttctgcgctgcggcccatgcccatttcgccgtggtgacgatccccgcccaggcggccatcgccttggactggagcgtgacgaggaacatggacgtcgccagtatgccgagcgctgtgcccaataccgcaacgaccgtcgcgtgccgctgcatgaactccgagacccatccgatagctgcccccaaggcgtcgatgccttttccagcaagtccgacgatccactccagcgcggtcatggcgggaatcaccaacggctcgatgatcccgtagaggcggaacagcaggtcgcccgccagtccgagaagcgtggaccacttgcccgcggccgtctgtcccatcttttcggtcatgccgtggaactggcccccggcctgcgtcgccgaatagaatgcttgtgtcaccatctcggccgagatcttgcctttctccatctcctctttcaacacgccgatggattttcccgtcttgcgggaaatttccgacagcggattgaatccggcattgatcatctgcagcagatcctgccccatcagccgtcccgacgcggtcatctgcgagaaggccagcgtcaatgagttcaatttgttccggtcacccattgcgatatcgcccagcgccttgatgttgggcatgatccgatcctgtgcaatgccgaatgaaagcatcattttcgcggcatcctgcaactcggctgtcatgtagggtgttaccatcccgtattggcgaatctcctcccgcagcgcttccgatgctttcgtgtcaccgcgcagcagcacgtcgaaggcgacctgcaccttttcccgttcgaaacctgtttgcagcgccttaaatcccgccatgcccgccatgacgattggattggtcagcgtattggcgaacgggatgctgttgaaggcatccgacagcatagtcttgatcttgccgccgttcacccgttcgagctggcggatctgtcgttcgagggccttgacctcgatgttggtacgacgtatggcgttgatgttgctggctggaatccactcgcgctcggcacgtagcgcatcgacacgctcgcggagactgcccagcgtgacaccgcatttctgcatggtgttgctcgcactgttcacccgctgctcgaccttcgcccagacttccaacgcccggttgttggtgatgttgatcttattcaacttccccgtgatccggtcgttcagagagagcgtatattcgacaacatttgccattgtgtccgttttttcgtatcttcgctgcgtatggtagcaggacttataggtatttggttcgtcgtcgccgtggttttctatgtgttgaaggctgcgcgggccgtgctgccgtgtatcccgaaagcgctcggcgtgttgctctgcctgcctgcgatgccctttgccgtagcgtataaaaaccgtgaaacgcatccgtggcaggcgcggtgcatcgtcatcggctggtcgctgctctacctgctgctcgccttcattctctatatggaaaattagaaaaggtccggatcgcggggttctttcccccgtacgtgacaacggcgcgacttgcggaaagtgacccgcggacgatgccggcgcggccctcggtgttgtccttcgcacggaagtaaatctcccgacagtccgaaccttgtgattccgggcctgctatttctgccgtgcggcttccgcctcctgcttgcgtatccacttcagttcgttcacacgcatggcccattcccagtcggtgaggctatcggggtcgatatggaggtaatagcgcagctgggtatccagtttccggacccagtcgcggccctccgcaggatcgacctcggtagcctttaaagcttttccagctcggcctccgcgtagggtacgatcttgtcgagcactcccgacgcgcccatgaacttgtcatcgtcgcggcggattgcctcgctaccgcccagccagcacccgcgcagcagggtttcgttgaacttcagcggatcgttcttgcctgccgtcgttgcgaacgagagttcgcggcgcgtgggtttgcgcaggtagcacacgtggccgtttaccttgatggcgaatacctcgccgtgctgttctttccaagcgttgatttggtcggctgtaacttcgccgataagggtttgtttgttctccatttcgattttttcgttgttttgcccggccggagccggatcgttgttcgtcttcgtctactctctccgtaagaagaggaaaggcagcttgaggtcctggaacttatcgccctggttggtttcgcgcggatcctccgtgaactgtacgcctcgtagcttgtggatcgtcgggaggtcgcccttctccgggtcgccgtaggaaaccactatgtcgagctgaatgtcgagcaacgagccgcccgatgcaatctccagcgcctcgacttcggattgcgtgagtccgatttcgccgtcgttcgagatattcccgctctgaatagccagcgctttgttccctttgccataaagcgcctctttctccttcttggtcgtgtacttgatcgagcggaagcccatcacgtcacggccgcccatgtaggcggtgatatcctcccagccgtattctttgccattgatcattgtcctgtcattttatgcggttttgaacccaagctccacgtcgatatactttgcatatccgttgggcttgacgcgcagcccgatctttacctgcgaagtggccagaatgttctggtcgtagtcgatcttgcactccacgcccgtatcggacgaatccgacggatcgttgcccaagttgccctgtgcggtcatctgcgtctcgatggcctgctcgacgtcggcttcgacggtcgagcaccaggcgggaaccagagtgccggacttcgagaccggaacctcgtcgttgagccactcgaccagctgcgcgtaggcgatgcggtacgccttgtcgatgacgcggcggttggtcagcgcgcggtagtcgtcctcgggcgtcgtggccaggttgtcgtcggtgatgaaatacccggccttgccgacgaacgtgcggaaggtgatataccccttgtcgttgatcgtctccaggtcggccagttcagcgggctcggcccccacgtagaaggtcagcggctggagcgcaccgtcgcgcacgcggctgattttccgctggacggccgaggcggcgatgcgcccggcgacgacacccatcgcggcgttcttcgacgaggccgcggtgtcgccgagcaccacgcccgcgcggttgtactccgtttcggtaaggtccttcagcgccgcggggtccccggcatagccgtagccctcgaccagcgagaagattggcgcacgcagcgtgtccgtggcccagtcgcccaactgctgggctttcggcagcgcggcgaacacgtcggcgtcgagaccctcggtggtcgtcagttcgtaggcttcggccggagtcttgaaagcgaccagaccgcggattttgccgttcgacgccttgagcagggccacggctccggcggcgttgtccttgtcgaatgcgttggcgaaggtctcgctctcggcatagcccgtcagccagagctccgttccgtcgcccgcctcggcgtagaactccttgacgttgcggtagaggttcgggttattctccgacgtgacgcccagcgcctccaggtcggcgagcttacgcagcgtatacgccttgcccagcttgaacttgtcgtcgcccgtcacttccttcgcacccagcgccatcatgccgaggcagccgtccgccatcgcggccacctgtcccaatgtgccgttggcgtagttgattcgtactctcggtaacatttatttgcgttttacggtgattactgccttgtcgcggagcgtggccgcatggttgcgggcctcggattccctgaagaacccgaacccgttggaggtcatgtagacgacaggggcatccgggtatgcggccaggattcgcccggcctcggccttcagacggctcccgactcccgattccgtggttgcacggtctgccgcctcacgggccgccgcctcggtagcctggcgggccgccagttcctccggggtgtcggcgaatgccgttaccgcagaaagtggccgctcgtcctccccggccgttgccggggtgtcatcggtctgccgatccgccgtgccgctctcatcatcggatgcggagtccggccggagaccgggtgtcgtgtccggagcttcggggaccgacggcgtcggttccgcctccttcccggcggcgggttccgtgtcgggagccggctggagatcgggcgattcgttccctacctgcatagacacgtccgcggtctggacggaggctccggccgttttcggagctttcccggcggtttttgcggtatgattgttttttgccattcaattgttgttttaacggtgtttgaataatctgtaagtgccataagccacgaccagcagtccggcaatgcacagggcatgctgccaccaggtaaggccgcgacgctgggccgtcgtgagatctgtttcggcggcttcctgccgggaggtatttccttccgtccgaagctgctgcctggcatgaccgccgccgaggatcgtgtcggcctggattcggtgttcggtctgtcgtacacggtccgcctcgtgagtggaatccgtaaggcgccgccgttggatggtctcccgccgcaggggcggtgttccggtcagcgtatcgactggacgggaggtgtcgtattcccgtgtgacggtctcgacctcctccccgacaacccggtgcagatgccgctcgccgtcgaggttgcggatcagttcctcgcacaaggcccggaaaaacaggctgtcgcgcgtcgagagttcctcgcggagcacctgcatccgaaggtcgttttccgctcggctgtgcaccgccgccgtccggcgggagggcgcgcaggcgcagaacagtgctgccaggaggagcgggaggaggattcgccgccgtgtcatacagggtactttgtgaacagatcccagcccgcccgaacctcgtccatgcgtgcgggcgttccgttctccacgcggctcatggccgcaacgaccggaatcatccgctcgccgctcttggtgtcgagtggctcgtcgggcgacacctgcgctccggcagccacggcccggatgtagttctccgtatggttctccacgggcggcgcatagcgcaagatcatctcccgcagcgtgcggcatccgtgacgcacccggtaggtgtggagcagcacgaacatcgcccggtagccccacggcatcgactcgaacgccttaaaggccgggtcggaactcctcgtctctcccttgtatttggtcgcactccggcggatattccccgggttgcagtttcttagtcctctgctcatcttccttttgatcgttgaactcgaataacttgattaacacggggcacttgtgcgaaggcgtcttgcagcggaaagcttcctggattatcccgctcttgcgctccgactcgtgctccttgatctcgaccttggcctccagcttctcgactttggccgtcagacgggtgatctcctcctgaaggcagggccaccagtttggacgtctcgtcgatacgccgtccgttcttgccgagaatccagcttaccagcgcgatggcgataggtgcaatgacgtaaataatccaggtctccatccgctactcggctgccgcctgcctgatcagtaccacgcccgccttgtctgcccggatgctcttgcctccggcgcgctggaggaacgaaatgatgtcgccgtagtagagcgggttgccctggtcgtcgaacagaagcgaatcgcccagcgcgcgcgacacacagtcctcgtgccatgccagacccgcggcgcagtccgtcgcagcgttggccgcgctccagggcttcagcgtgccgtccgtagcgaccttcgccaccttcgaacgcttgtagaagtcgaaaccgaggtatttgccgatcacaccgcgggcggggtctgcgcataccaggaagccgttgcgctcggcgtccgtcagggagttcagcaactggttgtacatccgtgcgtcgagcaggatacagcggccctcctccgggatgtcctgctcgtcgaaaagcgtctggagctcctcgacggtctgcttggtcatccgtttgcggttgcccgtggcctctttgatgtgtgcggcgacggcctcgccgagcgtctccacgaccttcaccccttcgggaatccagttgtagatgatcgactcgtagatgtcctgcgcgagtttgcggcgcgactggcgtgtgacgctttcgcgcttgttgtaggacagctccacctgctcggcatgggggatgcgcaccgggtccacggtgaactcgtccatctgatagatcagatcgacgtccttgcgttcggtcacgttggcggggaaaaccgttcggtttttctccacgttcggagccgccccggcattcggaacgtgcaccgtcttttcgttcacgaactcgctgtgatcgaccgagcgggccgcgaacgtgttgttggcgaacagtccttcgatgatggacttcacccagatttcaacttgtaatgccattctgttttgatttgttgatgatgcgttttcggctatccccggcagatgtgcagcgaggcggccatctccttgtacttcttctcgtagaggtcggggtggttggctttgagttcggcgagcagtccggcccggtccagctcgtcccacgacttcgcggcatacttgcccgcgtcaccgccctgcgtccctgccaggctggagagcttcgtgcgttccggtacgctgccgaagatcttgcgggcgttctccgggttggccttgaaggtttcgataacggcgtccttggcatcggctgcgatcttgcccgccttgacgagcgcgtcggcgaaacttaccgcttcgacggccacggcgtcctccttctccttcctgagccgggcgatttccgcttcggccgtctccttcgcggccttgaggctggcgatctcctcgtctttggccgcgacggccgcgacgatcgctgcgctgacggcagcttcgtccatctggccgcttttgctgccgagggcaacgatagcctcggccgacaaattgattttttccatttgttctcgattgttggtttggtattctgcatcgaccgcagcgacaagctgcatggggtctaaattcatgaactcgttacgggccgaggaggtgatctcgtcgcacagccccgcatcgagcgcctccgctgccgagaaccacgtctcctcgcgcatcagcttcgccattgtcgcctcgtccttgccccggcggacgaggacctgccgcagcatgtcggtaagccgcgccagtgccttcttctgcttggggctcgtcgcctttccgctctctcccgtgaagtaggggtcgtggatcatcattttggcgaagtccatcatgcagacgcggtccgcagccacggcgacaacggccgccatcgacgccgcgatgccgtcgatatgtacgcagacgggggtgttcatggaaaggatggccgaaacgatgctcatgccctggaagacgttgccgcccggagagttcatccggatatggatcatatcgaaatcgccccggtcgagcgacgcgagctcctgggcgaaatagtcgccgtccacccgcgggccgattgcgccgtaaagccgcattacggcttcccgcggcgtctcgtttacggaatctatgtacgttttttccatcgtcttttcgaaacagcggcttaaccgggtagcaattcgccgctgtgccttgttacaatgacatcgtccgttgctactcggggccgatgccgtccgtcaaaaagcgttgtcctcccaaaaattcgttgcggaagggggattcgaacccccgaccttcagataatgagtctgacgagctggcctctgctccattccgcgattcatggtgcaaatatcgcccgggtagattcgcgtaacaaatagagtgtaaattatttacactctatttttatccggcgggcgaatgccccaattttgcaccgtacaaaccgcccggaagggctaatagaatcgctgtaaatggctaaaacgaccaaaaagccgaggacgaagcgagagctcgacgttctccgggattatgcgtgccgtctgtttctgagcggcgaaacgcagcgggtaatcgccgcgaaaaccggactaacggaggccaccgtcagcaggtgggccagggaggagaactgggacgcccggcgccgggagcagaactcctcgtcggtcgccctggtcaattcgctgatgctggcggccaggaagatctccgagcagatcatcaccaagctgaacaagggcgaaacggacgacatcgacggcatcaccaaactgtcggacaacatcgccaaggtcatggcctcggcaaagcgcatcgcaaagggtatcacccaagacgagatcatcgacgtaatcattgacctggagcaatggatgatgcagcgggccgagaccgacgaggagctgacgcccgaactgctcacgaccataaacggcctgcacaagaagtatatcgaatgcatttccgcacaggaagcgtaacgaatggcatccgtcagcagaaaatacaaggaggcgcaggaacgctggattcagcattgccacgacatcgaacgatcaacggccaagattccgaagggaacggagcaggagcgaaaggaccgcatcgcccgtgcgcgaaaggattacaggtattttgtccgcacctattttccccaccttgcgacgaccgagtgcgcggacttccaggtcgatgccgcggtttacatgcgggaccatgaaaacgcccgcggcctgttcgagtgggcgcgcgggcacgccaagtccacgcatatttcgctcttgcagccgctctggctgaagatccagcccaacgcgcagccgttgatcatgattctggtgtcgaaaagccaggaagccgcccggcgcctgctgggcgacttgcaggcggagctggagtccaacgacctctataacgcagatttcggcaatcaacggggagcgggaatatggacgaacggcgagttcacgacggccacaggcgatctgttcatcgcgctgggacgcggacagtcgccgcgaggcatcaagaagcgcgggctgcggcccaattatatcgcggtggacgacatcgacgacgacgagctggtgcgcaatccccggcgcgtgggcgaagcggtggactggctgctgacggccctgctcggaacgatggcgatggggcgcggacgcctggccgtcgtaggcaaccggatcggccgcacgtcggtcatcggcaccctggcggataatccgcatttccaccataccgtcgtcaatgcgctcgacagaaagggccttccgtcctggccgcagaactacacgctgcgggagatcgccgaaatgcgcggcatcatgggcgagcggcgtttccagcgcgaatacatgaacaaccccgtcaatgcgggaaccgttttcgaggagaagcacatccgcttcggaaagatgctgcgcatgcgggaataccgcgcaatcgtctgctacaccgacccgtcgttcaaggcgtcggcgacggccgatttcaaggcgacgatgctcgtaggcatcacgccccagggcaaataccacgtgctgaaagcctatgccgaccagacgaaggtctcgacgatggtcgaatggcactacgacgcccacgattacgtcggagacaacccggtgcggtacgaaatggaggcgggattcatgcaggacctgctcctcgacgagttccgcaagtacggcgagaaagtcggctaccagatacccatcgtcggagacacgcgcaagaagccggacaaattcgcacgcatcgaagccttgcagcccctgttcgagcgcggggacatcatcttcaacgagctggagcgggattcgcagggaatgcgggtcctcgtcgagcagctcctctgctttgagaaaggcagcaaaattcacgacgacgccccggatgcgctggagggggcgatatggaaactgagcaactccgtgcgtaagaccaacaaccgctatgcggtgggccatcgggccagccgtaggtggtaaaatcaataggacaatgtatctgacaccggaagaactgaaaagccacatgtacgcccatatcgtcgaggagatcaccgagggcgacgagcagatcgtgctgcaagccatcgaagccgccgtcgaggaggtacgctcctatctgcggccgcgttacgacacggaccggattttcgcggcggagggttccgagcgcaatgcgctcgttctggagaacaccaagatcgtcaccgtgtggaaccttatcaagctgtcgaacgtcgaaaccatatacgagatatggaaggagcgctacgaccgtgtcatcaaatacctggagggcgtggccgcggggacgcgcaccccgagtctgccgttgctgaccgacgagaaaggcgaagtccggatcaagatgcgctgcggctccaaccctaaattcagacactcgttctaatgaaaaagatcggatataaaacaaaggcggcagccgctgcggaggcagccgccaagatggaaagaaagcccgctcgccggaacgatgcgcggatcattcgccgcgtcatcaggcggcaggaatccgtgacccgcaaggacatcgccgactggaagcgtgcccgcctgcaggcgacgagtacctacgaaccgaagcaggtgttgctgcaacggcttttctcggaggtgatcgacgatgcgctgatgacctcgcaggtgtcggttctccgcatcggcaaaagccagggcgcggagttcgaactgaagatgaacggccgcaaggacgaggccgagacgcagaagttcaaggattcgggcttgtacgaggacctcgtcgaactgatcgtcgaagcgcagtttttcaaccactcgctcatcgagttcgactatgatccggccggaacggtcgtggccgacctcgtgccgcgtgagaacgtgtcgcccgaagtcgggaaattctaccccgacgccgaaggttcggagacggtggattatcgacttctgccggagttcggccgctggctcgttgagatctacccgcgcaaatgcgacctcgggctgctcaacaaggccgtgccgtatgtgttgatcaagaagttcgccctctcctgctggagtgagctgtgcgagatattcggcatacctccgcgcgtcatgaagacgaacaccactgacgacgaaatgctggagcgggccgaaacgatgatgcgcgagatcggatcggcggcctatttcatcatcgacacgacggaggatttcgagttcgcgcagggcgtcgccacgaacggcgacgtctataagaaccttatttcgacctgcgaccagcagctctcgctgctcaacctggcggccgtgctcggtcaggacaccgagaacggcaaccgttcgaaggaggagagcagcgccaagctcatggaggccgtcgtgaaggccgacaagcggctgatcgagtcctccttcaaccggaagattctcccggcattggccgccatcggcttcctcaaaccgggcctgcggctggagatcaccaaggaggtggacctggagaaactctggaagatgacttacgaggcgtcccagaattacgacgtcgatccggagtggattcgggacacgttcggaatcgccgtgatcggcaagaagcagcagggggcccttccgcccggcggcgacggggagcggcaggacggggaaggtgcggaagacggtgcggacggacacgcttttttcgcggaggccccgcaggacggggcatccgatggagaatccctcacgccgcgggacgaggcgctcgtcggacgcgtggcggccgggaagtctgactactgggacgccgaactgttcgaatacatcgcctccgaccttttgaaggccgttcgaaccgtattcgcgcacacctcgggagcggtcgaggcggccgtcgaatacgacgtgccggacgacgtatatacggcggccctcgaacaaaacctgttccacttctccgcggccaagacgctcgccgaggtgcaggagctgaaccaggcgttccgtgaaagcaagaactataacgagttcaaagcccgggccgcggagatcacgcgcacgttcaacgaccgatggcagcgcacggagtaccgcacggccgtgcaggtcgccgaggcagcgagcaactaccgacagctccggcggcgggccgatattttcccctactgggtctatcgtaccgcaggcgacggccaggtgcgaccgtcccatgccgcgctggacggactgacgctcccggcgtccgatccggcatggcggaagatcttcccgccgaacgactggaactgccgctgccgggtggaggcgatcatggccgacgagttcgaaggggatttcggcgaggagcagaagaagatgcaggcgtttctgaagagccccgaatggaagcggacgacggcccagggctggggcgtgaaccgggccgagacggccgagatcttcacggcgaatcaaatgtacatccgcaaattccccgaccgggcggcttcgctcctcggcaaactccattgccagcattacgggttgccgtcgttcgggaagcggctggcggccgcgacgcgggagttcgtcccgttctcgggcgatcccgcgggatggttcgcccaaaacggccgttttacggacttctccggcaaaacgatagaactccccgagcggacgttcgcaacgcatacgtcgggcaaatacaccgcggcgcgcgtgcctttgctcgacgtgatcgccgaggttctgcggcagcccgacgaggtatggctgaacaattacgacggcaaggcgttcgactgtctgaactacatccgcttttaccgcgacaaggcgatcaacgtcgtgtgccggatcgagaacggaaagacgctcgccgtccggacgtggttcgaaatagccatccgcccgacgaccagaagcggcgggaagatcgcaccggagaaagacccccggctcaagtatcggcgcgggctgctggtgaaaaagtaaggggagcctttcaacgctcccctgtgcttcgcggcccggttcctggtagtcgcctgtgctgtttcaacgggttgaggtcccggtgctaccgatccgcttcggattgacgcgccccgccgccgtatcgtgcccggactcgcccggcccccgtcatccgcgagggttggccgggatgattcatccccggcgctgcgcgcttcgatgcaaatataacgaattttgaacaaaccgcaatgataccgaaacaaatactcgacaaggcgcggatcgacatgcaggacgtcgccgacatcgctgccatgaccggagtgtcttatttcaaaggggccttccggaagaagggattcgacggcacgccctggccgctggcgaagaaggacaaggcaggaacgcggcggcgcgggtcgctcatgatcgactccgccgccctgatgaacagcatccgcatcgcccgcgcgaccccgcaggaggtcgtatggacggcgggcaacgcaaaagtgccctatgcggaggtacacaatacgggcggacgggccgggcgcggccggggttttcaaatgcccaggcgtcagtacatgggcgacgccgaggagttgcggcaaaagatcatcgcacgtctcaaggcatacatgcagagccggatcaaatgaagaagggggcctcgcggctcccttctttcgtcggatcatttcatctccagacggatggacgagggcggcagtttggcgctttgcccctcctgcacgccgggcagggtgtaggcggtctggtagaggaccttgtaacattcgcccgcacgaaccgcggcgatcttcttgatctgcgtgcggaacatcgggccgaacgttccgtcggtgaagcgctggagggccgagtgaatcttgtcgagcaactcgataagccgataggcatcggccttgcggggtgcggcggccgacgaactgaccagccgcaggttcgccgccagaatctccacggtcaccccgtcggcaatctgtccgcctccgccgatctgcgagaacggaacctcgtcgatatcgagcagcgcacagggccatttgaccggaggcgcctcgtagtcgagctgtccccagttcttgtcgatataggccagctcggggacctggtcggccagccgctgttgaacagccagcagaatcgttttgatgttcgtttccattttcaaaagagtttcagttgccttttgtcctcggccggagtgacgctctccagctcgcttccgggagttttcaaatagctgagcattgtccggtaacagcacgggtaaacgggattcacgtaccgctcccagactttacggtagtttttcgcgttgttgcccggctcgtagtgcttttccacgatgtcgaggaccaaacggatgcgccggagtgtatttatgtggtgcttacccattgtttcggcaggttttgtgattatttttgtagtggctttctttaatcactcgacccgctttgtcgcactccggcaggcgggtcgtttacattacccccccccgcgcgaccggggctgttatgcctcggtcatgcccagcgggacgtaccgccagacgccgttgtcgtctttccattccgcgcggatataggttttcgacaggttcggaatataggattccttgatgatggcgataccctcgttgagccgttcgttgtgcagctcctcggccagcgtgtcgagctgaagcaccttgctcgccttgaggttcccgttctgatcgcgggcaataagccgcatgatctggttgatcatcgccttcgtctcgtcgtccttgataagacccatgacggcctccttcacgatggcgatgccgtcctcgaccgtatcgcgccagccgtccacgacgcaccgtccgatggtgatgcgcttgtcgcccgtcgaattggtgaacgtgtggcttttctgcccgtccttcgtccgtttcagcacgtcggccttcatgtcgaggatctgccggaaattgtcaagcacctgctccttgaccgtgcggatgtcgccgctcagctcccggagcatcgggagggcctgttcgatctcctcgtccaccatctgaccgtaaaccttgcggtccttccgggccttgtcggctgccgccttccgttcctgctcggctttgaatgccgcgtactgcgccgcttcctcggcggtcatctgtaccgttttcacttcgttgtcgttcattgctgtaatgtttaagaattgatttggttccggaaatttcgggcaagttcatcgcccaggtagttgaaaatagctcgtaatatcatcggaatgattatatccgctttcggcggataacgcatcaaatgccgataaggaaagcctttcataaaagagagcgaatgaagagagacggtaaatcgaatgccgtccaaacatagttcgaaccctatttgagcaatgtgttcttcctttaatcatcttcatatctatgtagttttttcgatattttgcgagattctcgctatttcaacagatcgaattcgtgtgcctctacccacggattaccgtcccatgttccgcgatcggaaaccttgtcgatcaacgcggcgaaggcttcgcggggagtgtcttttaaaatgtctcctattacaaagtgggttggatgtatggggaaattttttggaaagttcggcgtaaattgcctgatcccttcccgtaaacactcctcgtccgaaatatcctgtaaccgctcgcacttgattctggtgatgcgaatttggtggggcatcaattcggccttggcgaacatcttgttattccaccctgcaaggtcctgcacgctttcgagggatattttatgcgctttggccacctggaacaaaaacgtatcgacatccggatgcccggcggcaatcgtcgaatatctttgcgccacggccacgatctcatcgaccccgtatttcggtaatatcacatccccattattccttttcgcccatccgaagttgtcagataaaaagtccggttgcggaattattatccgtcgcgtcatggtctttcgcccctcgataaccgcctgcgtcaaaccgtagcggtcattaaacatgatctttttcataattcatcagttagtccgactatcgttaatcggcatgtagatattctgcgccaaggtctgcatcgttaaaacagtttgtattgtctggtctcgaaaatgcgtgcttttacggccttgatcgcagccggaggcaacacgccctcttcggccagcaagtcgccgaacgcccacagcagggcgttctgttccgaggcgaactcgccccatttccgaccggggtggcatccgcggcccgacctgccgatcatccaggtcgtagccgccacccaggcgccgtcctgttgcccgatatggacttttacatagtcgcggccgctggtgtagaggatttcggttctgtactcgcccgactgcaatacggggtaatcgtaccacggggccgggaggtcggcccgattgtcgatccgcaggtctgcgtaaggattcgatttcataatgcgttgtcaattaggaaggccgccgagcggcatgtagattatctgcggctggggctgctcggcctgtccggtcggccgttccggccggggattcagcccgccactgcgttggatcgcgcggagtttcacgcccagcgcgtccagctccggcggggtcagcgcaccgaactcctttccggcgatccggcggtcccggcaaaaggcattgatccgcggccagtccgtcgtgtcgatgccgagctgctgcatcaagcggagcgccgccgaccgtttctttttccggagttcgtgctgcgggtcggccgtcgaacgttccagcgcgtcgcacagggcgtcgtactcggcggtggacatggcccgcagactcgacgtccggccgttggtgtactgctgcaccaggcgctccttcatttcgtcgtcgtggagcggcagacggttgaatagcttgtagaatcgtttgtaggtcatggcggatatggttgtttattcggtcagataatatttcgcggcgccctcctcccaaatggtgaagtacgcctccgcgtcgtcggtatagcgcccctgacaatatgcccggtagcctttggtgtggattttcacgccgcagtcgaagcggatgtcgtcggccatcttgcccttcggccgccccttgtaaacctgcgacacgaggatgaacgacttgcgcggaaaacggtcgaacagctcctttttcaatcggtcgaaactccgcacgtcgaggtactgcaccgagtcgatgataacgaaattcgcactcttgggccgctccaaccgtgcgacgagatcggccaccgtcagccccgtcacgaccttgaatttccctgcgacatccttcatcccgagccgcttgatccgtttcttgaacgagaggtttgcaccctcctccagactcacgtaatcgacacgcccatagtcacagagtttcttgcctaacaacatgacgaacgtactcttaccgctggccgactctccgtcgatgaaccagcgctcgaagcgggaggggcggccgaaggcggcctcccactccccgtccagcggaagttccgggatattcagattctcgatctccgagggtgaataggcccgcatgactatacctcctctcctttggtgatcagcgaatggacccgacgcaggctgccgttgctccgacgggcgatctgccggaaatccgtgccctccggagtgttcgcctgggcgatcatcatggcctggccgagcaggaacttccggcgctcgtcgccctcgggcggcgtgatgctgttgtacttgtcgccgcagcggctccggatctcggcaaaccctaccgtcttgaactcgatgccgcgctccagcttggccttgaagccgtcggcccccatcagataccacgagcagcaaccctccgtgccgttccatgcggccttgatctccaggaacgcttcatacaccaggtcgcccgcctcgtcgaggatgatctgcggatggtcgagcgtccgcaggtaaaacacaaggtcgtcgtagacgtccgcataacggctgacggagttcagaccgaactcgcgggcgatgaagcgcaccagccgctgcttggtcttcacctgcgagcagtccacgtagacgacgttcttgtgcgtcttggcgtggtattgtgcggccaccgtcttgccgatgttcggaatatcgcagaacatgccggaaaggctctttgcgcggcacagttccagttgcgaagtgaggtattcgaaagtcggcgtcttgacgatcttccactccgcgccgtcgtcgaggctcacgcccagccgccgggcgatggacatccatttcgcgtcgctcagcttctgttcggtgttgcctttcttgatctcgctgtaaaccgaggtcgaaatgcccagggcgacggcgtgtttggcgtccgtggcgtaattctgcctgttgccggatatggccagcacgatgcgggttttaatgtcgttcgaaatcatatctcaatgtgttttattatcgttctaaagctcatgttttgccagcgccgcgtagtcgatgccgaaatcgaatacctccgcctcctccggcggtgcggcaggggccgcttcgacgatctccggctcctcatgggccggaacatcaccgggcaggagccgcactttgcagatcttctcccgagccatcatggcgtcgaactgcgcgttgtatttcgcctgctcggcgtaggcttcacggtcccgctccgtctgctcggccgtggcctcgttataggcttcgatacggcggcaggtggcgatataggccccgtgctggtaaatatacacctccgggacattgccctgctcgtcgggcagataataggcctcgacggtgtagtcgttcggcgcgagccgtccgatcaactccggcgagggcagcgcataatcttcgtaatggacccggcagtacttgctgcgccggatcgacgtgcgcacctcctcgccgatgaagcggtagagcagcgccttgtccacgggcgcgagatccggattctggtagcggcagagcacctcccagcgcgtcagccccgggtagagcttctggttcggatgcaatgcgttattgtattcgtggatggcccggatgtcgtcggccacgagctgctcgtaggtataggtcgcctccttgtaggtgttgttgaactcgtcatagaccttttcctccttcgggcggttggcttccaggcgggcgtaccagcggccgatgccgacctgcgagcgcttctccacgccgtacttcttcacccggttgaagtgctcggcccgtttctcctgcgagttaccggggttgcaccaccgcacgaaggggaacaccacgcccgcgcggatcagcccgtcggcgaagttgttcacgaggtggtgttcgacctccacctcggccgggcagttccagccctggtggtcgatcagccggaacatgttccgcacgcagtcgatgaacaggtcggccgttttgaggcggttgtaggcgtaaccaacgacgcagccgctcgccacgtcgtaggcataataggctttgacgcggtttccgtcggccatcttgcgcggcaggtcgcggtcgtcgagcgaaatcttcgagaacgcccagaccggggctttgcgcttgtggtgtggacggtagcggttgttgaagtcccacgcactgtcgtgcagtttcgaccgtagggcgcggttcttcgggttgttcaggtaattggcgacggtcgtttcgctcaaagcgatcggctcgccctctttgtccgtgaactcttccgggtcgaacagttccccggtttccgggtcgtacacgttcagctcgccgcagacgaactgattgtacatctcggccaccgtcgtattgaaggggcgctccggcaggctgtccagcgaaaggatcagccgctcgatcttgtagttcaccttacgggagttctgattttggaaccgaccggaaataaggcaggcatatccttcccgtttgaactgggcgaccttcttgcgaaaacggagcatgctttcgggcagcgtgtggccgaactcccgtttgaaataggtaatggtttcggccattgagtcccatccgatacggccgacacgtcgcagggcattggccgacgccatcagccgcagcaccgccttgattacggaagcgtttaccgtgtattcgttgatcttctccgccggaagggccgaaccgttgtcgaaacggaaggccgaaaagtagctccgcgcctcggcatcgggcgtgtagttcgcccgaagccactcctgcaacggcatcgtcgagatgtccggtttgcgttcctttacggccaggcggtactttcccggcagactgtcgaatacgatcaaagccttacggccgcgacaggcccgttgagcgacctgtaccttgcgacggttcacaagttgatcgtatgccggtttactcatgacctccagaagttccggctgcgtaatacaaagtatgttgttaaaatactccatttgtcgttttctgtgctcccgtgccggcatcgctccggagtaacgcctgtgcgttcacgggaaaatcgctatatttgtctgttcaactacaaattttagcgattatggaaaaagaacttgaaaaaatagaagtagtacgtttcgaaacgtcatatgacgatggaaccctcgatatgtacactgaacaagtgagatcgttgtgcaaagcttttggtcttaacttcaaaattattgatcagcatcttgaaggtgccgaggtactacgctattatgaaattttcatttccgcatcttcattcctcgttgaagacttgcgtcacgtcatcaaaactttcattctaacataccacatgccccttatgcacgtgaagacaatagagatggattctgaatcatatctgcaaatgcctgccgaaacctttgaggtagagaatctaaataagtaggcgaaaaacgatttgaccgtctaatgcgcttcactattccccgcctaacaaattgtattaactcgtcttttccgactacttttgccgcagtttcaaaagatattacggtgcttcttgttatcatcgcgtgcttaaattgattcatgattttatccgcagtgaggccggatgcggatcggcgagtctgttgtagatcgtttgcagggagtagagcatgttgccccaggtcgaaacggtgagatcgtcgaagctggcgaccttctgcccgtcaatgtggattgtcgtccggttgctttccaaatggacgacgacctcgatccggtggccgaacttctgacgcatacagccgttttcgaaagtggtatccacgtccggcaggtaacctttgggagcggttattcccaagtagatcacgccgccgcgctgaaaggccgctttccgcagcatattgtcgcgcgcgctgttgcctttgtacttcaaagcccggtcgagggtcgagcgcgtgatcttgaaggtcttgaccatctccatccggaccgtcgtaggcaataagatttgttttgtcgccatactatttcaattttttctgtaactttaccccgttagtacattgtatcaacgctgcaaatatatacacaatttgaaaacaaaccaactatttcgcaagaaatattttcatactgaaaacagatgattgctaaagcagacattctcggacgcttaaagttggcgtctaattcgacctctgatgcagacttggcgcgattcctggggatagctcccgcaacgttgtcaaattggaaatctcgcgggagtcttgattacgatcttgtgttttcaaagtgtgaacagctcaatttggactggttgctgactggtcgcgggaacatggaaaaagaaccggatctacaacaggccggaatacaagtgcaggaaaagttccctctcaaaaccgacaatctggtcgatctccagcgcattcccctttacaatctggaggcgacggccggattggtttccctgttcaacgatgtcgatgcgattccgatcagctatatatcgttgccggatctgcctgcatgcgacggggctgtttacgtgcgcggggattcgatgtatccattactcaaaagcggcgatattgtcctttacaagcaggtacacgacatgcagtacgggattttctggggtgaaatgtaccttatatcggccaatgtcgatggggacgagttcgtgacgataaaatacatccataaatccgaacgggaaaactgtgtgaagctcgtcagccataaccaacaccacgagcctaaagatattccaatctcgatgatccgtgccctcgcattggtgaaagcaagcgtgcgttataatacgattcgataggccctcgtgcagccctattgcaccccgcaaagagggtgcgcacacgctcaaagtaggataaaatagactaactgaataaatatcaatcgattaaataaaaatcaatccccaaattatagggcagtttcctgccttctattcgccgattttcggggtttagcgccgattttcgggcggtttcctatgttttggagggggtcaaaaaccgggttttgtaagtccatttcccggaaaatgtaagtccattttgtaagtccaaatgtaagtccaactcgatttttgccgattttccgtattgcaggcattacacgaggaaaggagggacgacgccccgttttaacgtcgttcaactgctattgaaatagcctttgtagagccgaaaaatgccgtcagacatacacgaggccgcgaatacaacgaaagagggctgaatcgcctgattctgccctctgaaattataccgacattatagcggttgccggatttggtccggtttattataccgaaattatatcaaattatacgtttcgttttgtgcggcgcgtccggggtttgttgcgtatctctttgtcgtacaatatactactgctgttctctaccgatgcttctatatacgtttcgttctccccctcataaaagtgctggaattttgggtgcgaactattttttc

SEQ ID NO: 10454 - DNA, 16155 bp, Unknown
  gut microbiota DNA sequence
atgcgattatgtgctgcaaacgttggttccgtagctcagttggatagagcaacagccttctaagctgtgggtcgagcgttcgaaccgctccggaatcacttgagaaaaacgatgaaagatccgctaaacaataactgtttagcggatctttcgttgtcatggtgtgccgggcttgtgagaggattcgccagggaccgaagatgaacggagccgtgtaatccggcagtgcgttgtctgaaaaaagctctggccgattttccggtcggccgtctgaatgttgcgggcagtgtctgaagtatgtaaatatcggtattgttatcgggttatcgtccgtttccagacggttttgttgccacagttgtccgtgacggtcagttggagcgtgtagctccggcctttcggggtgcgggagtcgtcgaaggtgtgggtaatggtgccctgcatcggattgcgttcgagcaggatccactccccgtcgagtgtggccgtatagctgcctatgccggagaagttgtctcgcaggcggaaggtgatgctgcgcgttctgatcggctctccggctttgaagcggggctcgatgcgtggcggaacggtgtcggccaccacgcagaagtcgcccaatgtgcgggtcgaaagggtgacggcgccgtttttatattttcctccggcataggaaaccttccctttgcggacgaaacccagggtggtgtggggttgtaagttctgaggaacatatgcccggatcgtaaccgtagccgccgtatgcagaggcgtgtcgtaatcgaggatcgaatagaggggagagaggacggcgaccgacggcgcggcggcgaattgggccgggcggctcgactgactgaaaaagagcggttcgtagaagacgccggcggggatgtgaaccgatgcctctcctgctgtatgcgagaagggccggcggttatcgacgatgagagccgtcgaatcgcatacggcgcgaaaatcccgctgtgcaggctgtcggatcgtccggaattcgagtatcgagcggttgccgctgtcgtcttcggcttcgatgcggatctgctggctctggccttccgaaggagtcagcagggcctggtttttcaagacggggtagaaatcgtcgatgcagccgtcgagtcgggtgaggcggatcacttcgttgcgcgaggcgacctgcatggggtagtgggtgacggcgttgcagtagcgggtctggtcgaaggcgaagccgtcgatacgaagctcgaagatcggatcttcgtctgcaaattcgcgtatgcgccagagcccgaatgtgttggatacgtcgtttttgcggtcggtcgcttccaggatgaagtaacctcggccgccgacggagagtgctccttcctgtttgagcgcatagcgtccgggcgttttttcgaccagctcgacggggcggggccgggcgtgcaccgggacaccgcgcacgctgtccacctcgacgtagtagagtttcaccaggcgcggcggaatgtcgtcgcgggtgcggatcacgccgctggaaatggtgttgagggtccgctgcgtgcgggagtcgcggatctcgaaatgcaggtgcgggcctgcggacgagcctgtatttcccgaccaggcgaactgctcgccctgtttgagcggaaaccggtcggccgagggatagagattgatgctgtttcgccgggtgcggtaacgctcctcgtgtacgtatttttcgatgtcgtcgcggaacttcgagaggtgcccatatacggaagtcgtgccgttgggatgggtgatgtagatggcgcgtccatagccgcccggcgtgacggcgatgcgtgagatatagccgtcggccgtggcgagtacgggttttcccgtcatgccatcggttttgatgtctatgcccgaatggaagtggttgggacgcatttcgccgaagttggcggagtaaagcccggccacgttccgcaggggaaagatgtaatcttccggggcgaggtgctgggccgaaacgggagcgctgcacagcagcagcgcggagatcagaagtcgtcgcatggttcgtcgtttgtttggatcaattcgccggcggcatcgagtacggcgtcgtagtcgtatccgagcgaaaggccgtagcggatcagtttggttttcaaatcgtaagtatctttgtatcgggtcagtcggagctttttttcgagctgtgtccgcagccgttcggactggttcgccggatccagtcgggcaagagcttcatcgatgatcgctgcggcgatgcctttgagccggagcgaggtgcggatcttgcgggcgccccaaccgctcagccggattttgtcgcgcacgaaggcttcggcgtagcggttgtcgtcgatgaatcggtcggcgaggagcttttgcagcacgccctgccgggccgaaggcttcacgccccagcgctgcatcagccgcagggcgtcgcccgaggatttttcgctccgggcacagagccggatcaaggccgcgtaagcctgttcgggcgttttgtcgcgttttatcttctttgcaggctgcatgtcatgcggtttttgtcgttcaggtcgcggcgcacggcggtatccggaaacccttcccgggtcagcatccggagcgtttcgtccgcgaagttctcgtggatctcgaaatagagccgtccgccgggacggagcagccgccgggcattgcgggcgatggcccggtagaaaatcagcggatctccgtcctcgacgaagagcgcctccgccggttcgtaacccgtaacattcacgcgtatcgaggctttttcgctgcgggggatataggggggattggaaacgatcaggtcgaactgttcccgttgtccggggaatagctccccgagggcgtcgccttgtcggaaatccacttttgcatcgagtctccgggcattttcgcgggcgatggagagggctttttcggaaatatcgacggctgtaatacgggactccgggatcagccgggccagtgtgacggcgatgcagccgctgccggtgccgacgtcgagtacggcgggattgtccggggcgggggattcggcgatccagcggaccaactcttcggtttcgggacgggggatcagcaccccttcccgcacctggaaatcgagcccgtaaaattcggtatgtcccagtacgtattgcaggggacggccggcggccagttcgccgatgatccggtcgagttcgtcgattccgagctccttgtccggttcggcgaccaggtcggtcaggcagagtccgccgagttccatcacaacgatccgagcgatttgccgcgcttcgcgctcgccgtagagggcggtgagcggcgtttcgatccgtgcgatgatttcccggcgtgtcggcatagtcggtccgtttattccacagtacgcagggattcgagccgttcgaagaagtcggggaagctcttggccacgcatgcgggattttcgataacgacgggggtgtcggcgttcagagccgctaccgcgagcgacatggcgatgcgatggtcgtcgtggctgtgcacgtgtccgccccggatgcgtccgccccggattttcatcgtatcctcttcgtcgagatcgacctcgatgccgagtttggcgtactcctcgcggatcgactcggcgcggttgccctccttgttctccagccgggaggttcccttgatgacgctcgttccttcggctgaagcggccagggcagccagggccgggaaaagccccggacattgggtcgcgtcgaatgagaaggcttgcagcggacggtgtgcgacggtgatcgtgtcgccctcgtcgatgacggatgcgccggcccgtatgagggcagtcataacggctgtgtcggcctgtcgggagagtaccgagaggttgcggatcgtcacttcacccgcgacggcccccgccaccagcaggaaggcggccgcgctccagtcgctctcgatttcgaactcggcaggccggtagcgttgtcctccggccacgtagaattctttatagtctttatgcaggatttcgatgccgaagcgctcggccgtgtcgatcgtgatgtcgatatagggggtcgatattacgtggggaacgtgaatcgtcgtctcctcttcggcgatcggcagggccagcagcagtcctgtgatgaactgggaggaaaccagcccctctacctgaacctcgccgccccggatcgggccttggatatggaggggaagatggtcgttgcggtcgtgaacccggacgcccagtgcccggagcgtgcggatcatcgtccggaacgagcggtgcagcagcggtccttcgcccaccactccgatcggcgtgtcgcagagggatgcgatcggggtgaagagccgggtggaaagccccgactggccgacgtagagtttgtcgcctgcgggggagaggccgccgtcgatttcgagcgtgcgctctccggtgcgccgtacccgggcaccgagcgcctcgatgcagcggatggccgaacgggtatcgtcgcaaaattcgatgttatgcagccgggaagtaccttcggccagcagcgaggcggccagggcgcgctgtgcgtaacttttggaacatgggggaatgcaaatgcctcgaaccctccccgggggaacggattgatccatatacggataattactgtatttttcggtgcggcagttcggagtttagtccgttgcggcacttgtcaaaaagtcgttgtttcgctttccattttccgaatccggaatgattcgcgcgaactgtacgatgcaaaccggtgttcgaaaatggttgtctgtttgttttttccgggatgcgctcccggaatcggttgcgagtccgcaatcctttccggatttcgtttcggacttcccgggcttgccgggaggggcgcttgccgcaggcggaaaacggttccggattccggtccgggttcgtaccgtcgtaggcaggagtcgggcggattccgcgaggccgatccgccgggcattgcccgacagaaggcgggtacggtctatttctcctcggacggattctcttcggctgcgctcgcgggttgtcccttgcggagtttgtcgagcgtcggactgcgccgcagttcgaaatgctgtcccagatagaccttgcgcaccatcgggtcggcagccagctcctcggccgaacccgccttgaggattttaccctcgaacagcaggtaggtacggtcggtgatggccagcgtttcatcgacgttgtggtcggtgatgatgacgccgatattcttgttcttcagcgtagcgacgatgctctggatgtcttcgacagcgatcggatcgacgcctgcgaacggttcgtcgagcaggatgaaggccgggttgatcgccacggcgcgggcgatttcggtacgtcgccgctcgccgcccgacagctggatgccgaggctcttgcgtactttctgaaggcggaactcttcgatcagcgcttcgcagcgtgcggcctgttcgtcctttttcagatcggtcatctccagaacggccttgatgttgtcctcgacgctcaaacggcggaaaaccgaggcctcctgcgccagataccccacacccatctgggcccggcgatagacgggctctttggtgagttcggctacctggccgttgtcgtcttcgagaaagatctggccttcgttgggtttgatcaggccgacgatcatatagaacgtcgtggtcttgccggctccgttcggacccagaagacccacgatctcaccctggttcacgtcgatcgaaacgtggttcaccacggtgcgggctttgtatttcttgacgagctcgctggtgtaaagacgcattttttatgaaatttttttacaaagttatgtttttttccgaattatttttatctttacattgaaatttgtgtttgagaagagttatgaagcaaaatgaagattccttgctgcgcgagaaactgaaagaatatttcggcttctcttcattcaaggggaatcaggaagccgtgattcgcaatgtgttgagtggaaaagatacgttcgtgctgatgcctaccggcggcggcaagtccttgtgttaccagttgcccgccctgctgatggacggcgtggcgatcgtcatatcgccgttgatcgccctgatgaaaaaccaggtggatgccatgcgcacctattctaacgatgcgggaatcgctcacttcctgaactcttccctgaacaagagtgccatcgcgcaggtgcgcaacgatgtgttggaggggcggaccaagctgctctacttcgctccggagtcgctcaccaaagaggataacgtggcgtttctgcgcaaggtcaaggtttcgttctacgccatcgacgaggcgcactgtatttcggagtgggggcatgatttccgtccggagtaccgccgcattcgtccgatcatcaacgagatcggcacggcgcccctgatcgccctgacggcgacggctacccccaaggtgcagatggacatccagaaaaacctgggtatgagcgacgcttcggtattcaagtcgtcgttcaaccgccccaacttgtattacgaaatccggcccaagcacgatgtggaccgggagattatccgttacatcaagcagcacgagggcaagagcggcatcatctactgcctgagccgcaagaaggtcgaggagcttacggagttgctcgtagccaacggcatccgggctttggcctatcacgccggtatggacgcccagacacgtgcggccaatcaggacgacttcctgatggagcgggccgatgtgatcgtggccacgatcgctttcggcatgggtatcgacaaacccgacgtgcgctatgtgatccattacgatattcccaagtccctggagggatattatcaggagacggggcgtgcgggacgcgacggcggcgaaggacactgccttaccttttatagttataaggatattcagaagctggagaagttcatgcagggaaagccggtggccgagcaggagatcggcaagctgctgctgctcgaaaccgtgtcgtacgccgaaagttcgatgtgccgtcgcaagacgctgttgcactatttcggggaggaatatcctgaggagaactgcggctgctgcgacaactgcctccaccccaaacccaagatcgacgcccaggcgtcgcttcgcatggcgctcgaggcgttgcgcgatctgggggacaaattcaaggcggactacctggccagcgtgctggtcggtaagaataccgcgttgatcaagagttacggacacaacaagagtgaatggttcggggccggtgcggaccatgacatccgttattggggagccgtgatccgtcaggcgctgattatgggccttatcgataagaatatcgaaaattatggattgctgtcgatcaataccaaaggagaggagttcatcgccgcaccccgcccggtttatataactctcgaccacgactacgacgaggaggagaaagagaccgatgcggtggctcctacgggtaaaggaggggcggccgacgaggagctgttctcgatgctcaaggatttgcggaagaaggtggcgcggcagcatgatttgcctccgttcgtcatcttccaggatccgtcgctcgaagatatggcgatccagtacccgatcaccatcgaggagatgcagaacatctcgggcgtgggtgtgggcaaggcccgcaagttcggcgaggagttcatccgcctgatccgcgcctatgtggaggagaaggagatcgtccgcccgcaggatatgatcgtcaagtcggtgggcaacaagtccggcaacaagattttcatcatccaggccatcgaccgcaagatggatttcgaggatatcgcccggaccaaagacctcgatttcgacgaactgctgaccgagatcgaagggatcgtcaattcgggaacgaaactggatatttcctactacatcgaacaggtgatagacgaggataaatccaatgatatttacctctatttcaaggaggatgcccagagcgattcgctcgacgaggcgatcgaggagctgggcggcgactataccgaggaggagatccggctggtacgtatcaagttcatgtgcgaacagggcaactgacggggcgggcagaggcgttccttatgtataacagagtgcgggaaatcccgcgaacttatgcagatatggggtatagattgcagcgattcagagtaatactgatgacatccatagcgattatgatcgtggtgacggccgtatgtctgttcgtacatccgacctccggaggcgcacttttagtgctggcgctcggcgggagtctggcggcccttatcctggattaccggcgcagggagcgggagcggaagaaaagcaaatgagaatcgtttaaccataaatcgagaagctatgaaaaagaagaacgcacaatttaacaagaagacggcgaccgtcgcgttgatttttatgctggctacgatcatgtggcttacgatcaatgtcgtttggtgcttgcacgacggtcattatgcaaacctgattattccggtgcttttcgtcgtcgcgggcgtcgcaatgttttacaacgaatttcacaagaaacctcgcaagcatgtcgaggatgtgaagaaatacctctgatgattgtgtcgtccgaaaggccagtccgaagctttctgcggccggtaaatcagggcagaggggtgtcgttgggcgagagccggtccggtgaaggaaaatatgccggccgacggatgcggcttcgggccgtttctgtggtcggagcggaatcgaacgggtgcgcgtcctgcacccgacggtgttcggagaaagggtacgacgcttccgataagcggccgaagagggcgtccgctccgggaggtgccggacggtaggcgcgaagcggtcgccgtcggcagagacggagaagatcggctctgtgccggaagagtccgggatggagactccgggaaagatattcaaccgaaacgaatgagtgaagtaagagcgaagaaagcgttgggccagcattttctggtcgatctcaatattgcccgcaaaatatgcgattcgctgggcggcggtacgtccgaaaaaccgtgtccggtgttggaggtgggatgcggcatgggtgttctgacccgatttttgctgaaacggacggatgtcgtgacatacggcgccgaaatagactccgaaagcgtggcgtatctgcatgcgcattatcccgaatttacaccccgccttatggagggcgatttcctgaaaatggatttgcggacgctgtttcccgaaggactgcgtgtgatcggcaatttcccttacaatatttcgtcccagatatttttcaaggtgctcgaaaaccgggacttgattccggagtgcgtcgggatgatccagaaagaggtcgccgtgcgtctggcggagcctcccggctcgaaggagtacggcatcttgagcgtgttgttgcaggcatggtatgacatagagtacctgtttacggtcaatgaaacggtgttcaatccgccgcccaaagtcaagagcgccgtcgtgcgtctgcgccgcaacggagtggaccggctcgactgcgacgaacggttgttcgtccgcgtggtcaaggcctcgttcggccagcgccgcaagatgttgcgcaactccctgcgggcggctttcggcgatttcggaggggcggaacatcccttcttcacgcagcgtgccgagcagctttcggtcgccgatttcgtcgaactgacacggtgggtggatgcgaacggaatatagttttgataaaacgcatacggcccgattttcgggccgtatgcgttttatggaagaaagtcgtttcccgttaaatctcatgctttggatcgaccgctcccacgacggccgtgataagatcttcgcggcggaggtatttgacggccagccgttgtacctcggccggggtgattgcctgtatccggcggatgttctcttcgatgacaccgttgttcgtgccgcagaggaggttttcgatcgtcacgtcggcgatgccgaacggtccgtcgaggatgcgcatcacctcgcccgtcatgatgttcttcaccagcgaaagttcctcttcgggcatcggctcccggcgcagccgttcgatttcgttgtaaatttcccgaagtgccggggccgtcacctcggctccgacctgggcagcgattcccaggtaaccctcccgctcgaaattgaccatggcggcacccacgccgtacgtgtaaccgtgctcgccgcgcaggttttgcatcagccgcgagccgaaatagccgcccagtaccgtagcgacgacctgcatcccgacgaaatcgggatgtgtgcgggtgaagagcagacgccctacgcgcagcgaggattgcacggcgtcgggcctttcgacgaaacgataggcttcgctgcggggagccggaaattcggctgtggcgctgcggtcggcacgggggagtttttcggccagggcgccgatgccttgcaactcctcctccccgatgcggccgctgcatacgaccagacagttttcggccgtatagagtcggcggtagagtgattccaggtctgcacgcgtgagcgtgtcgtaatttttctcgggataggagatgccgtagggatgtttgtcgccgaagagagcttcggcgaagatttcacgcacgacggtatcgaccttgcgccgttcgatcgtgagggcctgcttgcgtttttcgcaataggtacgcaattcgtcctccgggaaaagcggttgcaggaggatttgttccgcgacttcgagggtcggagcgaaaaatttcgataacgaactgaaactgatatatacgtagtcccgatcgacattgacttcgaagtaggagccgtagaaatcgagccgttcggcgatttgccgggccgtcatgtcgcggctgccttcgctcaacatattggccgttgcggaggctgcgaaaggcgcgtgctgcatcgacgatccggcgcggaagacgaacgtgaagcgcaggacttcgaaatcgtcggacggaatggcgtagagggaggctccgttcgggagcgtatggcgctgggcgcggggtacatcgacctcgcggggagtgatcaggggcggttgtttcattgtttggctcggtagattagggtggaacgattttcgggacggaacgtgcggcggctgaagtcggcgatctgttcggccgtttgcgaacggtagatcgtcacttcccggttgatgaggggcagatcgccgagcatctcgtagaagccgaggttcatcgccttgttcatcacgttaagctcgccgaacagggtattcgcttcgaatttgttcttgatcttctccagctcgtattcgtcgatcttctccgtttgcaggatttcgatttcacgcaacagggctgcttcggcctgttcgacggtggtcgagggcagcaactgggccgtgaagacgaaaagccccggatcgacttctccggaaacgtaggcattgacgcttcccagcagccgctgttctctgaccagatgctgatagaggcgtcccgattctccgcctgccagcaggtcggaggtcatatcgcccaggaagaagtccggagaagtgcgcgagcctatgtggtaagccagtacgatcatcgtggctggtacgttgcgttcgacctcctcccgtcgggattcggtttgcggcggttcctgcggaagcgatgccgcaggttgcggattgtccgcgatcgggtcgaaccatttttcgcacagggcgatcgtccgctcttcggggatatctgccgagatggagagaatggcgttcgacgggtggtagaaacggcggtagaaatcgcgcacttcgtcgagcgaggctccggcgatgtgatcgggcgaaagtccgatcgtcgcccaccggtagggatgcacgcggtaggccagggcccgcaacagcatcgacatatcgccgtagggttggttgaggtatcgttgtttatactcctcgatgacaacccgtttctcggtttcgaggttttcctgcgagatgtcgagtcccgtcatgcggtcgctttcgagccagagggccgtttcgatgttgtccttgggcagggtgatgtaaaagtccgtgtagtcgttgttggtgaaggcgttgttctccccgcaggccatctgtaccggtgtatcgaagtcgggaaccgccttcgtgccccggaacatgagatgttcgaacaggtgggcgaagcccgtgcgggagggattctcgttgcgggccccgatcttgtagagcaggtttacggcggccagtttggacgagcggtcgcggttcacgacgaccgtcagcccgttcggaagcgtatgtttctggtagttgatcacgttgttgcaaattttttcaaaggtacgattttatttgcaaaaagcgtgctccgaaatggaatggccgtttctccttgtttttgaagcgtttcgatagaaggtgttgatactgttatttttataacattgtacgttgcgatatttgtccggaaatatggcggaattttcgtttggaatttttaactttgtgccgattcaggcagatttcacagctgaaatagtacaatctaataccgataaaaatggcagaaaagaaatttatcacatgcgacggtaattacgcggcagcccacatagcttatatgttctcggaggttgcggcgatttaccccatcactccgtcctcgacgatggcggaacttgtcgatgagtgggccgctcaaggtcgtaaaaatattttcggagaaacagtccgggtagtcgagatgcagtcggaggccggtgccgccggcgccgtgcacggatcgctgcaaagcggtgcgctgactacgacttttacggcatcgcagggtctgttgctgatgattcccaatatgtacaagatcgccggcgagttgttgcccggcgtattccacgtatcggcgcgtgcgctggcggcccagtcgctttcgatcttcggcgaccatcaggacgtgatggccgcgcgtcagaccggcttcgcaatgctcgccacctcgtccgtgcaggaggtgatggacctggcaggtatcgcgcatatcgtgtcgctcaaggcacgcgttcctttcctccatttcttcgacggattccgtacttcgcacgagatccagaagatcgagctgatcgacgaagcggcgctgaccgcgatgctcgaccgcgacgcgctgaaggcgttccgtgccggagcgctcaacccggctcatcccgttacgcgcggcacggcccagaaccccgacatctatttccagacccgcgaggcgtcgaacaagttctacgatgcgattcccgacatggtagccgaggcgatggagaaaatatccgagatcacgggccgcacctacaagccgttcacctattacggtgctccggatgcggagcatgtcgtcattgcgctgggttcggtgaccgaaacgctgaaggagacggtcgattacctgaatgccaaaggcgagaaaacgggcgtggtgaccgtacacctgttccgtcccttctcggtaaaatatctgacggctgtactgccccagacggtcaaacgcatctgcgtactcgaccgcacgaaggagccgggagccaacggcgatccgctctatatggatgtcgtcgaggcgttcgccacctgcaaggagatcccctgcgagcgcaagccgctcattatcggcggccgctacggtctttcgtcgaaagatactacgccggcacaaatgctggccgttttcgccaacctgaaggcgaacgaacccaagaatcagttcacggtgggcatcgtggacgacgtgacgttccgttcgctgcccgtaggcgaggagatttcgctggcgaagcccggtacgttcgaggctctcttcttcggactgggcgccgacggtacggtgggtgccaacaagaactcgatcaagatcatcggtggtacgaccgacaaatattgccaagcctatttcgcatacgactcgaagaagtcgggcggctacacggcttcgcacctgcgctttggcgacaagccgatcacctcgccctacctggtgaccacgcccgatttcgtggcgtgccacgtgccttcgtacgtggataagtacgacgtgctgaagggcctcaagccgggcggttcgttcctcttgaactcggtgcacgatgccgaaacgacctgccggacgctgcccgatcacatgaaggttttcctggccaagaataagatcaacttctatatcatcaacgctacgaagatcgcggcggagttggggctcggttcgcgcaccaatacgatcatgcaggcggcattcttcaaaatcgcgaacgtgattcctttcgagaaggccgtcgaggagatgaagaaagcgatctataagagctacggcaagaagggcgaggacatcgtcaatatgaactatgcggccgtcgatgcgggcggtaacgcagtcgtgaaggtcgaagtcccggccgagtggacgaatatcgagctgaaaccggccgatcacggcgtggatatggctcgtccggagttcgtgcgcaacatcgtcgatccgatcaatgccctcaagggagatctgctgcccgtgtcggcattcaacggacgtgaagatggtacgtgggagaacggaaccgctgcatgggagaagcgcggcatcgccgtcaatgtccccgaatggcaggtcgataagtgtatccagtgcaaccagtgcgcgtacgtttgtccgcacgctgtgatccgtcctttcctggcgaccgagaccgaggcggctgcatcgggcaccgaatggaaacagggattgggcgacacgaaggagtataagttccgcatccagatctcgccgctcgactgtacggggtgcagcaactgtgtggacgtttgtcccgccaaggagaaggcgctcattatgaagccgctcgaaagtcaactcggacagcagaagaactgggattacatcaccaaacatatcggttacaagaaggtggtcgataagaccaagtcggtcaagaacctgcaattcgagcagcccttgttcgagttctcgggcgcttgcggcggctgcggcgaaactccctatatcaaggcgatctcccagcttttcggcgaccggatgatggtggccaatgccacggggtgtacgtcgatttacagcggttcggcaccttcgactccttattgcaagaatgcggatggtcgcggtccggcatgggccaattcgctcttcgaggacaatgccgagttcggtctgggtatgtatgtcggtgcggagaagctgcgcgatcggattcagatgctgatggaagaggctatcgcccagtgccagcgttgctccgaagagctgaagggcgttatgcgcgagtggatcgaagcacgggtttcgtcgacccggtcggccgaagtcgctgcccgtctggttccgatgatggaggcttgcggctgcgactattgccggcagatactggagttgaaggatttcctggtgaagcagtcgcaatgggtgatcggcggcgacggttgggcttacgacatcggtttcggcggtttggatcacgtgctggcttcggggctggatgtgaatgttctggtgctcgatacggaggtttattccaacacgggcggtcagtcgtccaaggcgactccggtgggtgccgtcgccaaattcgcgtcggcaggtaagcgcatccgcaagaaggatctgggtgcgattgcgatgacgtatggctacgtgtatgtggctcaagtgtcgatcggtgcttcgcaggcccaactttttaatgtcctcaaggaggcggaagcctatcccggtccgtcgctcgtaatcgcttatgcgccgtgtatcaatcacggtatcaagggcggtatgacccggacacagacggtcggcaagcaggcagtagagtgcggttactggcatctgtggcattataatccgcagttggaggagcagggcaagaatccgttcgtactcgattcgaaagaacccgactgggcgaagttccgcgatttcctgctcaaggaggtccgttatacgtcgctcaaggccgtttctccggaggatgccgaagcgcttttccaggcagccgaacagaatgcccggtggcggtatgaagggtatgttcgtcggagcaagatcgaatactaaacgaataatattccgtagtataaagggcagcctcgatcg

SEQ ID NO: 10455 - DNA, 304 bp, Unknown
  gut microbiota DNA sequence
cgccgcacgctcaatggaggtaacgtaacggtgttgttctctttgtcgggcgcgatcgcaacggtcatgacggccgacatgggaagcgtcgcatactcctcctgccgcccgatcgtatagtcgaggagctgctgcgcactccgctcgcccaggtccgcacccaggttggcggcgacgtagagatcgtactccccgggcaggcactcgaaccgcaccagcgccgaacgggagtaaaaatgcaggctttggccgttgctgcggccgaacaggtagaggttgatgtcgcggatcgcctcctcgtccg

SEQ ID NO: 10456 - DNA, 435 bp, Unknown
  gut microbiota DNA sequence
cttatcttagcccaccttatcaagggccaaaaggagaaattcgattatatcctgatcgactgtcccccctcgctgtcgctgctcacgcttaacgcactgacggcctcggatcggctgattatcccggttcaggctcaattcctggcaatgcgtggaatggccaaacttatgcaggtcgtccacaaggtgcagcaacgtttgaactcggatctttcgatagccggggttctgataacccagtacgacggaagaaagaacctgaacaagagcgtttcggaactggtacaggaaacattccagggcaaagtgttcagcacccatatacgcaacgccattacgctggccgaagccccgacacaagggcaggatatttttcactatgcccccaaatctgccggggcagaggactacgaaaaggtatgtaacgaactgcta

SEQ ID NO: 10457 - DNA, 24098 bp, Unknown
  gut microbiota DNA sequence
cccccgaggcgtatccgtaaacaacagcaatccctgtcgggtctctacggctgtcagggtgtcgaaactcggcagtcttttcattccctcaccgaagcagaacatcgcacgctcgtagccgtcgtggtgccggagccgttccaactccgcctcgggcgagaggtagggaatattcatctgccagcaaaaggcggcatcgcgcaggcgcacgatgcgctgcggcgccacaccctcttcgagcaggatcggcaggctgttttgcaggaaatcggggccgatgagccgctcctgctggcggatccggaggagcacgtcgtccggaatcgtgtattgaaagagccagtagtcgggatagtttcctcccgagcgctgtccttcgacattgcgttggataaactgctcgaacccttcgcccgtatcgtttcgaatggcgtagtcccgtactttgcagtgggtgtcgagcgcaaaatagaactcgaatccgtctttctgaggtcgtgtcataggttttcaatgtcgtttcagatgaaattccgcgcctcgtaccggctcgtcgcgccgcctctgatatgcttcgagcagcttgtcggggcggaagagcagatttatggcgtcgaaattccggaaggtgcggattccttcggcctgcatgggaggtatctcggacgaaggccgacgtcgtatcgggaacttccggtcgaggatgtaggcggccagattgtactgctcctcgcgcttggccgcccgcccctcgtccgagaggtcggaggcgtacttgcgttcgatgttgtcgaatccgctgcggaagacgaactccctgttccaatacctttcggcattctgcataagatacccgtagccgcgctgcatgatgatctgcaaccccgtaagatcgcgtatgccgttggagacatacagattctccccgtgctgcggatctgcgaaggcccagaagttgtcggccgtagcccgcatgtcgtactctttgaggcaatatccgcgacgcagaacctcggcatcgacgaaaggatgctccggcacccacatcataccgcctgccgtgggaagcacctgcggattcaccttgtcccagaagccgtcgggatcgacctccacctcgtacacgcgcagggtttcaacccccagatcggggtcgaagaaacaatcggcgtgatgctgcatgtagcgttcgcaggcctcccgaccgtccggttcctgcgtgaagagcaccgtaccccgctcggtctccacggcacggcagcgccgcaggtcctcacgggcgaccggtggcagcccctcgttgcggaactgccgatagtcggcctttgtcgagagcatgttgctgcagttgccctccgcgagagggtcgaggccgtacttgcaacagtagagaaggtctttcagcgttacggcgtgacggatgtccagcttctcggtggccgtggagggatccagcaggtagctgtgctccgccgcttcgatgcggggcagcagcgcggcatcggtcgtgcgtatgtcgaaaaacagcaccgagggaatctccccgcgattggcggcgtagtccgtaaattcgtcgagcagggcgcggaatccttcgtcgccgcgacgggatcgctccatagctacgatcttgttgccgtcatccacggcgacgtacaacgcagcctgcgtctgttcctgatcttgttcttgttccatcgtcattcctcctccggtgaattagcgttgaacgaatcggccgacagcacgtcttcgtagtcgatgttcaggctgatgttgcggctgcagctccgtcgttccgtcatctcgatagtcggtatcttgtcgttgggaaaagtcgctttcttcacgacgaccacgttgcggatcttcgcgggcgagttcccgatacgtcgggcgtagcgcgtcatttcggcggtggacatcgagaccgcagagttgttgtatgccttccgttccctcggcaggctctccttgtccgtggaaatgtccgccggacgcacgggctccgagaccgtgacgaccatcgtcacccgttcgtttaccgtcagttgttccatctcttcgtaggtgcgctgcgcctgcgcctcgcgcccggccagcagtcccgccgccagaagaaatgccgttactattcctttcctgttcatgtctgtgctattgggttcgtttatttctttttccttcatttcgtttggttcccattttttatctcttcccgaatccgcctctcggcaatctcgcaataggtccggtcgatctcgaaaccgatgtaatgtcgtcccgtgcgaatagccgccacggcggtcgttcccgaaccgatacagttatccaatacggtgtctccttcatcggtataagtctttatcagatattcgatcagcttgaccggcttttgtgtgggatgatagaaacatcccgttttgaactcccttggaatgcagactatggaagtcggatatttccagtcggagatatgagaccgtgtaggcttcattgcgccataacagtggttggtcgtccttttgaacatgcctcggggatgatttttctgtcccggtttataactcatctgcgggtgatagaccggcaacttcttatagaacactacgatgtcctcatgctgacgcagcggcatacggttggcgttcaagtgcccgcttacacggtctttcatccacacgaggttgtatttccacaagtcgggttgcgagcggatcagttctgcggtgaacatcccttgtgcgaacaggatgatggggctgtccggcttcgtgattctcctgtattgctcccacaagggggcgaacggaatccgtctgtcccattcggctgccttgtttttgcggttcagcaccccatagggcaggtcggtaattatcgcatcgacgctgccgtctgccatcaggctcattccctccaggcagtccatgtgatatattctgtccgtctcgatcatagcctttgctgtcgtttctgattgctgtttaccagatatacgaatgtcccgtatttcagcttcaccttgtttttcttgatagccttgctgatggcgtcgctcgtcttctggcaggcattcggcatcgcctgtatttcccattgggcgaggctgtcgctgccgtagccgcaggtgctcaggttcatattgcctgacatggcgccgctcgctacatccttgctcgtctcccgaaactggctgttgggcacgtacagtccctccatcccgtccgtgccgtagaaccggacgatgtcgtcttgcatgtattgcgattcatactcctcctcgttgccgtccggcttgtccctctcgatgttgtccacagaggagtaatcccgtatttcgccccacgacttgaccatattctcgtatttgctgcctatgccgtcgtccccgatctgcgcttccggcagttccggattcaggaattccgtcgtctggagcatcttgtccggtatctccgccgtttcggtatgaaacaggtcgaaaatgaaatacggtcctcccggcagcggaatatagagtatggccggaagcatgtacctcgtctgccgaaaattgattttctccaatatctccatcttcattgcattagtgtttgagaatgtgacaaggcatctccctcctgtctctgtcgcgttcgtagcgctccaacagcctctcgggtcggaacagcaggtcgatagagagaaaatccctgtaaaagcgaatgtcgccgctcggcagcggacacggcggctcctcccttgccggatcgatgccgaagcaggtgcgcaggatgtcggccgccgtcgtgcggctgtcgtccgtcatggccgctgcagattcccgatcggcgttcttgaaccgatccgcgaacgggaagtcgtaccccggaaagtcggagcctccccagcagaaaggttcgtagccgttgcgtgcgatatggcggagcgttacgatcgtcagcaggcgccgcaacgcctcggacgatgcctcggttccggagtccggagcggccgcgagcttcgcagccccggcccgcatgtcgtactctttgaggcagcagccccgttgcagcacgctgtcgcaccgtccgctgtggcgcggcacgaagcgcatctgctcgtggtcgaaatacggcaggcacgcctccgaggagtattgctcctcggagagttccacatcgtatatgcgcaaagtttcgaccccgcaggtgagtcctctgctgtcgggatgtgcggtgaggaaggcgaagaagctgcgggccgcctcgtcgccacgttctccgcagcggaaaagagctacgccgccctccgtttccacggccctgtaaggtgctccgggctgcttcagcgcgggaatcgattcgttgcggaagcctgcgtaatcgtccttgtagcagaggttccgggcggtgttctgcacagccagcgggtcaaggccgtgcttgcggcaatagagcaggtcgtacaacgtcagggcttgacgaatgtccttcacttccagcggtgccagatgcgccagccggtagccgcgttctttggcttcgatcggcggcagccgcgagccgtcgtcgacgtgaaagttcaacagcagaagatacgggatatatcccttgtcggccgcataatccgcgaactcgtcgtagaaggttctgaaaccctcgtcgccccgtcgggatctctccagcgcgacgaccgtatgagtacgatcgagggcggcatagacgttcgtaatatcggagcttcccatccgttatcgttttgtgtcgtcccagtcgggtacgacgatcgtgccgtcgccttcgggtgcgcggatcacctcgatctcttcgacctcgtggagcgtgcaggcgccgaggccgcaaagtgcaaacagaagaagcatcgccgcgaagatgcggcgcagatgatttgtcgtcatggtatcaatcttttaagagttcatcgatttcggggtcgagcgccgcacggtactccatgcgctcgtcgcggcggcaggcttcgaggaagtgtcgccgtccctcggccttgcggcccagccgcgagcaggcgatcgctcgaagatactcgcttatggctgtcgcgggaagtgcttcgaggatgcgcagcgcctccctgtcttgtcccagcgagagcagtgcgatggccgtattgcgatcccggtagtcatgaaggacgtagagcgcctgtgcgtatttgcgtttttcgagcagctgccggccccgcaggtaggccgtatccggttcggtcgtgtggatcgtgtctttgaccatacccacgcggcgcaggtggcagcggagtttcacggcccgcagcgcgggatagtgctccgcacggatgcaggcatattcggccgggtagcggcggcgaatctcctcctcgcgccggtcgggatctccgatgcggcggatgatgccgagaatctcgtcgcggtgcgcgaggcggccgtcacgggagatgcgggctgtcagctccggccacagctcgcccgcgctgcgtaccgtaagcaggcggtccgcacgccggccgaagcatcccgcgaggtagctgcgcagcgcctcggcacgcgcctgcgacagccgctcgttgagcgcacggcggccttcgggcgaggccgaagccgtaaggacgatgctgtcgacatggaactcccgctgcgtgacgatccgttccataagcgcggcgatgcgtgccagctcccgtgcgttgtcgcccagcgtatccacgagccgtgcgtcgcccgtaaggaagctcaggctgtaacggtcgtcgacggtcacgtatttgtcgatgacgcggatacggtaccggggcagggtatccagaaacgacagcagcgacgatacggtataggtcagcgtatcggacggcggcagcgtataggcgctgtcgtcgagcccctcgacgcggccccgcagcgtgatgagcatcttgcgggaggtctcctccgtaggtacttcctgcgaataatagtagctgatcgaagttcggttctcgataagcgaatcgagccgtgcatcctgcgcatagggatatttcacgaatcgcaggaaagcccgctcggcctgtacgctgtcggggcggaagcgtcccaggtaggtagtatactgccagtagtcgcgctgctgcacgcggtcgaacagcgcaccgcgtatgatgatgtcgtcgagcgggatctgttcgtcctgccggtgcaggaagggcgtgatgaccacgctgcggctgcgccccagcagctctttgggcagctccacgttgaagtcgagcgtcacacgcccccggcgttcggggatcgaacggacacgggccacaacgacgacctcctcgatcggaaccgtgccgagggcttcgccctgcccgtcccgttcgacggggacaaggtagtagtcgctgctgtcgcgttccacgcgcacgacctgcgggcggtcgtcccggactttggactggcgttctgtacgtgagagttgcgccaggtgtgccgtggcctgccggcgcgtcagccgtgcggtcgtcgagcagcccgcaggcacgcctgcggccgtcagggcggcgatcagggataaaatgttacggaatcgcatatcagaacaggtagttgaaggagacttccagcttcgacggtgcgagcgtccagcgccgcgcgtggcggatatagcggtcaccccagtcgctcgtgaccggatcgcggcgcgtgtcgcgcgtgcgataaagccccgcaccggcctccacgacgaggttccagcgcttcgagagtatccacgcatagccgtagcttacaccgatgccgtaggcccgcccgtcgtaggtgcggcgacggttgccgatgcggtaatcgacccaggaggcgtgcagccccagaaagtgcccgacgaaatcttcgtagaaccagtgtcggacgccgagctgtacggccccgacctgcgtcgtgaggcgctccgtgcggatcggattccagtaggcggaggtttcgacggtccagttgtccgtcagcgccgcctcggcacccacgacgaccgtgcccgtcagcgccgccagggcgttcaccctgacgccgaagaactgtgcggcggcacggtggtgtatggctgcgaggcacatcagaagcaccgcacagcggatgatcgttttcgtttgcataatcggttattcttttacgcacctcacaggataggctgcggcctgatgattctgacggtagagctgcaagacctcgggcggcaggacgccgaagctcacggccgtcgtcgcatccacacgcgacggatcggaggcaggactccccggggcattcgtccagagttgtgtccgtatcccgacgccgacgtacatctccttgccggtaggcatgacatgcagcagccccgcatagggatagtacggccatacgctgccggtatagaggtagcatccgccttcgatagtgctggaaacagtcgtctgttcgagcgtccacgcctcgggcggcggcacgcgccagcccggagggcaggggtcgtagatggacttcgcgcccgcagtcgtgggacggccgcccgtggaggcgttgccccagaggttcggcgaaggttgccccagccacgagctgagacgctgcgccggatccgaagggtctgcggcacgccccagaagagtcgcgggatgtgccgcagcccacgtcacggtcgccgtcgaagaatcttcaccgtagtatgtcccgaaggcgaacccttcgccatagtcgaacgcttcgagatcgtacgggaaaggatccttgcggccccattggtagtaaaggcctcggctggccggatcccccggatcgaggttctcagcccccagattacggtccataaacacatatcccgaaggatagacgtgggtggtcagagcgccgttcgtcgcccagatatgccacgaccagatgcagtcgccgtccttgtcgaacagcccgataagggcgttgcctccgatggccgtacccgtgcggaagctgatgcggcggccgttgtagcccacatcgcatacgacagcccgctccgccgttcccgtctgccagataaggcgggcggatgtcccttcgagtttctgcggcgtgatgcccgtggtcgctcgtccgctgccctgcaccgttgcatcgaacagatatatctcctgcatgcggggcgcgatgtagctgttggccgtacctgcggcactcaggtcggtaccttcggtgtagtcgggcgcgatgatccgctcctcggtggcgacgaaggaataggtcttatcggcggtgataagctgccggcggcttttgtcgaaggcatcgtaccatcctgtgagcaatgccggctccatagtgcgcagcgtgcaacggctgcccgcaggcacgatgaacgactcctcgtcctgatccacctcgacgggcgcgtcgcactcgaagcgtacggtgtagatgtccgtcaggatatgtactttctcggttacgaaaagaggatataacgatacggtatgcgtcttaggcacgtaagaatacgtctcggtcgcgcagagcagttcgcgatgcccttcgtcggcgtaccatcccgcgaaacgataacccgcgtcggctgttgccgtgagggtgcatcctcgctcgtagcaggcggcacgcagcgtcccgtcatccgtattttgcaaagacaatgcccctgcaaccgagactgtgccgccgtcggagagcaggatcgaaagcgtattggcaagcgtatgctcgaaacggcagcggctttcatagccgtagctgtcacgcacgcgcacctcgtattcgaaacgcgccttggcctcggtaatgggcgacgaagagaagctcataggaaagtagttgcggccacggggattgtaaaagcggagcgggaggggtacgttcggctgacagaggtccgatccgacggccagagggctgtcggtcgtggtaaggacctccatctcggcctccaacgtcggggtggaatccgtgcgtcggatgtcgatgcagagcaaaccgccggaagagacgcagtagtcgccgatgcggttgctctcgaaatcgtcggtcacactcagcgtatagccgtgtacacgggtgtccacctcattgtcgcccgagatcgtgatgtcgagcgtatgggacgtattacgccctacgttgaagtccgtcgtactgttctcacccaagtaaacgcggtagtcgaggatgcggctgccccgtgtggcgcggatcatcaggtacgaagcgcacgaaggggcgttgtcggcgtttttgtcctgctggtccgtaatcgagggtaccgtgccctgcgggttctcgaagaggtattgcacgcccgaacagctgcgccgcgcggcgtcgggaagctccacgagcggagcatcggtgaaatccttctccgaggtcgaaggggcactcgcaggcgtgaagagcgtcgtacgtccggggacggaacacaggcgtacggagcgcagttcgaggtcggggaccttatccgccacgcggatgttgtaggcgatcttggccacggtacgccgcacgctcaatggaggtaacgtaacggtgttgttctctttgtcgggcgcgatcgcaacggtcatgacggccgacatgggaagcgtcgcatactcctcctgccgcccgatcgtatagtcgaggagctgctgcgcactccgctcgcccaggtccgcacccaggttggcggcgacgtagagatcgtactccccgggcaggcactcgaaccgcaccagcgccgaacgggagtaaaaatgcaggctttggccgttgctgcggccgaacaggtagaggttgatgtcgcggatcgcctcctcgtccgccgcgcgggtgatccgctccgcaggatcaggcgacaactgtagctcgaccttcacggagcgggtcggaggcgtagccgtcgccgcgagatcggtggcacaaccccagccgatgccggaggccagcagtgagagaagaatgagtagtcgtgtcatggtaatttgaaaattaggtgtcgtggttattcggcgacgcatcgcaccggcagggcgtagtcgcgttgtaggtgtccggcggcatcgaccgccgaagcggaaaccgtgaacgccgtactcgtggagaggcagcgtccgttcagctgagccggagcgttcgtccagacgtcgacccgtgtgccgttgtcgcggaaagcgtgacccgtaaagtaaccgcccataggataggttacggaggtgccggtgcggctgcggaggtagtaaacattgttccgcgaggtgccggtacggctgaaagaagcctgctcgaaagccgcaggagccggaacccgccaccccggaggacaggggtcgtaaatcgacttggaactcgacgtcgaataactccccgaacggctggcattgccccacagattgaggttctgaggcgtcacccagtcgttgatgtcattgctgtcgcctgcatacagccccgaccagtaggcccagggttccgccaaagcccgcgctggggtcatcgacacagagccgccgtcgagcagcggatcatggacatagtactcgtatcccgcagcggagataaacgcagctggtaccgtgctcgtcacggaggagggatgaagaaagggggcggggcgtccccactggtagtaaagtcctcgcagcgaaggatcgctgacgctcgttgtgagcgctccgagattgcgatccatgaacgtatatcccgaagcgcaggtctgggccgtggcccaaggatcgtagttcgtatgccagatatgccacgaccagacgcagcgtcccgcagcgtcgaacagcccgataagggcattgccgtagttcggacccgtacggaagcagatcgtactgcccgtatgctccacctcggcgacgactccgccccgcgtcccaccgctctcccacagcacacgggccgtcgtgcccgaaagcgtcgcgggcgtcaggcccgtcgtcgcgcggccgttcccctgcacccgggagttgaaacgataacccgcattgtgggccgcagcgatgtagctgttggccgtacccgcagcgctgaggttcgtcgctgagaggtagcccggcatcacggctcgtttttcggtggctgtgaacgtaatgcttcgggccgtgccgagcagcacgttctggcccccggtctgatcgtaccagcctcggaagagcggcagctcgtagttgacgcgcagcgtgcagcggctgcccgcaggtacgatgaacgactcctcgtcctgatccacttcgtatggagcgtcgcattccagacttaccttgtagatgtccgtgataatatggaccttggaggcctcgaaatacgggtaaatccacgttcggtatgttgcgggaacgaaggaatacgtttcggttccgcagagcagttcgctatgcccttcgtcggcataccatcccgcgaagcggtagcccgcagcggctttcgccgtgagggtgcacccctgctcgtagcaggcggcacgcagtgtcccgccggtaggcttttccacatgcagtgccctggccgccgttaccgtcccgccggtgggtggcgcgacgtagagcgcattggcgaagcggtgttcgaagcggcggcggctctcgtatccgtagctgtcgcgcacgcgcacctcataggcgagctgtgcatgagccgccgtaacaaggggctctggatagtagatgacttcgtagtaattcgatccctgctggcgattgatcggaaggtcgaggcgggaagcgcactcctcgtaatcgacgaggagggtcccgtcggtcggggtcagcagctccaacgcgcccgtgagtgtcggctcgctcttcgtacgttcgatattcacgtaaagcgaagcgttgaacggaagtacgcaataactgccgatgcggttgctctcgaaatcgtcggtcacgctcaacgtatagccgagtacacggatgtccacctcattgtcgcccgagatcgtgatgtcgagcgtatgggacgtattacgccctacgttgaagtccgtcgtgttattccgtcccagatatacccgataatagagagtcctgttgccgcgcgcggcgcggatcatcaggtacgaagcgtacgcaggggcgttgtcggcgtttttgtcccgctggtccgtaatcgagggtaccgtgccctgcgggttctcgaagaggtattgcacgcctgaacagctgcgccgcgcagcgtcgggaagctccacgagcggagcatcggtgaaatccttctccgaggtcgaagcagacgcggccgctgcgaaaagccctgtccgcacgggtatcgagaacagttgcacggaatataattcgaggtcggggaccttatccgctacgcggatgttgtaggcgatcttggccacggtgcgccgcacgctcaatggaggtaacgtaacggtgttgttctctttgtcgggcgcgatcgcaacggtcatgacggccgacatgggaagcgtcgcatactcctcctgccgcccgatcgtatagtcgaggagctgctgcgcactccgctcgcccaggtccgcacccaggttggcggcgacgtagagatcgtactccccgggcaggcactcgaaccgcaccagcgccgaacgggagtaaaaatgcaggctttggccgttgctgcggccgaacaggtagaggttgatgtcgcggatcgcctcctcgtccgtcgcgcgggtcgcaaggcgaagcatatcttcggtcgtaatacgcagttcggccgtgaccggacgttccgaggctgcgctatcgaccggcatagtcacttcccggctgcacgagcacagcagcagataaaaaagcggaagagagattgttctgaacataggaatcgttttttagaacagtctgccgcccttgcgggcgacagactgtcgggaaaaaaggtttctcaggctcccagatcgatctgctgcgttaccggagactcccagtcggcaaccgtgatcgtaaggcccacctccgagcctgccagacccgtgatcgcagcttcgatgcgatagtagccgttacgcacgatcgctccgcctgccttgcccgtgacaggtaccgtatagacgatttccgtacggtcggaggtcgtcgaggtgctgccgtcggcgtcgtagctcgccgtgatctccaactgtacacggttgccctcggcaagagcgccgttttcgaagacgtagaacaggttgtcgtatctgcccgctgcggcggtggcggtctgtgtatgggtatagctcatcgcgccgggcgaaggagttgcgggggcgatgacaggcgactgactcgccgctttcgagagcttgacgcccgtgacggtgatcgttcccgaatatttctccgcgaaggccgcatcgatcgtggtctgcacggagagcttggccaccgttcggcggagcgccatcgcaacgtcggtcgtcgaaccctcggcgatggatttgctcgcagaggccgacatcacgaagccgcccgcacgcttggccttggtcgagacctccgcgaaggtgccgttatagtccgcagcggaggcttcgaccttcgagagcaaggccgatttggtcgtaacacccgtgagcgaaaggttcgcaacggcgtagaagtcgcacgtcgtacccgccgccgaatgcggcagcgcaaaggtcgccgacttgtcggcgagttcctcggaggtgaacgaacgctgcgtaacaaggttgccttgggagttgaaaacgtaaaccgtcagcgacgtgaggctcttctcccacgtttcggcggcggcagtcgagttcagggatgcacgcgaggccggggcatcggtaaaggtgaggcacacggcagcgccgtccagcggctcaccgttcgtaccgtaagtcacggtctcctccttcgagcaggagaccagtgcaagggcggccaaagccgcgacaaatgtttttttcataatggaataaaggattaaagggtcgttatttatttcggttcgtttttttcggctcgccgtcccgcatcttccgcgtgcgtacacggtggcggagcttggcttcataacccggagggccgttgtcgtcgatccactgccggatgccgaggcgcagctcggctttcagctgccggaactcgggacgcgaggcgaagtcgtcgcccaaagcatagccggcgaagatcggctcgcagggcgtcagcaaggcccgggcgacggtgcggcgctgatcttccggaatgtcggggaaatcgttcgcaaggatcaggtcgatcgtatcgaacttcgagaacagcagacctcggaaaagactccggtcagcaaggcgaagcgcacactcggcactgccgcccgcgtcacaagtacgacggtagaggtcggcggccacggcgctgcgacgatccagaagttgtgcgcggtactggagctggggatggcgttcgcgaaggtaataatccagtcttgtccggaaccacggctcggaatatatctccatagcggtatgctatcgtttccgaccccgcccctgctgcgactcatcggccccctgcgaggcctgatgggatgcttcggccgcctcgctgcgctcctgacgcgacagaaagcggctgtaagtacggttgtcgcgcgggttcacatacagaaccttgttcttcatcggctccccgaacgaatccttgacctgatccgccgagacctggccgccggcaagcagcgtcttcacatcggcatccgagagctggtcacgaaggtacttcgggacgtacggcttgtcgtaaaccgggtcgctgatcgtatagcggccccgatagacgtcgtagttcaggatgcccttgtaggtgttctccgtatcgccgtaggccgtgcatccttccagcgggatcgagccgccgctgcgaaggattttttgtcccgcatcgtcgatgcgacgtccctcggcgaactccgggatcttgacatcgcggtgcggaaccgccacaaggcggttcgtcgaagggttgaaggccacgtggcagcgctcagcttcccccgtgatgctgttatggaccgtgacaaggtgttgcagcgtcttgccgcgagccagaagtgccttgtcgtcgggcgtgatctccgaggcatactcctcacgttcgtattcgggctgcacaagcggcgtatcgaggcggaacttcaactcatcgttatggtcccggtagaaactcaggttgaaaagacccgtcgtcgtgccgtggtccgaaagctggaccgtcgcaggaaacagctctctggtcgggagccccagcatcaggcttcgctgcgtgcgctgcggcagcgcatcgaagtcaatgcccaattcttgcaactccgcacgcggaatctcaaccttgtcgtatttcacctgttccagttcggccgtgttcacgacgtacttgttatacgtctcccagccctcctcgctcttcggattgctgacgagcttgcccagcgatgtgacgatcttgccgacggaaaggacgggcactttcaaaaactgaaactggatcggattgtccttctgggatttgaaacctcggatgaaagccgctacggcattgctgctccggaacggatagaacgccggacggttcttcgcaagaggctgcacggtatgcacctctcggcgatcccctttagtcaccagcttggaaacggcctctacctggccgctgtcaggattgcgcacgagaagcgtttcccggtagtcgttctcctgttcctgaccctcggtcggatttacattttcttctgttgccataatactgtcttttagttaataatgtgtgatttgtacttcgacagcggcaaatatagaggcccggaagacgatcccgacggatggcacgtcagggccgttctgggcgtgaagaaagagttaaagagggtcgaaaatcgttctcggacaatttgtcagtcaaatgtcagattttgcatacaggcacaaaaattgtggcctatatagttacgatgtagaaaaaataatcagtaaaacagtaaatatggaacatctttatttaatggatgatgacaacttcttgtatgagcatatggctaatctccggccgggcgtggtggatctaatccagcggaatgtttgtgcaatgatcgatgcaggacggaaaatacatgtgcaatctgcagatgccgttccgaatgaagaatttgaacaacgcatcaaatacaccgaagatccagggttatgggataaacttatcaacgagtacaatgcgaaacatccagataaaattcttgaacgctggacaaggaattgaacaagcaaaacttgcctgaaatagcagttggaggacattctgcacatttcagtagcatacaaaaacaggatgggagattcccatcctgttttttgaagatcatttcctatttgttaaatatataaattcattcgaattctcaaaattcatttctcaaataataaggcggacttgtcgatccgcctacttcttcgccaacagatgccgcagcgcagggtcttcggcgatgcgccgcagttcccgttttatgatctgcgtgacgtcctccttgatctgcgcgtaattgcgtcggatgatctcctccatacgatccacgccgtcggcatcgcggaacgaggatatttccgggatcggaacgtacgaagccgtctccccggcgagcttctccctgtcgatgacgatctcggcgtggaagattttctgttcgatgcgttcgtcgaaattgtccgccacggcacccacgaacatgccttgcgagaggttggagatcttcgaggcgggaatcaggctgtcgagctgcgtgttggtcgaggtggtgaggttgtcgttgctcagcgagttggaggtccgcagctgcacgatcctgccgaagcgctcgctcaacgtcttggccgtatctcccaaaacctgacctgcgaagatgttgcccacggtattctcgatgaccttggcctcctcctggccgtagtcgcgttcgagctgcgagaagtcctgaaagctcaggcatacggccaccttgttcgagcgggccgtggcgatcaggttgtccaacccccggaaatagatcgtgggcagctcgtcgatgatgatcgacgacttgagttttcccttcttgttgatgagccgcacgatgcgcgaattatagaggcccagcgctgccgagtagatgttctgccggtcgggattgttgcccacgcacaggatcttcgggtcttcggggttgttgatgtccagcgtaaagtcgttgcccgtcatcacccagtagagctgcggggagatcatgcgcgagaggggtatcttggccgaagcgatctgcccctgcaactggtcctgcgccccgcctttccacgcatccataaagggcgacaggtaattttccagttcgggataggaggtcaggatcgtgaagatgtcctcgtagcgtttgcacaacaattcgatggcgtggggaaaggtgcagtacttccctccttcgtagattttcaggtaccagataatcgcagccagcaggatgatcggagaatcgacgaagaagtcgccctgcttctgtatccacgtcttattgaggttgagcatgatcgtataggccgattcgtaggcgtccgagatgtcggtcataaactccggagcgatgggattgcagcggttcgaacgacggggatcgtcgaaattgatgatgcagaatttcggtcgggtttcgtaggcgtccaggtgattcaaaaggtggttgtaagcgatcgaggacaagtcgtcgaatttgaagtcgtagaggtacatggcgaagcccttctcgatctgctggcggatgaagctgttcaccacggtgtaggacttgccggaaccgggcgtgccgagtactattgtcgcacgaaagggattcaccgcattgatccagccttcgtgccatgccttgccgtagtagtaacgcgaacggaggttgaccgaatattcgttctcgatcaggcgtgtttcctgcatgaaactttcgttttcgtcgttgaacgggtcctcgcgcagccgctccttgaccagacgtccgagccatagacccgccagaaacagcgagaggaagcctatgcttgtagctgcgacatagagcggtgccgcccactgcggcggcaggtgccgcagcggatccccgaagaagaaaagcagcaggcccgccgcagctgcgagaagaatctgccggtgcgtgatgcgctcggagcgcacgctgcgcgtaccccagcagctcagagccagaaatcccgcagcgaagagtttggtcaggtacgagtaagtgaaaagccccgtcgtacgctggacgttccgcagcagacggtccaatacgccgagcgtgcagccgtgcatatcgaaccatccgtagcagaaccaatagaagtggagcagcaggaacaaaacgcttatgccccgcatgagctgcatgactttttccaatcctctcaggtcatcttcctgttgcatgatatacggtttttgcaacgaagataccttcgcttccgggctgctcgtgtgtatgtccgttccgggcacatccaggccggttgttttgcaaaattcatattatacggcgtgtaattcgaaaaaatcacacgccgcgtatcattatcgttggcttcgttcgacgagagcctgtttcaatgcatccagaaatttggtcacgtttactttccgattaagcgtggcattgcggcagcggtcgggattcttgaacgaaacattcagcagcagttcgaaagtgcggacgagcttgttcaattcggcaggcgtaccgtctgccttgcggatcgcacccgacgcatggagcgccgagatcagctccatcaggtcggtcagggtgtactctgcggaccaatagtacggcgagcggatatgcttgctctgctgagtcgccagagcaggataacgcaactgcaccagcaggattcgtcgttcgatctctacgtgtgcgatgatcgtttcgaaatatccctttttgatcggctcttcggcgtatcgatacttcatacgttccagataaccgcacaaatgcgccaacaagcgcagctggtcgatcacgggtcgttttcttaacagtcgggaaatacgttccacgaaatgttcgatggcggcttccagacgtgcggaaatttcatcggatgaaaatgcttcgccgcagagtgagaacagccggaaaagttcacactccgaaataatcttggtagctttcataatacataattttgaatgggttaataaaaagcgcgggaaaggcccgcgctccgagagatagctattcgatctgcgcgaaactctccgccataggagaaaaagcctcgcggaatattcgttttctccgtttttatacccctttcatctttgtgcgatgccttaccgaatttactgaatatttgcgaacgactccatccctcaccgcttcgcacggcgtttcttacgtcgccggcgctcgcgcgggatcggctcctcgtactcctcctgtcggccggccgcgagcagatcgaacaactcttccaggcccatgccgtcgacggccgtacttctgcgggtatctccccgctcctgcgccgggggatattcgcgccttcgttccggctgcccgccctgcgggatctcttgcgtctgttcctggacctcctcagcctcctgcatccgttgctcggcttggccagcgtcgaaatgcgccgccagaccgtttgccgcgaactcccgtcccaggcgcgaaccgttgaccgcgacacccgcacggtgatcgatgaacgtcgtaccgtagatacgtcctgcgtcggtgcggcgcagcacggccgtgatcccttccgcttccaacagacggcagaactcctccggggaacgggcagcacccagcacccgcacgacggcctgccgcgtaccgtcgagcgccgcactgtcccgcagtgcctccctgctgcgggcgtagtaccgttcgagtgtccggtgtcctacgtcgcgtcctatacggctcgacttgatcggtacaccctgtggcgtggcgtcgtcatcgagcgcaccgtagaggataccggcatactcgtgtccgtgtgccgtaccccggcactcttcgatggagacgttgaaatattcgagcagcgtccgcagctccccgaaggaagtgcagcggtaacggtgcaatgtcaagcgcacgagcgatgcgatttgtcgtttgaggtcgcttttcgtatagtcgagtttcgacagcgtgtcgtacgtctgcttcgcgtcgccctcggcggcagggcgcaggccgtagcgtcgttccagagcatcgaggatctcgcgtgaccgccgcgcctcgaagtcgtgcgccagcttgcggccgtcgagccccacgcgcagcgacacgatatggatatgccggcgttcgatgtcctcgtgcagaaagacgaaacagggctgtgcgccgtaacccatacgctccatatactcgcgtgcgatctgccgcagctcgtcgttcgagagacggtcttcgggagcgggattcagggaggcgtgaaacacgggattcttcgtgcggcggttggcttcgaggtacggttcgaaacaacgcagcgcctcgcggatgtcgaaatatcgctcgtccgtgacctgcatcggcgtattgaacgccaccagaaaacggccctcgccccggtcgatcttatccttgttgtaataaagagctcccgccggtgtagccccggaggttatccgcgcgaccatagctcgtaaagttcgcggctgagcgcgatgacctgctcggaaagggctttcagctcgcgcgtgcggcgctccagaaggagcacttgtcgcgggatcgccgtgtgcgaaaaatgcgtgttgacggcccgtacgatctggttgtagttgttgcccacgcgctgtatctgttcgtaaaactgattcagacgggtcacatatcggcccaaggtcgggtcgatacgcaccacgcgaaactcttcggcgaagattcttttgacgataaaccggctgcggttgtgttccagtccggcctctgcaaacatccggcagaaacggatattctgctgctcatcgagtcggaacgagtacttgtaactggcttttctctctttgtgctgttcttccatatgtcaaggtttaagggggcgcgactcgggagcggcacccggcctcgcagagcaaggacctttgtcggacaaacaccggtttgtcggacaaaggtacaccttgctaccgtccggcgacggtaaatgcgtcgagacgacgcagggtacgaacgacggttcgaacccctcggcccgcggtgcttcccgggctgcaatattacaacgcttttcgcctgataacaagttgtttgatcggcctggaacggcctccatgcgacatacgtcgaaagcatccgaagggatactatcttcgctccgcggatgacttccgccaatgacttgagtcatccatggacttatgtccgtcattgatccgattcactgcacgaagtaattcattcggtgaagcaattcattcactgacttcattccgtcacggaattcaatcgttcggcgaatcgattctttcacggaggtaaatcattctcgatacgcattaaaacccgttttgcctatggataaacaacccgtattcttctgcgtctgctcacaaaagggtggtgtgggaaaatcgaccttcacgattctgctcgcaagctggctgcactatgctctggggcgcgatgtgctggtcgtggactgcgatgctccgcaatggagcatcgtcgcgcagcgcgaacgtgagctcgatgtactcgaacgcaacgaccgctacaaactcatgatggtgagactgttcaaacgtacgggccgcaagatctggcctgtggtgcgctccacacccgaagaggggctgcaagccgcccatgcgtaccttgccgccggcgaccgcgaagccgacttcgtgctgctcgatctgccgggcacggtcgccgcacccggtatcttccgcctgctcgcccggctggatcatctgttcattcccttgaaagccgacaagctggtcttggagagtgccctttcctttgcgcgggccgtcgatgaacaactcgtacataacgacgcactccggctgacagggctgcacctgttctggacgatggtggaccgtcgggaacgcacaccgctttatgaaagctacggaaaagcatttgcagcgttccgtcttcccgtgttgcagacacaggtgccgtaccgcagccgtttcagcaaggagattctcgacacgagcggtgccgtcggacgttccacgctctttcctgccgaccgcgccttcgccgccgatgccgcgctcgacgcgctggccgcagaaattctgtctcttatggaatagcgtatggtcagacgcaatgacccgacaatcgacgaagaggcgctgcggcaggctatcggccgtcagtcgtcgcacggctccgtgctccgcactcgggaagatccgacgacagacgatgaaccggctccgccaccggaagccgctgcatccgaagcgtgcgagccgcgccgtcggcgcctgcgtatgcctgattacgagcaaaccttcctgtgtgtaagtgacgtgcaacgacgtgccggaatttacgcttcggaagagaccaaacgcaaactgctcgacgtcgtgcaactgctcggacggggcaacctctcgctgacggcctacgtggacaacatcctgcgccatcacctcgaattttaccgcgaagagatcaaccgcctgcacaaacaacgaaattcccaaaacattctctaaatctataatcttatgtatgcaacctattatctgattccgggcagttgtgcattggcgtgcctgctcgtcatactcctgctgcgacacaaatcttcgtcgctgcgtcccgcagccaggtatcccgccgcgccgacgatacacaaggactgccggcatattgaaaagaaatcctcttcatataactatgtacagcgcttcttgcgctcacgggtgctgctgcaacaccgccacgcagtctacatcgatacggacgtacacgacacgctgtggcgcgtggtacgcgcgtgcggtgtgcgaaacatcacgctgagcagctacgtcgatgctatcgtgcgcgaacatctggaacgctaccgtacacagatcgaggccctgcacgctcctgccgacgaaaactcccgcacgcgatgttcatcgtaacgctgctcgaagcgtgcctcaccttcgttcggcgcaggtgtttccgtgcgctctacggggcaggtgtcggaaaatcccggcgccggccccgtgctccggctcccgacacggctccgcagacaacgcccacgccggcgttgccggtcatcatccataaacactatgtgatcggccctgaaacgcctggagatgccacgccccgaccgccggaacaatccggtgcgcagcgtactatctttgccgccccgcagtcggaaactctctccgcctgggagcggcttgctgacgacgacgaacccttcgacgacggagagccgctggacgacctgccggacgatgtgaccgagcaggaacgcgccgagatcgaacgcttcgatctgaaccgctaccgataaacttgtgtcgaaccccgagcaacgaatccatgaaccgtatccgcaacccgtgcggcccgcatttcatccgtacgacattcatacatcattcaacccaaaatcagacaaaacatgagaaaaaaatcgttatcgacggccctgctcgcactgctcacggcgagcgcctacgcacagggcggcgacggcatcgccggcattaccgaggccacaagtatggtcacgtcctatttctacccgctcgtgcagctcatctacgccatcggcgccgtgacgggactcatcggcgggatacgtgtgtaccagaagttttcgtcgggcgaccccgatacgtcgaagaccgcagccagttggttcggcgcctgcatcttcctgattctcgtgggaaccgtcctcgaatcgttcttcttctgatggagtacggcatgaacaaaggcgtgggccgcagcgtggagttccggggcgcgcacgtaatggttctttggcaaatgcgtcgatagcaagacgttaggcaagtgttcgatagcctatcatcgatcggcttatccgaaagggaaaccggacggggagtatagcctgccgataaactgataagtcatacag

SEQ ID NO: 10458 - DNA, 964 bp, Unknown
  gut microbiota DNA sequence
tgaactgattctcaacggttcatgcggtgaagaaggcagtgttttttaccgaaatccgcggcccgtactcggtatttttattggcagaaatgcgatagaatactgtgattcaacgcttaacggtgttctaatccggacggggctacaacggaacacccgtatcggctccttatacgggtgcaaatacgggtgttcggaaagttcctttcgagagttacgggggaaaaccgacctcggttcttttgttatatacaacgctgattatcagtgtttctataaggaatagagtgctttaccggttcatattctactcggaattgccgtttttcttgtttcgcttccatgtctgcatacgtttaagcagggcctctttcgccttgtcaagccacggtgtcgggttgtttcggattttcatatcgcagaatgtcctcgaaaggttcatgtcgaggtgtacgttgaaagcgttggaaatgtagctggcaagttgcgtgagtggcacattgccgaaacagcctttactgtcgagcaggtaaataagttccgtcagatccgtcttcgagtcctgccatgtcggacgcacgtcagacaatggcagaaccatgttccggtggttcgtgctctccagtgattccaattcgcccataagataaaccgacaacatatcgttggccaggattttagccaccttgaaatccgcgtttgtcgaaaactgcgggtcgagttcatagtagaaggtttccaggtattgctccgtgtcggtctgcccgcgcaggaaatagaggctgtccaggtgtgtggcgccgctgcggaaatagcggataaagtcgaggcgtttctgcgtgtacgcattgatggcccgaacatgggcgtccaggtactcccgttgtgcctcgatacttcctaccggacggttcatctcgatattatagagcttgcggtaatagatcagacggcaaaaaagacg

SEQ ID NO: 10459 - DNA, 1347 bp, Unknown
  gut microbiota DNA sequence
aggtagccgacccggttttgtccgtccgtgacgagtgttccctcgcggaaatagggggcgacctccccctcgaacggtcggggtttcatatccgcctcccgtatctgcggcatttctttaccgggttcttcctcctctggattgtccggcgtgtcgaacaggccgcccgttctcggcgtaccggcggcttgtttccgtttgcctttcggggcttccgtcggggggcgtaccgcctgccgttcccgctgttccggggtttcctgctgccgggcgctttgtcggcgcaattccgccctccgttccggggtaagcgacatcatcatctcgtaaaagccgttgatcggcgggttgtcctcccagttcagggaggcatacaagtcttcgggatcacgctccggtggcgtcgttttcggcatttcgctcttctgttcctccggagaggaggccggggcgaataatgagggttgtcggggcgtcttccgctttgctccccggcggctgttccttttcttggatataccgagttctgcctgccgccgctcctcggcgctgaagccgaacagatcgtagagcgtcagcaacggttcctgctgcacgtttaccggttcggcagcttgggtggcaggtacgggagccgccgtttccaccgtgtcgaaaagcgacccggcgaagccctcccgcggtttcggttccgttattccgcccacgtgctgcacgggagtatctgccatgccgaaatcttcgggtttcggcgggtgctgctcccacaagcgattctcccgctctttcgaccaggccccgaagtcggccagatcctccccggtcggttctccggcgggtgtggcagcagaatccggtaacacttgtccgggtttgttttcgattcgggtaatctccccggtttcggtatcgacatggtagccctgcgccgccatttcggcgacgacgcggcgtttttcctcctcttcccgctgctgctgaaggttacgggcatcggcgataatctccttgacgatttctccggcaaggcggggctcgtgtctttcggcacgctggcgttccgcctgacggggacgggacaattcccgctccggtgtaccgggtgtctgttccggagcatgttccaggcaataactctcgttgaaatgccggttgaaatcctccgagagcatacgccgcatctcccggtcgatgccgtccacgccctccgcgtgggtgaactccatcgccggtttgccgtaggggtctttgcctactttggcctcggtatggatcaccctgtcgaacgactggaaaaggttgtttatccggatgccgttcgacagcttgcgggattcgatgaaatcc

SEQ ID NO: 10460 - DNA, 1183 bp, Unknown
  gut microbiota DNA sequence
tctatgagatggtcgcggggcggatgctcgaaaccttttccggggcctgcgtgaaagaaaacacttcccttaccctgcaaagcgcggggcatgatttcacggcccgcggcagtatcatggtcgagacgggctggcgggccgtcctgaatgaacctgtcgaggagaaagaggaggacatgaccctccttcccgacatcgtgcaaggcgacgagctgcccgtcaaaggatgcgtcacggaacagaaacagacccggccgcgcccccttcacacggaatcgagcctgctggcggcgatggaaaccgccggacgcgaactatctgacgaggccgaacgcgaggcgatgaaggatgccggcatcggcacgcccgccacccgtgccgccatcatcgaaacgctctttgcccgcgagtatgtcaggcgagagaaaaagtcgcttgtacccacggacaagggactggccgtgtatgccgtggtcagggacaagaagatcgccgatgtcgccatgacgggcggctgggaactggccctctcgaagatcgccaccggggagatggacgccccgacgttccatcgcggtatcgaggtcttcgcctcgcaaatcgccaaagaactgctggaagcaagaatcgacggcgcggagagtgacacagcctgcccgcgttgcggcaggcccgtggtgttctatcccaaactcgccaagtgccagaatcccgattgcggcctgaccgtatggagaaccgtggcccgcaaggagctgaccgacaagcagctcgcggaactgctgaccaaaggcaaaaccggcacgatccggggattcgtcaaaaacggcggcgggacgttcgacgcggccctcacgctcgatgaccagttcaagacctcgttcgttttcgaaccgcgcgatactcccaggcagggaaagaggaacaaacggaaataatcgttacctttgccactggaaaagacctgtcataacgagatacgcttgtttgataaggattttttcagtggtcggcgcttcgggtgggaacccggggcgcctttctcttccccgattatcaacgaccactaaaaattcttatcatgccagacaagcaacaccatacccccacgggggaattgtcctattacggactttcgttactatcctacctcaaggacagccacccggaactcatcgccgaa

SEQ ID NO: 10461 - DNA, 354 bp, Unknown
  gut microbiota DNA sequence
aaatgaagaatgagcatgtaaccgtgtatgccttatggttttccttcattgtctcctttgacggattgttacttctacacttctgcaaatggagaatgacaggtagccgtgtatgccttatggtttttcctcattgtctcctttgatggattgctacttttacacttctacaaatggagaatgggcagtgaaccgtatatgccttatggctttccttcactgtctcctttgatggattgctacttttacacttctacaaatggagaatgggcagtgaatcgtatatgccttatggctttccttcactgtctcctttgacggattgttacttttacacttctacaaatggagaat

SEQ ID NO: 10462 - DNA, 726 bp, Unknown
  gut microbiota DNA sequence
ggacgagcctttatgaccgggccgggcagggactcctccagaatcatgtccgtcgtttccctgtattcttccagatgccgcgagacaaggtggttgatgaacccctccagagtgacctttccgtttctcgaggctcccgccaggatggacagtttccggtgcagggcggcgggaatatgcagcgaccgacgctgcacgcccgcaatgccatgcaggtattcctccccgtagacggacggttgcatggggccatttttccttgcgggacgtataatgtcgttaccggacgttccacgtctcttccggggacaggcaggcgcttcccccatgatctcacggatgcggtccgcgtccatcccgccaagaccaatccgctcttttacgttctttcctgtcatgatatgccttcttggacaatgacaacgttttatcggcgaggtgttcctcccggctgtccgtcctcatcccagggacggtagacctcaccgagcagggaggcgatgtcctccctgtgttcctccatatggagttccaacaaccggatgataaaaccggagatgctgccgcagccggcggccctgaccagcatggcgatccggcggtgcagtctcccatcaatgtaggcggtcttccactcagcggctctgggagcgggaaccagaaacctcctcttgtattcctccggacctgtcactttccctgcccggacctgacttccatgacttg

SEQ ID NO: 10463 - DNA, 788 bp, Unknown
  gut microbiota DNA sequence
cgctggccgaagccccgacacaagggcaggatatttttcactatgcccccaaatctgccggggcagaggactacgaaaaggtatgtaacgaactgctaacagaaataaagtaaccatatggcaaagaagaacgatttaaaaaacagtatgtcggccgggctgaccgggggattagacagcctgatccaatccacggccgggcaaaaagaggctcaaaagccgaagaaagcgaaaaccgtgcattgtaattttgtcatggacgaaacctatcaccagaacttaaagctgatcgcgatccgcaaaggcgattcgctaaaatcggtattgcaagaggctatatctgactacttggataaaaacagttccctgctataacagcgtatcgggaatatacagggcaaacactccacaaaagaaattctccaggaaaaaggtacgcaaaaagcaaccctacacataaattacagatgataaaagcaataaaaaacccgttggcgggattaatcttgcgtatgtttaacctgccaacgggtacgatattaataaacgtttggattaaggtttgacgtttacgtctttattatctgcatcaacccagcctgttgtctctgcatcaaaccggatcggattcaacacagcctctccctgatcatcataaccaccaccgaaaatcaacgtgtagatatgacgcttgcccgctacccatgtatctccgaacggaacataaattgttttgtattcgcttgctgaacccaacagataagctccggactgccggattttgcagg

SEQ ID NO: 10464 - DNA, 203 bp, Unknown
  gut microbiota DNA sequence
agtgcgttaagcgtgagcagcgacagcgaggggggacagtcgatcaggatataatcgaatttctccttttggcccttgataaggtgggctaagataagttcccgcccggcctcgttgattaactccgtttcaacggccgagagatccaggcaggagggaacgacgctaagaccgtccttatgctcgtagatcggcaggtcgta

SEQ ID NO: 10465 - DNA, 8888 bp, Unknown
  gut microbiota DNA sequence
atattcatcgatccgattacagtccattgcggggcgagggaataccaaaacgagattacacctataattaagttgcgtgatctcctcgggaggcacactgacggcttgttaggtaatactcatctattgatgaatcctctggaaatcaatttcagcgagagctatttgcgccagttaaaaggaccgttgttagctgaacagctcgataattatgtaaaactcgacgctcgattcgaggataaccgtatcgatgtaaaggcgacgctgcaaatcgacgatgaaaatagcctggagggttggtttagaatggatttagggtgcggctccacgattattctcacgaatgaaacggcgtctgcatttaattttatggatgtgccgaaggcatatttttgcacacaggccggaggtatcggcggcggttctgaggaggttacgataagggctgcaaaattctttatggccgatacgctcgaaaatctcgtgatagattactcgctcaatgaaaagggggcattatcgtcggacagaccctatataggtataataggtaatgaaatctggtcgctctacgacattgttttggatccggtaagttcttctgtatgggttaaacgcaatgagaatcagggtacctacgcccaatcgtcggtgacgcatatggctactgttgaccgtacggatatttgcggtggctggattgtcaatggcctatataaaggaggagtcgcggagcaagccggtatcgaaatcggtgatataattgtagccataaataatcgtcctgtcaaagaaataacctgggaagagcaacgaaaaggtttggaacttcagggagaaactacatataccgttcaaaaacccgacggtcaaatcgtttcctatactttgtttattggtaaacagattatctgacccaactatatcccatatagtccggagtttgctgtttccaaaaaaattgtggaaaggacgagtatatgtcgatatggaatcgggaccgaggacgatcggtaaagatgccgctcgctgccacgggccggtttgaatgtatgatccatattattcgccgaaaaactcgcggataattccgtatgttttgtaagtttggggataattatgtgcgactatgaaacatccggtagatattgataattggaatcgtcgggagaactatctttttttccgggatttcgccaatccttattacagtgttacatcgcaggtcgatgtaacggaaacgtatattcgggcgaaagcgctgggtatcaagttttcgcactatgcgatgtacgcttcgctacgggctgtcaattccattgaggcattgaggtacaggcaggtcgatggaaaggtctggctatatgatcggatcaggctcaatacggcggttgcgcgtgaggatcactcctttgcatcggttatcattccctataatgatacgctggaggagttcgtcgctgaagcgcgagggatcattgcagccgcgatgcggggcgagggagatgcgtacggagccgattccgagaaggacacgtttgttataagtgtgaatccgtggtatagcttcacagggttacagttccagtttccgcagaatgcaggcgagaatatccctttgtcggtattcggaaagataatggtcgatatgcagggacgccgtacgatgcctgtggctgtaagtttccatcatgggtttgtcgatggttatcaggtggggcgttattgggaggcgttccaacataatctcgatacgctctcgatgtaaaatacacgatccgatttcggccggagttttagtcgttttcaccgctgtccgcagggacaggtaggaacaacggggaacattgaggaggcatataaagaattatttggcattatcatccgtaagtcgtatcttgcggcggcccgattttttgagagatctattgtggcatcgtggggcattgtggattcatatttgcctgtccgaaggaggcttatggtagcttatcccttgtaatggggatggttttctgtggttttagcctgtttcggcgattgtagaatatggataatacggcgatctttgtaacgtgaaaagagataagtgttaatagggttgatgaaaggttagagaaaaatttttgccaagaaattttatttgttaaagattgtgtgtggaaaagtctgctgggaagcagacttttctgtttttgggtgcgaatatttcgtattgtccatcgggggtattgttttcgaaagcccgcgcaagagtacgaataccgcagagtcgatatattggccggtcgcggccgaaagtgaaaaaagccccggatgttgcatccggggcctttcttttgaagggcaggtttattatttgcccatgtagtttttcacgtagtggtggtgctgtccgtagcgctcgaatgctgcccggtccagggattcctgggccgaaggatcggcgatcgagatgatcagccgcgcacgctcctgcaggcttttgccgtagagattgacggcgccgttttcggtgacgaaccagtggatgtggttgcgggtggttaccacgcctgcgccgcaggtcagttccggagcgatcttcgagatgcctttgttggtcaccgaaggcatggcgataatcgccttgccgcctttcgacagcgaagcgccgtagatgaagtctatctggccgccgacacccgaatagaatttcgtacccagcgaatcggcgcaaacctgaccggtgatatccacctggagtgccgagttgatggccgttacgcggtcgttcttggcgatgatgaacggatcgttggtgtatcccacgtccatcatcagtacgcccgggttgtcgtcgatgaagtcgtaaacccgctgcgaacccatcaggaaggtggaaaccatcttgcccttgtcgatgttcttcgcttcgccgttgataacgcccttctccaccagcgggagaacgccgtcggcgaacatttcggtatggatacccaggttcttgtggttgccgagctgtgccagaaccgcattcggaatagcgccgatacccatctgaagcgtcgcaccgtcttcgatcagggccgcgcagtgcttgccgatgcgggtttcgatctcgttgggttcggtgaaatgtgcctcttccagcggggtatcgtcctgtacgaagaggtcgattttcgacgagtggatcattgcgtcgccgaacgaacggggaacgtgcttgttcaccactgcgatcaccgtacgagccgtttccacggctgccagggtcgcatcgaccgaggtgccgagcgaaacgtagccgtgtttgtcgggcgtcgatacctggatcatcgctacgtcgcaaggtaccgtgccgctgcgatagagcttctgggtttcgctcaaaaagatgggaatgtagtccgcatagccgctttgcgtcactttgcgcacgttcccgcccacgaagaacgagtcgagctggaagatgccttcgaactgcggatcggcatagggagccggcccttccgtgtgcaggtggtggatgtgcacatccttgaattcgtggttggcgccgcgttcgcacatggccttaatcaggcactggggggccgaagcgaccgagctgaggtgaatatggtcacccgatttgatgactttcacggcttcggctgccgttgtgaatttaatctgagtgttcatttcttttttcttattttagataagattccttgcattcggttagttgcgttttacctcgacttgctcgtaaccttcgatgacatctcctacgcggatgtcgttgaaggattcgatgttcagaccgcagtcctggcccgtgagcacctccttgacatcgtccttgaaccgtttgagcgagccgagcttgcccgtgtagatcacgataccgtcgcggatcacgcggatcggggtgtggcgggtcagcttgccttctcggacgacgcatccggcgacggtgccgactttggaaattcggaagatctccatgacttccgccgagcagacaatctcttccttcatcaccggttcgagcatgccttcgatggcatccttgatgtcgttgatcgcatcgtagatgatcgaatagaggcggatttcgatctcctccttttcggcgagcttgcgtgccgatgccgacggacggacctggaagccgacgatgatggcattcgaggccgccgccaacagaacgtccgattccgaaatctgaccgacggccgagtggatcacattcacctgcacggtctccttcgagagcttgatcagcgaacccgacatagcctcaaccgaaccatcgacatcgccttttacgatgatattcagctccttgaacgatccgatggcgatgcggcgtccgatttcgtcgagcgtcacgtgcttctgggtcatgatgccctggatacgctggagttgctcgcgtttgttggcgatttcacgggccgagcggtcgtcctccatgacgttgaacgtgtcgcctgcctggggagcaccgttcagaccgagcacctgtaccggcgtcgaagggccagcttcggtcactttttggccgttttcgttgaacatcgctttcacacggcccgtgtgtatgcccgaaagcattacgtcgcctatgtgcagcgtaccgttttgtacgagcaccgtagccacgtaaccgcggcccttgtcgagtgtcgattcgatgacggctcccgaagcgcggcggttcggattggccttcaggtcgagcatttcggcttcgagcagcactttttcgagcagtttgtcgagattcaggccctttttggccgaaacttcctgatcctggtatttgccgccccacgactccacgaggtagttcatctgcgaaagctgctccttgatgtggtcggggttggctgcgggtttgtcgatcttgttgatggcgaaaaccatcgggacgcctgctgcctgggcgtggttgatcgcctcgacggtctggggcatcacgttgtcgtccgccgcgacgatgatgatcgctacgtcggtgatcttggcaccacgggcgcgcatggcggtgaaagcctcgtggccgggggtgtcgaggaacgtgattttctggccgttcagctctacactgtaagcaccgatgtgctgggtgataccgcccgcctcaccttcgatgacgttggttttgcggatattgtccagcagcgaagtcttaccgtgatcgacgtgtcccatgacggttacgatcggcggtcgcggcacgaggtcttcctcgctgtcctgttcgtcgtcgccgatggcttcctggatgtccgccgatacgaattcggtcttgaagccgaactcttcggctacgaccacgagcgcctcggcgtcgagacgctggttgattgataccatcaggcccaggttcatgcaggccgtgatgacctcggtcgccgaaacgttcatcatcgtagccagctcggctacggtcacgaattcggtgaccttcaggatggagcgttcctgctcttcgcgctggaattcttcgttcatgcgctcggctacggcttcgcgtttttccttgcggtatttcgaacctttgctcttggcgtttttcgacgtcaggcgggccagtgtatctttcacctgcttcgaaacctcctcgtcgctgatttcgggacgaacgacgggcttcggagctttgagtttgtccttgcgggtcttcttgttctctcccggacggggttggttggattgcgggccttgtccgcggccgggctgtgcggcggatttgccgttgctgcccggcttggggctgcctgccggcgtacgggtcacgtccactttctctttactcaggcgtttgcgtttgtggcggttgcccggtgtgaatcccgatacgtccatcgtgccgagtacctgcgggcccgtgagggtctgcacggcggggcggaagatgttgtcgctcttgggcgccgcttccggttcgggtttggctgcggaagccgtttcggaggcaggtgccgcttccgttttgggggcggccggttgcggtgccggctgcggtttcggagccgcagcctccggtacgggctctgccgccggtttgcttaccggtttcggagccggtttgggcttgggcgaaagatctattttgcccagaattttgggctggggcagttcgtccttgacgctgatgacgttgcttttgataattacctcctgctcctcttcgcgcgtctgtttctgtgcctcttcgagggtgatcgtagcctgcttctgggagattcgctcccggatgctttcccgttcgttgccggtaattcggctcccgccgaattccttctccagaacggcatagacgtccggttccaccagcgtattgggcgaaccgtcggtttttatacccttcttttgcaggaagtccgtgatggtattcaatcccaccttgaactccttggcaacctggataagtcttaattttctttcgttactcatatatcggttttaatttttgtgcgatgggacggattactcctcgaattccgctttcagtatctcgacgactttctgtgcctgttccagctccaggtcggcacgggcggcgatctcttcgacgggcagttccagcacgctcttggccgtgtcgcagccgcaggctttcagggcgtcgatcacccagccgtcgatctcgtcggcaaattcggtgagtgcaacgtcttcctcctcgatttcgcggtaaacatcgatatcgtagccggtcagcatcttcgaaagccggatgttcaggccgcccttgccgatggccagcgatacctggtcgggcttgagatagaccgaagctgtcttcttctcctcgtcgatggtgatgctcgaaatcttcgcggggttcagggcacgctggatcattaactgcgggttggtcgtgtagtttaccacgtcgatattttcattgcgcagctccttgacgatcgagtagatgcgcgatcccttcatgccgacgcaggcaccgaccggatcgatgcgttcgtcgtaggattcgacggctaccttggcacgctcgccggggatgcggacgatcttcttgagggtgatcagaccgtcgaaaatttcggggacctcctgctcgaagagccgttcgaggaactggttggccgtgcgcgaaaggatgatgcgcggctggttgttgttcatctcgacgctcttgacgatcgccttgatcgtgtcgcccttgcggtaatagtcgttgggaatctgctcggtcttgggcaggatcagctcgttgccctcgtcgtcgaggatcagcacctctttcttccatacctgatatacctcgccggtgatgatctcgccgaccttctccgaatatttttcgtaaaggttggccttctccagatcgaggatgcgcgaagcgagattctgacgcagcgacagcacggcccgacgtccgaacgattcaagtttgatcggatcgacgtattcgtcgcccacttcgtaggtcggatcgatggccttaacctccgatacggcgatttgcatgttcggattctccaccgcgccgtcctccacgaccgtacggtttcgccagatctccaggtcgcccttttccgggttgatgatcacgtcgaaattctcgtccgtctcgaactgcttctgaagcgcgtggcggaaaacgtcctcgaggactccgatcatcgtggccttgtcgatgtttttaagctccttgaactctgcgaaattgctgataagattaagattatccattggttttttatcttgtttatttttgaatttccactatttgaaatcgaggtattccttcgtgtatttgatctctgagaaagggtagcggcgcgtaacccgcaccgtctgtttccgctttttaccctctacggcctgcttctcctcgtaggagagggtgagtccctcctggtccgcctcgtcgagcgtcgccagaatcttcacgccgcttttgagcagcacttcgaccggcttgccgatcagtttgcggtattggcggaggtgcttgagttccgagccgatgcctgccgaagctaccgtgagggagaaatcctccgtgtcgcggtcgaattcggcctcgatcgcgcggctcagctccacgcaggtttcgatacctaccgaggtgtcgctgtcgatcagcagttccacttcgttggcgggcgaacaggtgcaatccactacgaacaagtcggtgccgacgagtttggcattggctatttcggtgattttcgtacaatcgatcatatttgctgatgttatcaataaagtcgttttccggtgcgggcagttcgtgcaaatccggacatctgtccttccccggcgaaaacttgaagttcgttcagtcgtttttgcggccggcccggaggcgttcggctttttgacgaaaatgtaggaaatcgtcgcttcccgttcgttttcatcgtcttgcgtcctgcgttttcttcgaacattgcatcgcaaggagcactattcgcgcccgaatcttgtccctgttgtagcaggagctgtaatcgggtacccgcatggcccgcaactgccggtttctcccgacggagcgggtgttcgtgcgcaggcggggcgagagagttgcgcggatgattcgccggtcgaaggcggtgaatatatctacgaaataaggggacttgctcgtccccttacctctctgtacccgtttacgctacaaatgtagcgaatgtttttcgattttcaaatctttgtacggaaaaattattcgtctttttcgctgtttggcgagtagggtttgacgataccgcgctgcgattcgcggatgaaccggatgagccggtcgcgttcggggctttggggaatctgtttttcgacctcttcgcagccgttcaggtagttcagaccgctctggaagaggatgcggcaggcgtcgtggatctgcccgatcatctccgctg

SEQ ID NO: 10466 - DNA, 2168 bp, Unknown
  gut microbiota DNA sequence
cccaccagcgcgccgccctgaatcatcgtatgctctccgatgcgcgtccactgatgtacggctacatggccgccgatgacggcccagtcgccgacttcgacctctccggcgagcgacacgcggttggccatgacacagtggctgcccaccacgtcgtcgtgggcgatatgcacgtaggccataatcaggttatggctgccgacgacggtcttgccccgggaggcggtgccccggctgatggtgacgtattcgcggatttcgttgtagtcgccgatttcggccgtcgttttttcaccgacgaacttcaggtcctgcggggtgcaggcgatcgaagcggccgtatggatcttgcagcctttgccgatgcgggctccgtcgtggatcacggctccgggaccgatccaacagtcgtcgccgatcactacgtcgccggcgatgtaggcgaaaggttccaccgttacgttcttgccgagtttcgcgtcgggatggatgtatgcctggttgcttatcatgtgcggttactctttatttttaacgatctgggccatcatcgtggcttcgcaggcgagcgtttcgccgacgaaagccttgccctcgactacggctacgcctcgtcggatgggctccagaagttgaacttcgaagtgaagggtatcgcccggaacgaccttgcgcttgaattttacaccgtcgatcttcatgaaataggtcgaatagtgttccggatccggaatattgcgcaataccagcattccgcagcactgcgccatggcttcgacgatcagcacgcccggcatgacgggctcctccgggaagtgtcccacgaagaacggttcgttcatcgtgacgttcttgatgccggcgaccatcgtatcgtcgatgtagaagatacggtccaccagcaggaacggcgggcggtggggcagcatgcggcggatgtcgttgatgtcgtaaaccggcggtttgcggcagtcgtattggaagcggggtttctctccttcgcggcggatagtctgtttgacttgcttcatgaactccgtgttggcgaaatggccggggcgggtagcccatacgcggcccttgatgcgtttgccgagcagagcgaagtcccccagcaggtcgaggagcttgtggcgggccagttcgttgttgaaacgaagttccaggttgttcaggtagccgcccgtgatgcggatatcctgtttgttgaagattttcttgaggtgttcgagctgatcgtccgggacgggattctccacaacgacgatggcattgtccaggtcgccgcccttgatcagattcattttcatcagaggctccaggtcatgcaggaagacgaaggtgcggcagggcgcgattttcgaggcgtagtcgtcttcgggattgaaggtcgcgtactggttgccgatcaccttggagttgtagtccacgtgcagcgatacggagaattcgtcgtcggggtaaaggatgatggccacgcctttttccggaatcgtatagaccattttttcggtgacgtggtagtaggtgcgttcggcttcctggggttgcaggccggtttcgacgatcgttttcgcatattctttggccgaaccgtccatgatcggggtttcgccggcatcgacgtcgatcgtggcgttgtccacgcccagggtccagagggccgacatgatatgttcgatggtcgcaacgcgtgcgccatccttttcgatggtcgtgccccgcgaggtatccgtaacatagtcgcacagggccggaatttcgggtttgccttccaggtcgatgcgacggaaaacgatgccgttgttctccggggcggggtgtaccgtcatcgtcactttgactccggtgtgaagacctgtgcctgaaaacgagatcggggctttgagggtttgttgtttggcagccatagtctgaatttattcaaattgcaacatacattcccattgactgccgggtcccgacgtgtgtggggccgaccgtcattttcggaaatgtttatcgcattatttgcgcgcaaatataggaaatattattcaaaaatcgtatttttgcctaaactaatgataaaccgaaactccgtggcagcacccgataaaactccccgtcctcccaaattgcatcttcccttcgaaacgaaaaagactgatgcgggcgaatgggcttac

SEQ ID NO: 10467 - DNA, 3979 bp, Unknown
  gut microbiota DNA sequence
tgatgggctacgctatcggccggatcggtgtatggacaatcaatcggatcaatttgagcaatcattcgctctatccggtgcttttgctcgctttcgttttctttaccttctcgtttaccgacctgattggcgggaacggatacctggctgtttacctggcaggattggtgttgggtaataaccagttgacgcagaaacgttcgctgacgatcttcttcgacggcttcacctggctggtacagatcgtgatgtttcttacgctgggtcttctcgtcaacctcgacgaactcttgcagcccgacgtgctgatgctgggctgtctggtaggagccttcatgatgttcattgcgcgtcccgtcacggtgttcgcctgtatggctcctttccgcaagtttacgaccaaagcccgtctttacgtttcctgggtcggtctgcgcggtgctgtaccgattatttttgcgacctatcctttgctggccggtacggagggagcgcggttgttgttcaatgtggtttttctggtgacgattctttcgctgctggtgcagggtacgaccgtaagttggatggcgaatctgctcggactcggatatgccgagaagagtcctgctttcggagtcgatgttcacgaagacattccgtcgatatttaccgaagtccttgtcaatgaatcgatgcttcaggggggcactacgctcaaggagatcaacctgccggagaatacgctggtgatgatggtctatcgtgacggagattatttcgttccacagggcaataccgaactgaaggtcggtgacaagctcttggttatttcagaccggggcgaggagctggagtccacctataaggatatgggagtcgatgaagtgctgaaactttgagatatttcctgcagatcggttctctctgttatcgaaacaaaaaagctgtcgttttcgacagcttttttgtttcgaatatatcttgaagattagatctcccaagtagcgcccgagtggagcaggtcgtccacgcagtggatcttgctctgggctttcacctcttccacctgcttttcaacggcctgatcgtaaacgatttcgtcctcgaccgaacggattacaccgagtgcgaccggatagtcgggatatttcattgcggccagcatcgagtgcagcgtcgtgtctttggtgtgggcgtcgtgcgtcaggatcttgtccagcgtatagccgtcctgtccgaccgttacgactttcaggcgcatatcctcgaacaccagacctttttcgttgttggcgccgaagagcatcttctcgccgtggcgcagcgtgatagtgtgctcctggcgggtagccttgtctccggcgaaagccgcatgggtcttgtcgttgaagatcacgcagttttgcagaacttcggtgaccgacataccctgatgtttcgccgctgcgatcagacactctttggtcagattcacctccatgtcgatcgaacgggcgaagaaggtgcctttcgcgccgatcaccagttcgccggggttgaacggcttttcgaccgtaccgtagggcgaggtcttggtgattttgcccagcttcgaggtcggcgagtactgacctttggtcagaccgtagatctcgttgttgaacaggatcgcgttgaggttgatgttgcggcggatcgcgtggatgaagtggttgccgccgatggccagcgagtcgccgtcgcccgaggtaacccaaacgttcagacgcggattcgcagtcttcacacccgtagcgatggcattggcgcgtccgtgtacggagtggaagccgaaggtcttcatatagtaaatgaagcgcgacgagcagccgatgcccgagatgaacgtgaagaggttgtgcggcgtatcggtctggtcggcaatttcgggcagggcccgctgtacggcattcagaattgcgtggtcaccgcagccgggacaccatcttacttcctggtcgcttttgaagtctgccggagtatatttgtaatctgccatggctttatttcagtaaagagtgaaacttgttcgtgagctcggtcaccgtgaacggctggccttcgcacttgttgtactgttcgtagtcgaattgctgcaatttgccgcgcaggtagttggcgaactgtccttcgttaagctcgcaaaccacgatcttcttgaagcgtttgaagatatcggcgacgccgtgcggcagcgggttgatgtagttgaagtggcagagcgaaactttctttccttcggcacgcattttatcgacggcattctgcaggtgtccgcgtgtaccgccccaacctactacgagcagatcgccttccgggtcgccgtaaaccgtctggtgcgggatgtagtcggcgatcttggcgattttcgcggcacgcaggttcgtcatttcctggtgattctgtgggtcgatcgagatactgcctttcagcttgtctttctccagtccgcctacacggtgctccagacctgctttgccggggaatgcccaactgcgtgccagcttctcgttgcgggcgtagggcatgaaagggcctccgtcctcggttttgtcgatgatcggcgggttgatggtcgggtaatccttcatcgaagggatcttccacggttcggaaccgttggcgatgaatccgtccgagagaagcactaccggcgtcatgtgctccatggcgatacgaccggcctcgaatgcgtagtggaagcagtcgctcggcatcgaggcggcgatgaccgctaccgggctttctccgttgcggccgtagagggcctgctgaaggtcgctctgctcggtcttggtcggaagacccgtcgaggggccgccgcgctgtacgtccacgactaccagcggaagctcggtcatcacggccagacccaatgcctcgctcttgagcgaaagaccgggacccgacgtggtcgtcacggcgaagttaccggcgaacgaagcaccgatggccgtacagatacccgcgatttcgtcttcggcctgtacggttttcacaccgaggtccttacgtttggcgagttcctcgagaatgacggtagccggagtgatggggtacgaaccgcagaagaggggcagaccgctcttctcggatgcggcgcaaagaccccatgccgttgcgacgttaccgctgatcgaccggtaagtgcctttctccatctggcccgatgcgacggtatatgtattggcgaactgatgcgtgttggcggcatagttgtaaccggcgtcgatagcgcgtttgttggcttcggctatagccggatttttcttcgcaaattttgaatcgaggtagtgtttcgcatgatcctctggacggttgtagaggtagaagcagatacccagtgcgaacatgtttttgcacttgaccatcgctttgttgtccagaccggaatccgccaaagccgccttggtcatctccgtaatgttcggaacgactacgttgaaatcttccaggttcagctcccggatcgggtcgagcgttgcgaaacccgctttccgaaggtgctcttcggtaatggagtcctcgtcgaggattaccgttgcacccggcttgagccatttgcggttcgccttcagtgccgcagggttcattgcgatcagtacgtcgcagaagtcgcccgggttgagctgtcttttggctccgaagtgcacctggaatccggatacacccgctacggtaccttgcggggcgcggatttcggcgggatagtcggggaatgtcgagattccgttgccgagcaaggctgaagtgtcggaaaagagcgtgccagtaagctgcatgccgtcaccggagtcgcccgaaaagcggatcacgacatcttgcagctcttgtaccttgttttcattcattgctgtatgtgaattagtaatataataaggttgctttattgggtcgttttctgtgtccggcacggtttcgatcgattcgaccctgccttcctttgtcgaaaacattataatataatgccacaaatata

SEQ ID NO: 10468 - DNA, 8555 bp, Unknown
  gut microbiota DNA sequence
actcaaattgaaggaattaaatgactatccctaaattatgctgcatcccttgcccaagcgtttgcaggtcgtcgggtttatcccattcgacactgcaaaaatactattgtcagcgaccctttgcagggagtaaaaaacagcccatttcctactccctaaaatccatagatagcggattcagtatgcggcagcttgtttgcataggttttcagcactcctttcagcgattcatcgctatccttaaagtttacatttcgtgtcagccgcataaaatagaacagacgggaaataagcaacattttattataagatacctctttatcgcatctgtgttcattcgccgcacctcgattcggcaatttcaaagcatcgaacagatgtttgaacttatccgccgcaaagcacatataataggatgaatttgtgaatgtcgttgtgtaggtagaatgatctattatgcggtaaaactccttgtctttccactctttgagtttttgccttaatccatacataactgctgcttttacatttgggtctgcttcgcggctctttttaccctttacgcggaatgtaatctcaaaatcttttgaatctccgatatagtccaatattttggttaatgattttggcgggagtttaacccaaaaacatttggtaaacttttcaatcgaccaatcgtaaacaaacagcacagcccaccaaaatttatttacgtccaatccgaagcctttaattgtcgctataatatccgtttcctgcaaaaacatttcttttgtaaacggggcttttatcttctcctgacagaccctatcccaaaatctgcgtgggaaagtgtctatgacttcatcacccatataattccaagaatcggtaatcgcatatacatattccaactctttttcttcttgttcgtcggcttcataaaagacaaatcctaaatcgtcggttctaatactcataatccaaattattttatttccaaatttagcgaatttcgctgaaaagccctcatttcggctcccgataaagaattccccgattcatttgtttgctgaaaataacctctgtacctttacagaagccagcaagagggataagggcgatgcctaaatctgtcccctgcttcgtgctcaaaagtggcacttataccactacctacccaaccaacacctaatttaggctctcggctctgaagagcctcaaacccgattttcagactatgctgtactatgtaacgcaaaacaaatgattcgacaaccgaaaagccgccaaagccgcattaggctccgcctgctttcggaaattattaaaaacaaaagaaatactatttactaattacgtcgctaacgatgaattatacaacgattccaaaatcaatttgccagcttcagacgggcaacggcaaaccgaccgacatttacgtttgagcaacgattaaatgcaaatcggactacaagacacagacaagccatataacggaagaaaggctgtcccaaataacgggagtaaatatccgtaccgtcaaacggtctgtccaacgattaaaggagtgcggagcaatgcaggttacaacccgcataatcgacggatgcaaacgccgtaattcctattatatagccaatccccaaacggatttctatttcgtggataaccgattctttacaaagagccacccgccgaaaattgcgggctttctgctcttattaaaggctatatgtcttaataatacgaattctatcctcctttgaaatatcggacagattgccgatgctgtcggaatgaatcgtaatacggtttccgctcttattaaagagagtaacggattaggtctgattaaggccctgccgaacggctacgaaataacggatgattgctttataaacccgccgcagaaagacacggcacacgccgtctataatgaaatatgccgattctgcatgacaaagggaacgaatccgccacaatgaaatgaacgggcaatgaatcggattcttactaaatacaacattacgaatctgtcggccgataatccgctgtcggttacttatgcccttaatgaacggtgcaagatgattcccgaatccgtgtcgctggcttatttcgttaaagtgttatgcacccaagacccgataaaggcaaacaagctacattcacaatcttttctactcacataatatactttcgttcagacgctccgattttatagtcggggcgttttgctttgataccccgaccgagcggacaatccctatttttcacccctccccattttcggatggaaaaccgaatttttatctattccattaataggattccacataaaacagaccaccccctatttatgcccgaaaccatctaacagcataagattattgatattacatgaagttggattactactgataagcgataaacaaaaacttaaccgctatgtacgaaacacaagagagagctaaacggattacggacatccatgttttatggggacaaagcacggttatcgaagagctgatccaagcggggaaaatcgacgaggaatacctctatccctttaatggggacgaggtgttggaatggtggcttgttactccgtggctggccgaacgactgaaagagcagggcgaaatcatcatcgacgaattagggtgtcgttggtggggacggctgacaagcgggcaggctatttacatggacggcgtaatacaagaaatctgcgggaacgattaacccaacttacaactaacaaagtttcgattccatactcccgactattggatagaaactttgttttcaagaactttgcacaataaaagcgcagcaaatttccatagagtgttctgtcttttagaaacattttctatctttgtgtcgttaccgaataggtaactaacatattagtaacgtgaaagtgtttcgcgtttactctcacatagaaatctgacagtttcaataggtacgggagtaagcaagacagacactcttcatttgtgtagctatatatcatcccgatatatactgccaagtgtggggatttgcttatttgtaccaaggttttgtcagaacctctatgtggataagcgaacaactccacactttctttttgcatataacccaccgcaacaggagttgatacggtaagacttgaaacacttgttcaacttaaataatcttactatgaaaaaattatttttatttgtgcttactgcaatgatgatttgcagttgctcgaaaagcgaaacagaagacaaccccaacccaaatccagaatcatccgtaacaggaatgtggctgacccccgacgcattgacctttgaatcaacgggaggatcggaaactgtttggcttaatctcaattatagcggaacttccacaaatgctcaatggaaactgacgggcggcgaatcttggtgtacggcatctaaaacgagtggaggagacaacgaacaaatcactttcgaggtaacagagaataatgatccagatgaacgaaatgcaacgtttacttttacatgtggatcggtttcgactaaacttgtcgtaacgcagaaacaaaaggatgccttgactgttacatcgtccaaaattgaaatggactccaatggaggaattgcgatagttgaagtcaaagccaatatcgactatgaatatgaaataggaaaagactgcaaggattgggtaacactcaaggaaactcgcgcacttcagacaacaatgctttcatttgatgttgcccaaaatacagactttgaaaagcgggaaggaacgattactgtttttagcgacggattgtccgaaaccataactatttatcaagcgggagaagagcctactattgtactgacacaaaataaatacgatgtttcaggtgatggggaaacgataaaggtggaaataaatagcaatgttgattttcaagtaacgattccatctgatgtagattggataaaagaaacatggacacgggctatctcgacacatacaaaatattttaaaatagctactaattcgcctaatcaatctcgaagtgcggagattttatttacaaatacggaatatagcctttcagaaaaaatcatcatcaatcaaaaagcggcatcttatgtaaccgttcatgtcgttcaaaagggaggattatctgatgtactggttgataaagaattaaatcccgaatctattatttccatgaaaataataggggaattagatgccgaggattttttgacaatccagaatatgataaacctaaagaatctcgatcttgaagaagtgaacctaacagagcttccgacaaaggctttttataaaatgaaaaccattgagaatcttatattaccgcatacattaacgatcattaacgacagtgaattttatcaaaattcactgaagtcgataataatttcctcaaatgtggaaacgataggagaatatgcattttacgagtgtccattaaaatccattaacatcccagcgagtgtaaaggcgataaacaaagcggctttcatgaattgttcatcattagcaaccattaccttttcaaaaggttctatgctgacaaaaatatgcggaggaaaaggttttttgagccatggagagaaatattattatggagcatttgcaaattgcacggcattaacttccattgagattcccgcaaatgtagaaatcattgaagaagcggcgtttaaaaattgcacagctctaacgaccgtcacattcgagaataactcaagtttaaaaacgatatgtggagcaacctatgactattcttattacggcggagcattttctgattgcatttcgttgatttccattgaaattcctgcaagcgtagaaacgattgaagctgctgcattcaaggggtgttccaagttggcaaccgtaacctttgagaaaggttctcaactgaaaactatcggtggtggctattctaattcttctgattattatggtgctttctcggattgtcctataacctctattgaaattccagcaagcgtagaaacgattgaagcggcggcattcaaggggtgtttggcattagcaaaaattacttttgagaaaggaatcaatctcaaaaaaattagcggcggttattctgaaaatagaaatacagatggctatttttatgggcatggggcatttgcaaaatgcacggcattgacatcaattgaaattcctgcaagtgttgaggtaattgaacctgaagcgttctggggttgttccgctttaataacagtgtcctttgaacacgaatcgcaattaaaaatcattcaaggcagttacgaaaaaatctatgtaggtcacagtcctaacggatataaccgctattatcgtagcggtggtttcagaggacttgcaaatcttacgacattcgatgcctctaattgctcgcaaatagaatcaattgaaccaagtgccttttatcattgttctaaactgcaatcggtcaaggttggtacaatgattccacccacttgcggcattgatgctttctcagaattaaattcatataccatattgacggtaccaaaggaaagcattgaggcatataaacaagcaaatgagtggaagaattttacaaatattacagcattaaattaagctcaatattttatgaaaactcttgatttaatattcttcggactaaagggaaaaataaacgggccaaaggctctaaaagagttggaatcactcggagttataaaaggcaataagatagtttatgatgataatgataaaatcttagaggctaaaatatatgcaataattgacaaatatttcgggcaacactgatttgtaaattgagtgacagactttgtaaaaaggttaatctataagacccttttgcagagtttgtcactttcttattttgtttattccgctaataatcttatctttataaagataaataacaatcaaattttagctaaaatgaacagatacaaacaacctaaaacagaatgaaagaccgacgcatgagaggataagcagataatccaaaaggcggttaaatggagccaaacagagggaatagtcctgcttgtaggaaaacccaaagacgaaatatttcccgaaacatttatctacatgtttgcccctaatatggcagacattacaaagcccgtcgaaattgtccttacaaagaaccgacaatacatatttggatgaaagtgcgaacttaacgaaatggacgggataatcggcacaatgacggctaacgaggcacaaatcgagggaacgggcgaaaaggtgaatttgttcgactaccacgtgaaagccgatacaatcctattccaatacgtcacacccgacggacgggacgaggtagtgaaattcccgttagcgggattttgcgaaaactatctgatgcagtttgtaaaataattcggtggaattgaattgcatcgtatctataaaggttaaggagaaagggccgaaaaaatgcggcgttttcccttatacataaaatttcagattaaaaacaaggcaaattttttcgttcattagttagtttgcgacaattttgattattttctgtaaaggtcgtcgagaatgaagcagtccacacggttgcccgtgagcgccccctcgcggccgacagagagcaggccgccccggtgaccgatgatctccacctcatcagccgtacgcaggtactccggaggcctggctccccgcttgatggtcgtttccgggaaaaaggccgcatattcgggcgaatcgatgatacgctgcacgcgccggttgaacttcgaagccaacgaagccgaataggaggcgatggcgatccgcagatcgggattgcgccccaacaggtaggcgggcagcagggtcgaagccccgacgctcttgccatgctggggcggcatggtgacgataagccggcggacgcgcccggcggcgaatgcctccagtacgcggtagtaggcctcgtgaaaccaccggaactccagaaagggatagactccggcggcaaacaggccgaacggaggcaaatcccccgcagaagccggttctgcgggggacaagtccttcaatacatctatattcataggtcagtagtttttaagctccgcccggtggcacggcgctgccgaagggaggcggagggtttcgatacgcacgggtcggccggattccagaatcgccgcatccgacaatcgcagaacagcgttcaacttttcgaacgacaacggaaaaacggaaccgcccgttgcagcgggtatcgaaaaccaagaacaatgtgttcggaaaaagaccgcaggaggcgccgctccggatgggatgtgcgatcttgcggagtcgaatcagaagaggtactccttaagctcggaaaaggagaaatcgttggggcgttcccccgcttggtcggatgtatggaattcccaccagacgggaaccaggtcgtcgattcgatcggcgtcgccttcgggcagacactccttcgaacgatagattacgatcgaggcgacgaaacgacactctttcgaaccgtagtcgaatgaaaacgaaccggaatagaaactcttctccccgatttcatccaacagcttgcgagcgacgataccgtataactccggaataattggataggtcatcgtaaaagaatttagttcaataaaaattttgcataaacaaaataaatcgtttaactttgcaagacaaagataagttcaatttttgaatttaatacaagagaatcaaaatatttaccataaaaaattttgatacgatatgacgggggatcgcttaaaactattgagaaagacaataggtctgacacaagagcagttagctcaacgattaggcatcggaaaggccgccctttcgatgatcgaaacgggcaaggcggcgctctcgtcccggaacaagaacatcctggttcaagaattgaatgtcaatccggactggctcgacagcggagaaggggaaatgttcaatgccgaacccgatctgaccgcctacatgcaccgcacggacaacacgctgccgctgcaaagcgtccccctctactccatagaagggacggcgggcctggtgccgctcttcgccgatcacgcgcagacgcggcccgtcaatttcatccacatccccaacctgcccaagtgcgacggtgccatctatatcgtgggcgactcgatgtacccgctgctcaaaagcggcgacatcgtactttacaaacagctcaaggatatcggcgacatcttctggggcgacatgtacctgctctcgatcgacatcgacggcgaagagtacatcacggtcaaatacatccaaaaatccgagcgggaagggtacgtgaaactcgtcagtcagaacccccatcacgccgacaaagaggtggccgtggaccgcatccgggccctcgccctggtcaaggccagtatccggatgaattcgatccggtagcacgaaatcgcgcgagccgttacgggccgtacccgaaaccggatttcggtgcagcgttccaaatgttccggttgcgatgcccgcagccgggatttcttcctatttataattacaaaaagcacaaaaaaagcaaagttttaaccaaa

SEQ ID NO: 10469 - DNA, 228 bp, Unknown
  gut microbiota DNA sequence
accggcctccggtccgttgcgcagatcgaaagctccgtagtaataatacccgttggctgtccctccccatccgaaattgcaatggatcaaacgtttgtctagagcgtctttcttgcgaaacaggactggagcggcaagaattttagcccgtattgaagttcgaccttatattatgctgttcctgtcggctatttattgcaacgcaggatcgacctccggcgtgcaggt

SEQ ID NO: 10470 - DNA, 1019 bp, Unknown
  gut microbiota DNA sequence
attaagatgtgaaattttgagatataactaaatttaccagattcaacatcgagaataaacttacgcttccgtagttcgtatgttccacaaatttaggaaacattttcggaaaaacgcatagacctaactccttttcggggttgttgcccttatttttgattctatggtgctggcatagccttatttatttggtcattacataaaaacagaccttgcagtcggttgtcagtccgtctgcaaagtctgccgttcgtgtcattcgctccaatcgttgtattcgtcggtcggatagaaatcgggaaagaggtcgtgaaaatggaatgcgaaaaacgccatgtcggtacacatcgtctgacgaaagcatgtgcccattgcaaaatcttcgtcgtaaacattgtagtctacacatccgaacacgatgctttgacgaccgattttcttctcgccctctgtaaagccgatgtaataataggatttttgtcccgtcctgcggttgaatcgtcggttgaaaagaagcgaatccttttcaatcgtgtaggcaagatgattacgctccaatagccgtcgaacggattgcatcgacaactctacattcttgactgtccccattttttgaatgttttgatttatgatatagtcgggacaggatggggaacccgttttgaagcgtaataatctatgtcgtgctacatggttttcttgcctttattttgttgtttctgcaaaagtaaataatcggattcagatttgcaagggaatcagtcgattcccccgcaaattctctgaattacataatccatgtaaatagcctgaccgctggattgtctgccccaccagtagcaaccgtattcctcgatgataacctcgccttgcgctttcagtcgttcggccagccaagaatcaatcagccaccattccatgacatcatccacgaacggataaagatattcttcggaaataaggtttgcccgtatcatttcctcgataaccgtgctttgattcttcaaaacacaattctg

SEQ ID NO: 10471 - DNA, 625 bp, Unknown
  gut microbiota DNA sequence
cgtcgaacatttggatttgcggattatactttttccttttatctccgaaccgtacaccgacaaaacaacatttccgcacatcaaaatttcacacaattaatattctgaaaaacaacacactacaaacatccccctctttacacacaaaaacttttcacccaaattacaacgaatataattttcgatccggccgtcggccgttgcagaaaaactttgttttgtggaactttgcggtggcaataccccagagcgtgttgtgtattaggaaacattcactaactttgcagtgccgtccccgacggatggcgacatattgtttagtgaaagtgtttcgctaatccttgacgataaaatttggcgattttaaggaaacaaggataggcaatacagacactcatcaccgtgtatagctatatcggttctcgatatactattcggtgtggggtattgtttatttgtttccgggccacgccaaatgcctgtcgtcagataaacgaacgactccacacttgaactgcttatacatatatattagggatagtcatttaattccttcaatttgagttaaccagcagactttcccttatttttccgatcatactcatcgttttttatatcatcggct

SEQ ID NO: 10472 - DNA, 3201 bp, Unknown
  gut microbiota DNA sequence
tatcacggcacacccgatcgttcgggatgttactgcgaaccgagaatccgcggctgggaaattcatacgtgaaatgcggattctgatttgacaatgaatcttgattaataaatgacgtataaaaaacgaaccgatgaaacgaaataaaagtattatagaccgctatttcgactatatgcgggatagctggtgcgaagaagaatgccgcacgatcttcggcacacgggctgcgagcgtgtggaaagtgtggtgccgaagtattgcacctgacctgtgcggtggagcccgacgattctatgtcgctctcgataggggcaatcggcggctgttgatcgagcacattgcgtgtgctgttcgaggacaagacgaggaatacctttctaaggagccgagtgtccttgtttgcgaaagatgcggctcgcgtgagatacagatgatggcgtgggtcgatcctaatacgttggagtatgtatcctcgatagacgcagatgctgacgatcaatggtgcgacgcgtgtcaggagcacgtatggttttgctcgctcgaagagttcggagataacctcgatgcctggtggttggcagtggacttcccgaaaatggaacggattacgggattgtctgcggcgaattatccggcggatgacgagggacaagcgttcctcgatgcctgcaacacctggtggaaagccttcgactatgaacgaaaacgggctatctggatggagaacgacgagagtcgggcggaatgacacagcaaagacgcaatagaaccgtgccccgagatcggcataacggatcaagggtaccacggtcttcccccccccgaagaagtgtagcggttggttccaagttttgccgaagggatagtaatcttatggtcaagatcgattctatccggcatttccttcgccactacgcgcttacaatcctaatgatcggtcagaaaataacgtacccttatttgtattgtcattacatatctaagaactctctctattatgtgaattttctacatcataataaagacgcagagccgtgaatatattcacggctctgcgtcttacgtcaattttctgctggaacgaacttgtatttaaatctggttttcgaatttttaaatataaatcttccggtttcccatttatttccttttttccatttaatcttttgtgtttctgttattaatctattcttcttaattataagagtatccctttgaggtggtcgtataaatcccaatattacactatctatagcccgcatcatactatctttagtttcttctgcatataatgtattccctattcgagaccatttacctgtccaatcaattgcacctgcatcaaacttcgaataagaccggtatgttgagtccggattaatagtaatgtaagaacattcataagggcctctaagacctctacatttataactatatttcccgtattttaatatcggagaacaggcatatagcacacagccaatcaccaacaatccaaaaatccttttcatcatttctttttaggtaaataggttttgttattaattctaaatgctatatagtgtttatccgcagcggattgatatgtatattcgttggaaaatggagtgaaaccgtttgccgaatagaccgttatactttgactgggtaggcctttataggagtctctacctttccaatccgatacataatgtccaaacatctcgcctcgttcataagctgtttcttcatccgtaagatcatataaaaaattcgatccctttccaagtgggttggcgcctaattctcctttctcaaattgatatgcatgtttcaattcgtgagcaaacaatcccaaggggctatcagcagggatcaacacatccattgttccggcttcctcgttatacacaaaagctccattcccatcgttgccgtttgatatggtaatcccatatagctggtctgaatcacgtaaagccgcaatttctttcgttacctgatctaatctcgcatttcttgcttctgcttttttaattttacggtctgttcttttactgtttttggctgtccgtccggcttcataccttgcaatttccgcattgtttctccgtctcatgtcgtctatttccttttccaactcttcgatccattcttcgagagcgtcggttgtctccatcccgttgggatcgatcaagcgaattggattacccaagcaataattgtattggccaatcggatagtatttctcggacatcggatcctgctgcaagaacattaccccttcggaatcgtagaaccgtgcaccgaaatcggcataatcgatctcttggaatcgcagatgttgtttttccttaccggagaaggtgtagcgattatccgatgtcggcatgtcgggctgttcccacgccttgccgaagggatagtagtccttgcgatcaaggtcttcgcggcctgtcggcgtcaccttcgccacgacacgtgtactgcccagatgatcggtcaggaaataatgtacctccgaacttgttccgtcattcgttcctatgatcctaccgccgccgaacgaggcgctttcgaatgtcccgttattatataccaaagaacctgcgtaacgtgtgggttcgttgtcgtcgtatccgcacacctcgatcttcgtaccgtcggaaagataggtatagtacaatcccatatccccttcggtataaatcaccgtaggcaagttaagtaaattatagtaaatataaaagcccgtcaaggcatccttatggatgttgccgttggcgtcgtattcgtagtccgagttgcttgtttcgtccttaatgcgctgactaccagaatatgaaaaccgatagttcttcatgtcatccgacgacagactcgatctgttcagcgtaataatattgctgtttttgtcataggtgatgccattttccacaaattcgtctgtaatatcttcagattcattgtaggtcaatcgggaatcgttcaatcgggacagatcgtcgtaatggaaaatgtaggtattgttatccgcatcataatttccgttcacgtttttgtgctgccaccaccattcggagatattgcccgtataataagcatcgccaccgtaatagggctcgggatcgtaataacgcaatttcatctcaaacagttcgctggacttctctgagagccacccctgcatgttgtaatccattgtctcatgaatggcat

SEQ ID NO: 10473 - DNA, 1182 bp, Unknown
  gut microbiota DNA sequence
tcctcgtcatcgttttgaaaacggtagccgatgatatattgtttcaaacggtcgaacgcttctcccaggacacgtgacgcttcaagcgactttttcaacacgtcggtatcccgcgattcgatgcgttcgatactccgcaggacttcactgtttaatttctctataaatacaatcataatccgtcttgttactttcgcgcataaagttagcgaatcgaaaagccgacggattacgatttttatctttctcttcgtttttttatcacgaggccgattttaatgtcagatccggccttcctggcggatggaagtgggattgctccccatattccgcttgcaaaagtccgtaaagtgggattgggcggagaaaccgcacatgtaggctatttcctgcaacgtgtagtgtgtcgtccgcagcaactccccgatacgttcgatacggcgctgacgtaaccacgaggaggccgagcagccgaaaacccgctggaaacgccggcggaaggtaatcgtgctggaatacccgcaaaccccggcgagttccgtgacgttatccgaggcaagataattcgatttgacacgggagatgaactcgtaatcgtcccccaggtgcaacagttcctcgaactccccgacatcggcgggagtgagatgttcataagaggcgtcgagcattttcagcatgacagcagcgttacattcaacgggcatacccaatgtcttacgggcttcacgcaggtaattcttgaaccgcagccgcagcgtgtcgtgatgcgggtaggaacactgggacagaatggtgcagaccgtccgcagttcatcgacacaacagtagccgaaataccacgttacaagacgctcgacataatggacggcatgaaattcctccgaaagcatcagaagaagcaggaacggggtgaaatcctggtattcccccgttatgggacggggtgcttcgtcaagcaaggaggcgatgtcccgcatcagcagagaatctcccgagtacgcttttatttgttcggaactgcgggcataatcccggtaacgcgatatgaccgccgacaaagaattgaacttcacggcgtgaacgccttctataaaggaagggcgaagactgttgtaaatggataagtcggtttgcataagtcatttctataaaacggagccgcatccccttgttgccaaa

SEQ ID NO: 10474 - DNA, 324 bp, Unknown
  gut microbiota DNA sequence
attccctataaaaaacccgttggcagggttaatcttgcgtatgtttaacctgccaacgggtacgatattaataaacgtttggattaaggttggacgtttacgtctttatctgcatcaacccagcctgttgtctctgcatcaaactggatcggattcaacacagcctctccctgatcatcataaccaccaccgaaaatcaacgtgtagatatgacgcttgccctgttcccatgtatctccgaacggaacataaattgttttgtattcgcttgctgaacccaacagataagctccggactgccggattttgcaggcgatctccaga

SEQ ID NO: 10475 - DNA, 203 bp, Unknown
  gut microbiota DNA sequence
tacgacctgccgatctacgagcataaggacggccttagcgtcgttccctcctgcctggatctctcggccgttgaaacggagttaatcaacgaggccggacgggagcttatcttagcccaccttatcaaaggccaaaaggagaaattcgattatatcctgatcgactgtcccccctcgctgtcgctgctcacgcttaacgcact

SEQ ID NO: 10476 - DNA, 29123 bp, Unknown
  gut microbiota DNA sequence
tggaagtacggctacctgtttgccatcgcattgatgattctctgctcgggtttgaccatttggttcttccgtttcaaaaagtggttataaagacagtccgcttcgacttcggcttcgttttcgtcgatcggggtgttttttaccttttcagaaagtcgttcccgaaaccggggagaaataaagtacggatacgacaagacaaatagccgatccactgcggatcggctattttacaattacccgaatttgtgctgccggctattgcaacgcaggatcgacctccggcgtgcaggttatcgaggcggtcttgaccgtgccatccgaagtggtgaactccaccgtaaaagtatgcacttcgcccggattgtcgggaaccgacgtaaaataaagtataaacgagtaaatcgacaaggaggaaagagtgtattcgaccacccgcagatcgtcgggttgcaaagccgacaacggtttgttgtatagaaatagaatttctttcccaagatcggaataagaatgataatcgttctctatgtattcggcatagcttacataccgaactcccattttatcgttcaacggcgatcctgccgggtatttggcgctccaatctttgtcgctggtaacttttatgccggtgaaattgtctgcgaatgcggtcaaatccgaccatggaagcgacttcagattgttgtattccgtatcgtgattgcgctctgcgattcgaagaaaatcgtcggtatgctgcgccccctcctgttccggtgtctgatagtacaccggatcctccagaagtacctgaaatccggacatggaatagagcgtcgatggtttttcagccagcatgccgtataaaacatagctcccgtccacataattttgaacgagatatttcgaatagccggatccatttccaatccactcctccggttcgttgcaaccaaccagactactcaaaaaaatataaatcaataactttttcatttgctcaaattataagtgacggccgaaaaatcatgatcgtaatctctgtcttctattgactgcgggctgacaggtcccctgtctgtatagaacgcattgaatgtatagtatccgtctttttgtcctccccagccgaaattggcatgcacaaattctttcgactctgtgtggtattgagtaggcaaaaaagcatatctggttatcacgcgtctttcacggagcaaccaaccgtccaatacccatgcgtgactattagtactgctcttcccggaataataaaatggaagttttttcacgaaaatcatatcccgaactttgtcggtagttataggcgataaagctatatttgaatagcctaatcctatgtcacccaaatattggagtaacttcactacgtttttcgttggggcgggagaacctccgtcgtcactgtggtatttcacaccaactgcctctcccattttattgatgaaataggctacagcccatgtttgggcattcatggattccccacttacaacaggtttcactaactggggatgtgttaccgcttcttcgatattaagccacatggcttcattcaaaagctgatctcctatttgataaaattttttattataatttaaagcgttgaaaactaaaatttgtgcaactgctaccgggacacatccggcaaaacagtttttgccattttcaattgggcataaataattatatggtttggtttggttccatcgggttttgaggagaatgcctgattgttctttggtttcccaaggttcatagtcaataccgacaggttgttgtccttccggccaccaatgttctatatcggtaatagggcctccgacgatgccgtttccgccaccgccggtatcgacacctccgatcgcggcctgtgcaaccatttgcagggggaataccaactcaccgtccgcttcggcctgttcgggagtaaccgttacggcataccggaactcttcggtcgtgaggcttccttcatcgacgaccgcatagaccggctccaaccggtcgtcggcccccagaatggcatagcccgcctcgttctcgaaattgacgatgtagagcagatcctccacgtcggccgtggcttcgctgcgggtaccgccgggacttaacgcttcgggagaaaccgtcgtcacgtttttcacacgccgtatgccgccgctgcgggtgacagcgccgtcttccgccggagcgtcgatcgcctcgagaaggccttgcaaatcctcaagggcttgttcgacggggacgacgtgcgagattttctgctcggggacggacggaggttgggggacttcctctgtggtcaagtcactggtacagccgacaagcaaccctaaaattgccagtagcgacaaatacttcatgtttttcatatcaaattagggttaaagcgaataaaatgacaaattcagagatgtttttattaaaaaaacaaaaatcgtgcaattatttttgaatattcaaacttttgcaatgtgaaatcgagcgaaaaatcttttgtcggtttggatatatacgacaaaaccgaccgggcaagggcgtcccgctttccgtcgcattttcgcgccgacttttcaccatccttccctcccgccgcaccgaccggcctccggtccgttgcgcagatcgaaagctccgtagtaataatacccgttggctgtccctccccatccgaaattgcaatggatcaaacgtttgtctagagcgtctttcttgcgaaacaggactggagcggcaagaattttagcccgtattgaagttcgaccttatattatgctgttcctgtcggctatttattgcaacgcaggatcgacctccggcgtgcaggttatcgaggcggtcttgacatcgccctcgacggtcgtccagcgaagcgtcagcgtatgctctttttcgagcgtcggggcactggtgaagacgattacaggggattttgtctgtgaactgaaatctgtcaatgaatagtaaaccattttcatgtcggcagcagtcaactccgacggacgcttttcgatggttttgagataatcgtaattttgcagaaattcatacttatattctcccatatcgtaaccgtcgtgtacgaaatcggaggaagagttgatgcgcacctgcaaaacatcgtcgagcgatgtcccggcgggatgtgcttcatcccagtcggcattgcttgtaacgaccattttactgaaattatcggcaaaagtggcgaccataggtaaagcaccgttagctaatacctgattaaaatcaatatcgttgtttcttgcagcccatcggttgaatttttcgatgtctggtccgtaaaaaaaatacattttgggagatggtatgcatatgacaaatcccgcaatctgttttttcgataacctatgtgcatcccccgaacattcgttttgaaattcagtcaacatgatctgcccatcgacatacaattcgacaaaatttttatggaacccacctagtccatccttttccgatttttcgcaggcgacacataatgtaacgatcgacaacagcacgcccaaatatttgattcgtttcataataggagattttaaggtatttccgtataagtaatcattcgcaaatcgtcagtgtaatttccatcttgggtaccttctacattatctatcccactttcctgatcaacaggctttgtcgtcgtgttaaaactaccgctaaaataataaccgttacatagtccattccatccgaaattacaatgaataagcgtttgtggaacctgctcctttgaagagattgatgtagtaccgttacgataataagtttttatataacgcattcgatataaccaaccatctatattccactgatgattaagttttctgccagtactagaatgtcctcttactatagttgttttttttcgatccaacatcatcgtacgtacataactatcacggtaagtgtgatcatttactcccttataaaggacataagtcaaaccatctcgagaatcttttagactcgcagaacttccatccaaaccataatccatattcaggacaacgccgattgcgtatattaacatagacacagctttggcttcaggagtaagagtggacggttttccttctgtggctataagaagattaggattctgaatcgcacgtctgatcaatgtccaatcgatcggagttcctttgatcgacccgactacagaaccataatgccaataatttgatactaaaacctgtgccacagcaatagccgaacatcctgcccaacaacattttccattgatttgtgtgacacttgcattaaaaggatacccttgtccccatttcaccgggatcagcggtccgactttttcttgagtgacataaacatattctcgtcttaaaacatcgccgcctaaatcccccgtgtgacgtccgtcgtcgctcataggtgcgactcctccatcagcatctgtatcggcgttttcgattccgatgatcgcagcctgtgcaaccaattgcagcgggaaaacgaattttccgtcggcttgtgcctgttcatcggttatggttacggcataccggaactcttcggtcgtgaggcttccttcatcgacgaccgcatagaccggctccaaccggtcgtcggcccccagaatggcatagccggcctcgttctcgaaattgacgatgtagagcagatcctccacgtcggccgtagcttcgctgcgggtgccgtcgggattcaacacttcgggagaaaccgtcgtcacgtttttcacacgccgtatgccgccgctgcgggtgacagcgccatcttccgcgggaatatcgatctcttcgaggacggattgcaactcttcgagagcctgttcgacagggaccgcatgcggcttttcagcagtcggagggttttcaccgaaaggccccggctccgtgcccggatcggccgtacaactagctaatagccagcaaccgaagaacagtgaaaaaagtctgaaatgtttcataacggattaatttcagggttttcggtcgaaccctgttccgggagttgctgaaaattcccggaacaggaccggaagaagttttcctcctgatccgaaattaaacatttctttgttgattaccaaataaaatacaattttatttgcaatcaaataaaacaaaccgcattcgggcttcgtcgcgcacgtcgcggtgaaagatgcccttgacagtcgccgccgtatattcccggccccgttatttcgcgccgacttttcaccatccttccctcccgccgcaccgaccggccgcgacatgaccgcgatgcacactgttgcgaccattttttatgaattataaatagttttacgtacttttgtacgttatatagacatctatgaaatttacgctccaacataaagacccctcttcgcaggcgcgggcgggcgaattgcagaccgatcacggcgtggtgaagaccccgatctttatgcccgtaggtacggcggcgaccgtcaagggcatttttcaccgcgacgtgcgcgacgaagcccgggcccagatcatcctggccaacacctatcacctttatctgcgtcccggtatggatattctcgagcgggcgggcggcgtgcaccgcttctcgacctgggacgggccgatgctcaccgacagcggcggctttcaggtcttctcgctagcgggctgccgcaagctcaaggaggaaggatgccatttccagtcccacatcgacggttcgcgccatctgttcacgcccgaaagcgtgatcgacacggagcgtacgatcggcgccgatatcatgatggccttcgacgagtgtccgccgggcgactcgccgcgtgattatgccgccaagtcgctcgccctgaccgagcgctggctcgaccgctgtttcaaccgttaccgccagacctcgcccaaatacggccattaccaggcgctgttccccatcgtacagggctgtacctatcccgacttgcgggcgcgggcggccgaaaatgtcaaacagtacgacgcggacggctatgccatcggcggtcttgccgtaggcgagccgaccgacgtgatgtacgagatgatcgaggtggtgaatgccatcctgcccgaagaccgcccccgctacctgatgggggtcggcacgccgatcaacatcctcgaaggcatcgcccggggtgtcgatatgttcgactgcgtgatgcccacgcgcaacggacgcaacggacagattttcacttcggaaggcacgatcaatatccgcaacaagaaatgggaggacgacttctccccgatcgatcccgaaggcaccgccttcgtcgatcacgtctatacgaaagcctacctgcatcatctgacgatctgccaggagatgctcggtgcgcagatcgcttcgctgcacaacatcgcattctacctgcggctggtcaccgaggcccgccgacacatcggggccggggatttcacaccctggaaggagcagatggtcgccaaactcggccgcaggctgtaacactcgaaccacgatgaaacgaaagctcccgcatttccgcttccccggattcaagatcctcgaccggtatatcctcggcaagttcttgagcacctacttcttcgctatcgcgatgatcatcgtggtcgtggtgatcttcgactacgtggagaagatcgacaactttacggaaacgaaagcgccgctcaaggcgatcattttcgactattacctgaatttcatcccgttcttcatcaaccagttcagcggactgttcaccttcatcgccgtcattttcttcacctcgaaaatggcctatcagaccgagatcgtggctatgctttcgggcggcatgagtttccggcggctgatgtggccctatttcctgggggcgctcatcatcgcttcgctctctctggggttgaacctctggttgattccggtgtcgcagcgcagctgcgtggctttcgagaaccaatacatcccgcgcaaggcgcgtttccaatacgataaaaatatctaccgtcagatcgaacccggtacgttcgcctatatccgcaactactccaaggaatcgaaccaggcttcgttcttcagcctggaagagtacgaatcgggagcgatgaccgcatcgctcgaagccgcagaggtgaggttcaatcccgaaaccaagcggtggtcggcccgacgatataccacccgcacgttcgattcgctcggtgtggaaactttcacgcaacaccgcaatctggacacactcattaatctggatgtcaatgaattgggacgcactgaccagttgataaaaacaatgaatatagtggaactgaaccagttcctcgaacagcagcgaagcaagggttccgactcgatcaacatcattcaggtcgaacaacacgcccgttacgcctatcctgtcggtacgttcattctgacactcatcggtgtttcgctctcctcgcgcaaggtgcggggcggcacgggactccacatcggcatcggcattgccctttgcttctcgtatatcctcttcatccgcttcttcgaggagtttgccaagagcggtacgctgccgccctggatcgctgtctggataccgaacatactttacctctgtatcgctgtttatctttatcgcaaagcaccgaaataatgtccccgcaactcgaagatatcgtccgcaaggtccgctccgacgagcggatcgcccctgccgaagccctcgtgctctggcacgaagctccgctttggctgttgggcgagctggccgcccggagcaaggagcgcgtgagcggcgacaaggtctatttcaaccgcaatttccacatcgaacccacgaacctgtgcgtgttcaactgtaatttttgttcctaccgccgtccgaagggaagtcccgaggcgtgggattactccctggaagaggtcgaacggatcgcccgcgaccacgccggacagggcgtaaccgaagtgcatatcgtcggaggcgtgcatcccgagcacgatttgtactattacgtcgagatgatccgccgcgtgaaggcgatcctgcccgaagcgaccgtcaaggccttcactgccatcgagctctcctacatgatccgcaaagcggggctgactatcgacgaagggttgcgtctgctccgcagcgccgggatggaggcgataccgggcgggggtgccgaaattttcgacgaggagctgcgtgcccgcatctgtcccgataagggctcgactgcggagtggttcgaggtgcatgccgccgcacaccggctggggatcccgaccaacgctacgatcctctacggccatatcgagtgcgtcgaacaccgcatcgaccacctcgatcggctgcgcagccagcaggatctgacgggcggcttcaacgccttcatcccgctcaaataccgcaatttcggcaaccgcatgtcggaaatcggcgaggtttccgtgaccgaggacctgcggatgctggccatgagccgtatctacctggataatattccccacatcaaggcttactgggtgatgtacggcaaagcgactacggagctggctctggctttcggtgcggacgacatcgacggcacgatcgacgatacgaccaaaatctactcgatggccggagccgacgaccagcgcccggcgatgaccacggaggagatgcgccgcatcgtcgcggcagccggctaccgggccgtcgaacgcgacaccttttaccgcgagatcggataacgagataccctgaaacagacgaaacggatcggtacgtaccaccgccaggcagttccgatccccgaacataaacgacagaacaataccatgctggaacaactgaaaaaatattgggcgaaagtcagtgagcatcctttcctgaaacaccttttcatcatcgtctgcgtgctgctcgtgctgggcgtcacaactcacctgctgctgttgctgggcacgcgccacagtgcgcaccgtacggtccccgacctgacaggcattccgctcgaggaggctctcggggaggcccgccgtcaggggttggaaatcatcgtcaacgactcgctgtatgtgcctgcctacgacgggggtgtagtactggaccaactcccggaaaagggcgtcggggtcaaacccggacgaacggtctatgtcacgatcaactcctaccggcagaagatggtgacggtgccctatgtcgccggccgttcgctgcgccaggccaagaacatgctcgaagtggccggcctggggatcgaacagatcgtctatcgtcccgacctggcgaccaattacgtgctcgaagagtacgccgacggcaagcggatctcggagaaaagccgcgtacagctcgaagcgggcagcggcgtcaccctttacgtcggggagagcggttccgtttcgacactcgtgccgaagaccgtggggcttcacctccaacaggccaaaagccgtttgtgggagctggggctcaacatcggcaagatctccttcgacgagggaatcaacctgctgaaccagcgggaagcccgggtttatctgcagacgccttcggccggcagccgtgcccggctgggtgcgaaggtcgatctgaagctgaccctcgatgctgccaaagtcaccgcccagagcgctgcggccgataaggagatgataaaagccgccgaagagctgcgccgcctcgacgctgaaacggccgattcgctggcccgtgttcgtctggacagtctggccaaccgtcccgtcgaagcggagccggtcatcgacgacgggcttttcccggacgaagagacagcggaagacgaatttttccaataacgcacacgtccgatgagcgaatcgcaatacatacccgatccggacgaactcgaggacgacgctgccggcgagcaggacgagctgtacgaacattacagcatcacggccgaccgggggcaaagcccgctgcggttggacaagttcctgacgatccacatggagcgttgttcgcgcaaccgcatccagacggctgccgacgcaggcaatatcctggtcaatggcaaacccgcgaagtcgagctacaaggtcaaacccggcgaccgtatctcgctggtgatgccctatcccaagcgcgaaatcgagatcattcccgaaaacatcccgctcgaaattccctacgaggacgacgacctgctgctggtcaacaagcctgcgggcatggtcgtccatcccggtcacggcaactactccgcaacgctcgtgaacgcccttacatactatttgcagaatctgcccctgttccaggagggcgatatgcgggccggactggtgcaccgcatcgacaagaacacctcggggctgctggtgatcgccaaaaacgagcgggcgcacgctcggctcgccaaacagttcttcgaccatacgatcacgcggcggtatgtggcgctggtgtggggaaatttcgaggaggacgaaggcaccattaccggcaacatcggccgcagccccaaagaccggcagaagatgtgggtcttcgaagacggctcggacggcaagcacgccgtgacccactaccgggtgctgaagcgctacggttacgtaaccctcattgaatgtcgcctcgaaacgggccgcacacaccagatccgcgtccacatgcagtggaagggacaccccctgttcggcgacgaacggtacggcggcgaccgtatcctcaaaggtacgaccttcaacaaatacaaacagtttatcgaaaattgtttcgccgcgatgccccggcaggcactccatgccaaaagcctcggcttccagcatcctactacgggcgaacaggtctatttcgaaagcgaactgccggaagatttccgtaccgtgttggctaagtgggacgcctatgccgctgcggggcttgcggaagaataaaaatcgagattgaaatgtttctgcccactaccctcaaggaagtccgcgcacgcggctgggatcaactcgacgtgatcctcttcacgggcgatgcctacatcgaccacccgtcgttcggcgcggccgtcgtgggccgtctgctcgaagccgaagggtatcgtgtggcgattgtgccccagcccaactggcgggacgacctgcgggatttcaccaagctcggcactccgcgcctcttcttcggcgtgacggccggggcgatggattcgatggtgaaccactataccgccaacatccggttgcgcagcaacgatgcctacacgcccggcgggaaagcaggattccgccccgactatgcggtcaaaacctatacgcagattctcaagcggctctttccgcgtacgccggtggtcatcggcggtatcgaggcttcattgcgccgcctgacccactacgactactggagcgattcgctccatccctcgatcctcgccgacagcggggccgaccttttgatctacggcatgggcgagcgggtgattcaacaggtggcgcgggcgatgaacaacggattcaacgccaagttgttgcgaaatatccgacaggtgggattcatggccgaccgcagctatgtggagcggctcgatcccacccgaacgatccgcctgcactcctacgaggagtgcgtggccgacaagcgggcctttgggaagaacttcacccgcatcgaaaccttgagcaacctgatggaaccggacgaaacgctcgtcgaaggtgtcggcgaccgctatgcggtcatcacgccgcccaacgcgacgcttacgaccgaggagctggatcattcgttcgatctgccgtacgagcgggcgccgcacccccgctaccggggtcgtggcgacattccggcctgggagatgatcaagcactcggtcaatatccatcggggttgtttcggcggctgctccttctgcaccatatcggcccaccagggcaagttcatcacttcgcgcagcgaaaaatccatccttcgcgaagtagagcgggtgacccgcatgcccgatttccggggttacctttcggacatcggagcgccttcggccaacatgtaccgcatgggcggccgcgaccgggagctgtgcagcaaatgccgccgtccgtcgtgcctgcatccgaagatgtgccccaacctcgataacgaccatcgtccgttgctcgatctctatgccaaagtgcgggcggtcaagggggtcaagaaggcttttatcggcagcggtatccgctacgacctgttcgacggcagcgattacctcgatacggtcatccgtcatcatacgtcgggccgcctcaaagtggcgccggaacataccgaggatgccgtgctgaaactgatgcgcaagccgccgttcgtgatgttcgaacggctcaacgccgatttcaaccggatctgccgccgcgaagggctgccgtaccagctgattccctatttcatctcctcgcacccgggatgcacggagcgcgacatgcgctcgctggcggacaaggtgttgggcaaactccacttcgacctggagcaggtgcaggatctgacccctacaccgatgaccttttcgtcggtgatgttctacacgggcgaaaacccctatacgggcgaaaaggtctatgtcgcccgctcgcaggaggagaaacgcaggcagaaaagctacttcttccgccgcaaacgatagcccggcaacgaaatcggcactcccaaaagagtgccgattgctgtacctttcggattccccgatcctaattcagatagggtttcagtacgccgaacaacaggtaggccacgatcagcgtgactacgatgttgaacatctgggccgtcatgaaagcccagaacgtgcggcggttttccttcgagaaaatatcccggaaacgggtttcgaggccgatgcagacgaacgcgatgttgaagagcgtattgctgaacatcttggccgaagtgcgggccggcgcggcttcgttgccggcgaagaagaggctgaagaggagcgataccgcgacgaaacccaccacgaatttcgggaagcgctcccagatcacccgcacgctggggcgctgacgtttcttctgtcccttgtaagaccaatacagcgaaatgacgaacgccgcgatacccagcaggacgttctgcgacgacttgacgatgatggccgtctgttcggccgtttcacccagcagagcacccgacgctacgaccgcacccgtcgtatcgatcgttccgcccatccaggcgcctgcgacttcctgcacggtttcggggttcgccaccacagtcggcagcagcagaccggccagccagggcatcacgtacatcatcggcacggcgcagaccagcaccagcgaaatgatgtaggagagtttcttgttgtcgccccggattacgccgcaggtggcgatggcggccgaaacgccgcagatgctgaccgagctggcgagcatcgtcgaggtttcctcgtccacacgcatccgccgggccagccagaaggcgaagtaccacaccgtaaagacgacgatgaaagcctggatcagcgcgtaaacgcccgattggagcacttcgccgaagaggatcgtcgcacccaggcagacgataccgatcttgatgtaaaactcgctctggatcgccggtttcaaccactcgggcacccggaaaaagttactgatgaccaggccgaagatcaccgaaaagaaaaccgcctcgaagcccagtcgtttaattgcggggatcgaagccacggcttgcgacagcagagccacgccgaaaatggcgagcagcgaaacggcgaaacgacgcagcggacggcccaatatccgctgacagacacccgtcaaaaccagcaggaagaggaacatcgctccggcgctcatccaatttccggcggaggagaggtctttgggcatcgcaggcatccagcggggaaacagcagggcgagcaggagaatcgctgcgccggccccgacgatcacccagtcttcgcttttaagttgtcgaatcaaacttttcttcataaactacacattaacaagtgtgcaaagaagcgatttttttgccggaatccgttacgcataaatacccaaatttgcggatgcgggagttggaaacgaaaatttcccggagcagattcgctccgggaaacggaatgtcggtttgaaaatcggtacggtcgtcctcgatgaccagccgcacaacgcaagatcggggtcgttaccgtggtacgggaaacgagagggtccgggcgtcgagatgcccgtccagatagggactccagttctgggcctggccgttggaaatcgagaaccagccgctgcgcactttatagggaacgatatctatgcggcgcaacgcgtatttggtccggatctccatgagcgaactcatcgaaatcaccggcgtcatggtggtcgaagggctgaaatagtccgccggatagagggagggtgctttgagctacatcgaatccggaagcatcttcgacagataatactcctcgatccgttcggccgctttccggtccggagttttgatttcgggcggattctgacttgcagccgtccatacggtgcctgcgaaaagcaggctgtagaaaattcgtttcataacattgaactgttttctttcgtttttcagtacccggcaaaacttccggttcgcctttgcttccgcacccggtacaccggagaagcgctctgcgtcgtcgcctgccggaaaagtccgttgtcctctgatgtcggtttcccggtcagaacacctcttgcagaatacggaccgactgcacggcgtggatcgcgtccaggtggtaaccgtagtaggccagcaaagcctccagaaaagcgctccgctgtgtacggttgagtcctatttcggccaggcaacgtacgtcgcactccacgaagtcgttcattagacgagcgttctccggggtcattaccgtcgcatgcggcggcttttgcacggtgtacgatccttcgcaggcatcgaaccaggcgccgggcatatattcgtttcccggataaaatcccaggaaacggctcagattcaccagaaaccagaggtggaaattggccacgccctcttccatactgtccagcgccccgatactctcccacacgaaatcgaacaactggctgtcaggctcgctctccttgacaagacggtacaaaacctctgccatgaacagggcgatcgtcgagcgcctcacgtcgaaaggcattcgttgcaggacgattccgctctgcacctcccgaaaacggtgcatctgctgccgcgaagaggtcagcccttcgaattcgagggcgaacatcggctggaacaacgccagtttcgaaccccgtccccgactgctgcggacaccctgcaccatgtaactctgacgccccaacgcgtcggtcagcaggtgcacgaccatcgcgctgtcgccgtacttgagcgaattgagcacgattccccgcgccttgtatgtcttgagcgttcccggcacctcacgctttctttacgtgcaccatcgcccagccgtcgcgcctacgcacttcgaccggctccagcccgcaggcccgagcccgagcctcgatgaccggtacatcctcctccaggaatccgctcatcagcagatcgccgcccgtatcgagcgcctcggcataggccggcatgtccatcgtgaggatattgcggttgatgttggccgcgatgaaatcgtacttccggcccgcgatgcggcttacatcgcccagcatcggagcgatccgctccgccagtccgttcgccgccgcgttttcgcggcagttggcctcggcccactcgtcgatatcgacggcatcgaccgtcgcggcaccccgtttggcggccacgatggccagtacgcccgtaccgcagcccatgtcgagtccgcgttttcctgtcagcgaaagatcgcagagcgccgacgcgaccaggcaggtcgttgcgtggtgtcccgagccgaaagccatgcggggcatgacgaccacttccagttcgtatccgggttgcgatgcgtggaacggcgcccggatcaggatgcgtccatcgacatcgaccggcgtgaaattctgttcccacaaggcgttccagttctgggactcgatggcgatataacgccggtcggcgatgccgtagcgggccagcaggtcgtcggtttgctgcatgcagtccgccagccgctcgcgggggatgtaggctttcagcacctcgccctccgtctggaagctctcatagggcagctcggctaattcggccgtcagaatttcggccaactcgggatccgtgacccggacgttcaactccacataatccatatcggtatatcgtttttcggtcgaaagaaccggcaaaaagtctttcgaaataatattatgtaaaatttttttgtatcttcgcctctgagaagacaattgggccgggcgcagtgccgaatttatgcggactttgccggggcgaagtttatcttctgcaaagataatgataggcaagcggcaagccaaacttaactttctgtttccctcctccttgcaggcagagttcacaagtgtcctctgcgtatgcttcgggcgtcggtcgttcgagcttgtccgagctgcgtcttatctttgaaagccgagaagaaaacgggagcttgctcgcagttttccgaggcgtatcctatcttctacaaagataaataaaaatggcagaaactctcaaaaaatgggaagaaatcagccgtagttaccgcgtttatatcaaactggaaaaacggctctcggagaataccgtcgaatcctacatgcgcgatctgcgtcagttcgcccacttcatcctccggttctacgacgtgccgccccgcaaggtcgaagctccgatgatcgagcgctacctggccctcttgtacgatcaaggacgggagaaaacctcgcaggcacgggcgttgagcggtatccgcagcttttacaattacctgatgctgaccgacgtgatcgattctaccccgacccagttcatcgatacgcccaaattcggccgtcaccttccggatattcttacggtcgaagagatcgatcgcatcgttgccgccgtagatacctctacggtcaagggacggcgggacagcgcgatgctcgaagtcctctattcgtgcgggctgcgcgtttcggagctcacctcgctgcggttgggcgaccttttcttcggagaagggtatatccgcgtgacgggcaagggcgacaaacagcgcctcgtaccggtcagcggggcggctcgtgaaaagattcagcgttacctcgacgatcgggcgactaaaacgtccgcatcggacgtcgtgttcctcaacaaccgggggacgcagcttacccgtgtgatggtcttcacgatcctgcgcgaagccgttcaccgggccggaatcgacaagcacatcagtccccacaccttccgtcattcgttcgctacgcatctgctcgaagggggcgcttcgatccgtcaggtgcaggagatgctggggcacgagagcatcctgaccaccgaaatctacacccatctcgagggcgatcacctgcgcgatacggtcgaaaagtacctgccgctgtaatcgacgggaacagtaacgataagggacggaggaattccgtcccttatcgttattgtcttttttcgggagtcgctccttttcccggtctgattcggagcgtttgccgacggaaatagaggcctgcattcgcccgatcagagaatccgtgcgatgcacgatgcgggcgtgagcgtcatcgagtcgtaatccagtccggacagcaccgccagccctggccgtttgcccgcagcgacctcgcccagctcggaaaaacccagtgcacgcgctccgttcggtgcggcccaggtcaggagttccgcaagaggtatcttcccgagatgctgcatctcgccgagcagcgaaagcgccgtattggacgccagcgaatcggttccgaggcagatattcagcccgttgcggcgcaacaattccaccgggggaaccagccgcgaaatgtaacgattcgagccgggacacaggcaccaccagaccggagccgtgaaatgattcattatcaaatcgatatcttgctgattcacgcagcagttgtgaatcagaataacgctccggtcggccggaacgctctccacgatccgccttgccggagagccgtaatgcaggaaatcgcacgtaaaacccgcctttcggtaccactcccacaactcgccgcgctgttcgaagagttcggcttcagccggcgtttccatgaaatggatcgaaagtggttcgtcgccctccgcgcagatctcccggaaaagggcatcctgcacggagtagatcgagtgaggggtcagcgaagtttcgggatagcggagcagacgccgctgttcgtccgtcgagtcggtatgcagcccgaagacttcggcgaaagtacggtacgacaggcggctgcgggcttttacggcaaaggccgaatctccgttggctacatcgcctacggcctgcatcccctccgcccacatccgggcgtcggccgcagcgatggccgcagcccgctcctgttcgctgaactgtccccgcacccggcccatcgaccgggcgaaagcggcgaagccgccgtcctgggcaatagcgccccgcaggtaggagagttccaggtggcaatggacattgataagtcccggaaccaagactcccgcgtaaaattcgacaccgggtctgccgtccggcgcggcgcacgtttcgacggattcgatgcgtccgtcggcccgaaccgtcaccagcgggtgtttaacgagatgcctccccgtgaagaggtagttggaggctatccggcgaaaagacggagaagaattcatcggcgaagattttaagacccaactggtcgatgtagaggctgtccacggcctctgcggtttcgggcgtataggatactttcaggtcgtatatcgtcacgtcgggacgcctgaacttttcgcgggtcccgtacagggagagtacgagcgaacgggccgaactgtccgcctggagtatccgggaaacacgctcccggctcgacttccgcaggatcgaggaggattcgcccttgcgggaactgtcggcctccaccagccatacccgcatacggggcgcgaggttctcatcgagcgagtcgatcaggtagtcgaacgacacacggtattcgccgggacgtgtgtcgggaatccgaacccgaagccgtgcggtgtccttgatccgggtgacccggatcagcgagtcggaatagaccgtgcgggtgaaacggcgacgggccacgttgtcgatcgtatcgagtacgccgacttcgtacttgtagtaggcgctctcctcttcgagcagccggatggattgttcgaccacgtcgctcagcttggcgcttttgcgccgtgagaagttgccgatagtatagcggacatcttcggccgtgtaaccgtaacggctgaaaaccggttcgtaaagttcgagcgagtcgagcttcactccccggtccgaaacgtaggcgttgatgaggtaggcatcccggaaaatccgggccagctcctcgtcggggatcaccttgtcccgggcgcaggaaccgagggcggttgccgccgcgatcagacaaaacagacggatcaatcgtttcatatcatagtttgttgtttttcatcacactccgcacggtcagctccgaaatcgccagaattaccgccccgaaagccgccgcaacgatcagcaaatcgctccagcgcatctctacgggatagctgtataacaacaacgtatcgaccgggatgcgaatcattccgaaatgttgctgtgccaggcagaagcctacgcccagcacggctcctatcgacgcccccagaccgccgatcaggagtccttcgccgacgaagatcgaacgaatgagcttcgtatcggcgcccagggcacgcagcgtggccacatcgtcccgtttctcgatcatcagcatcacgagggtcccgactaccgagaacgaggcgagcaccaggaccagcagcgaaatgaagaaaacgccccatttctcgtaggcaaccagtcggaagaagagggcgttcatctcgtcgcgggtgcgcaccgtgaaatcgtcgccgacgattccggcgatttcacgccggaccttttccgcgtccgcaccgtcggctacgcgcaccgagatcgccgatatgcgtcccggacgatcgaaaagttcctgggctgcacgcagggaggtaagtgcgtattcattctcgctttccaaatcgagaaagaagagtcctccgacgtcgagccgccgcaccgaatatccatcgacgggaagcaacgacgagaaactgccgcgccgcagggcatagacggcgacttcggcacggaccaaagaccggattccgagcgtgcgggccatgtcgcgtcccagcaccagtcggtcgagatcgcccgtgcgaacgctccaactgcccagcgggatcgtttcctcgatcgggaacacttctgtataacggtcgtccacgcctcgcaacgtggccatcgtctgcaaaccgtcccgttcgagcaaaacctgctgttcgagcaggtacgaaacgaccccgacccctttcacgcgggtcagcgccagactgtcgatttccgcagatgcgaaggtctgcccttcacggggggcaacggtcagatcggcatcgaaggccgaagacatggacttggcgaaatctccgaaaccgttcagcacggacagcagcacgatcatcgccgcaacgggcatggcgaacgaaagaacgctcacacccgcaataacgttgatcaccgaacgggatttcggtgaaaatagatagcggcgggcaaagaatcgggtgagcatcggccttcggcggatcgcaggttactcctcgcggtgcatcgcccggtcgatctgctcgatgtactccagcgaatcgtccaggaagaactggatttcggggaccgtcttgagctggttccgaatccgctgacccaatgcccggcgcaggaaccaattgtgctgctccagcgtggccatgacagcggcattctgttcgaagggaaagacgctgacgtagatcttggcgtatgaaaaatcgggcgaaacccgcacggcggttaccgtcacgagcactccccgtacgatttcggccccctccttctggaagatttcggccatgtcgcgctgaatctgtttggcgatcttttgctggcgtgtagtttccatatttcggttattttgtgactcctttgtaattgaaaacctccttgttcttgtcccgcttgggcggacggttgttccactccgtgaaaccggacttgttgaaacggtagctgacgccgatgctgaaggtcaggttatcgagcggggatcgctggggggtagtatagaatggattttcgtagccgtccgtcgtatttcccgcatacttgttgtgattgcgcagcaggtccgaatagccgaagtagtaacgcacccgaacgctgaactccagttgcttcaccagtacggcgacaccgccgccgcccgccagaccgtacccccaccggttgtcgcggaccactttgaaatcatattctccccgccaaggacctttggactgctccggagataccgtcgaaccttgttcgttgatgaatgtcgaggagatgttgtaggagaaaaagaccgccgcatcgagatagacgcgcatccggtttttgaacaggtagatgtgcggctgccagacgatcggcagcatcagcgacttgacgcggcgcgtgtaccattggtatttggccgggtcctcttcggtcggattctgaagaaacgagaatccccgttgcagatattcgaaatcgatgccgaaaccgcctacgaaacgctggggtccgtaatagcgccacgttacgcccgccgtgtagcatccccagaccgcccgggtttcctggtcgggataaaaccgggcattgccgtagccgtaaccgcccgttacgcccagcgtatgctgtgccgccgctgtgccgccgcacagcaccgctccgaggaacaggcatatcattcctaaacgcctcatcatctcaatccgttcatcatcgtgttcataccgctgttgaatcctccgcccatggtgctcgtcgtgttcgaggtattgctgttggtgttccgcctgggattcttggcccgctcttccagcaccttttgcaagcgcagggcttcgcgtttttcgagcagctcggcgagggattgcatcgttaccggcgcgaataccttgttcatatcgatagtaagctccacttcccagttctccttcgccgcgaaggtatcgatgtttttatcgtccatatagtattcggcccgctcgggctgccgccgttccaccagattgcccgtgtcccagcgaccgttatcgttcatgtcctcgatgatgcggaacttcacgttgccggccggtacgtaattgaaacggcatactccgctgtgcacgccggttttttcctgaaggagttttcccgattcgttcagcaactgcacgatgtagctcgcctcgtcgcttttaccgaccacattgacgatgaacgtagcgaatttctcgggatcgacacccgtgtaattgactgcgatcgaatcgttttgctgctccgccacatctgccaacgctcctttggggatggtcagggcataattgtttttcaattgccagggaacatccagccaccagcgccgcatgttggccgtatcctgctgccatcggatccggatcggacgcggttcctccttctccatctgttctgtcagcacgacggcagccgagtcgaaccggaccagcgggtagtcgaattcgacgtacagcttggtttcgggggtaacggaaccggtcgtggaaaacttgtaggtaaacgtactcggcttctccggttcgacccactcttcgccggcagccagtgtcttctctttctccttttcgagctgctcgcgctctttagcctcctctttcgattcgatataccgccaggccagtttcaacttctcggtcgagggaagcagccggtcgagggagtcgtgcttcatgtaggtaatttctccccggatggtatcgggcagactggccgaaggaacgtcgaaccacaacgcgatcgtatcgcggttgcgtgattgaggctcaatgattacgcggtcggcagggatgctgtcgaacacgatgctgtcgatccggggatggcccgcattgaaatagaggagcgccttgtgctgcaccggacgttccgattcgcgcaggtattgccgaccgaaagcctcgtcggtaaacattcggaagtaaagctgcgggtcggccgtcacgtagcggcggatcgagtcgtaccagatgccgaagtcgggcagctcagcggggttgtacgttcccgtgagaaagcctacctgatcgaccgaaggttcgtaaatctggttgttgttcttatcttcgaaggcatagacccggtagggaatcggcttgaggttctgggcgatgaaaataccgttggtttccgcacgggcgatcaccgcaggctggtatttgaacatcgtcgagtcgtattcgggaacatcctccaccgaatcggccggaaagaagcaaatgaaacttttggctacgctgtcggccgtgtagctgtcggccgtatatcccgaaacgaccatcgaatccacctccgggccggtcgagaagacgtaacgcatcgagtagagcggattgccctcgttgttgtcgcgcacggcactgccgaaattcagcgcgtaggtcgtgttctccttgagcgtatccttgatctggatcaggatgccccggccccggatcgaaagctggggtttcttcttcatctggggcgacgtgaaaaactctttttgctggtccttgagctgcacgaattcgtcgaaagtgacgtaaatcttcctggcggtgaagttggtcgtgaagttgtccggcaacatcgacacgatcaccgggggaagggtgtcgatcgggccgccttcgaggttcatgacggtcgcgcagcgccacaggaacgccgggcagaacatcgcaaggacgcagacccgaagccagacgatcgctttatggttttgtcgtttcatatcgtttttctgttatcgaaacaaggacgagcgggcgccggaaactgccggttcgtcgggagtgtccggattcggattatcgggcacatccgggttttccggggtgtcgggattttcgggcgtatcgggatcgtccggagctggtgtgtccggggtatccgggtcgtcaggcgtaccgggatcgtcgggattcgggtcttccgttcccggattgttcggattgtccgggttatcgggcgtgtcgggattttcaggatcaggatccggttccggctcgggttccgtataaaagtcgttgcacatgatccacttgcccttcaggaaacgtttgcctttttctttcgggtaaaaggttacgctcacgtgcatctgcggaagattctccccgatggcctgctcggtgaatccgtaaagccgattcgactggtccacggccaggatgagaaaccgggggccgttgagctgcatcgccagccagttttcgttgccgtcgatctcgtacggctcgccctgggcgatcggccgcagcttctcgccggttctccgggaggtgattattccggccacggcgtcctcgtaagagagcacgctccattcggttgtgtccgcgtcgaaggcataggccagcatatcttcccgggggatgggggtcttgacggtaccttcctgcgcccaaggccggagcacgtagaatgtttcgtaaccgatcgacttgaaacatcccgtccccgccagggctgcggccaccgcgacgaaagtcagtatcttgaacttatgctttttcatgggtttcattccgatttttcagctcttcgagcagctctccgaccgttttccccaacaccggatggcggtagtcgcgcatccattcgcacagggggacgagcacgaattcgcgctcctggatcaacggatggggaacggtcagccgctcggtgcgaatcacgcggtcgtcgtagaagagtatgtcgatgtcgatcgggcgcgacgtatatcgggcaccggtcctttgtttgagcgactgttctgcctcgcggtcgcgccccagttcccgctcgatcgcctgtaaagcgtcgagcaactgttcgggcgtcaggtcggtatccacctcgaggacctggttggaaaactcctcttcggcatcgaaaccccatgctcggctcttgtaacggtgcgaacagcgcatgacgggtccggcgtgctggttgatcagccgctgtgcgttttgcaggcgggtctttacgtcgcccacgtttcctccggtcagtatgatcgctcttgccataattacaattttttaatcatcttactcacgctcaatgcgaaatgggtgaacacgatggtcgggttcccgttttgccggatctgggccatcgccgattcggcctccgcgaccagcgattcgatgttctggtttccgatgaacggagcgaaattgcggcagaacttcgcctcctcaccccacaggcaggagatttcgcccagtcccgcatgcagcaggtagctctcccgcaaaagacgcaccgcatcggtcaggaaagcccgctgctgctcccgcgaaagttgggccacctcttcggcccaggccatcagttcgaggtgcttgtcgttgtagctcaaccgcatgagcgaacagaaaaattcgaaatcgtctttgcggagttcgttcccttcgccgcgcagcagatgctccagttcgatcaggtcgcccgcagccagccgggtaaaggtacgaattttctccggatcgcgctcccctcggcgttcgagctccgcacgaacctcttcatcggtcagccggggtacgaccacctcctgcgttcgtgacagaatcgtgggcagcaacaagtcgggacgctcgctcaccagcacgaagagcgtcttttcccacggctcttcgagaattttcagaatcttgttggccgcctcctcgttcatcgtttccggaagccatacgatcacgcacttgtactcggcggcaaagctcttgaacgagagcttgcggatgataccgtcggcttcgcgggccgaaatcgcccctttgagtgtccggcccaggtcgaggcggtcgtaccactcctgcggcgagaaataaccgtttcgctcgctgacgacctgccgccagagcggcatgaagtcgtcgctcaaaaccgcttctcccgattttttaccctgtttattgaccgggaagacgaagtgcaggtcggggtgcgccagaccggcgatctgccggcagttgggacattcgccgcacgaatcaccgtcgcggcggttcgtacagttgaggtactgtacataagccaatgccagcggaagagccccggctccgggacgtcccgtgaagagctgggcgtggctcacccgtccggcatcgaccccgcgcaccagatgacgtttcagctcccgctgaccgatgacctccgaaaaccgcattttactccctgttccgctgcatccgccggagccgctgccggaccgcgatgcatagcatcgccaccagaaccagtcccagcgtcagcgtgcgatcgcggccgggttcccacgaaagggccatgactccggtcatgagcagcgtgccgctgagcagcaatataatcaatttttcactcatctttcgttgctatttgtgcccccggtgcattgcggaacggaccagtgcccgaaggtcgatcttctcccgccgcacggcatagtaaaagtagagcagcaacaaggccgcgtagcaagcatatctgggtacagccggagcgacatggtcatccacgacgacactcacgccgtatagaaccagcgccaacgccacatatcccaaaatccgtccggtctggtaaggcatgggataaaaacggcggttgagccaaaaacttaccgcaaccatcgccgcttcgctgactaaacgagcccaggctgctccgtagtatccccagcggggaataaatgagaggctgcatccgatcgtaaatatcaggcccacaaaggtaaccacgatagccagcgaggttcgctcctcccgtttgtaccagaacgacagattgagccatacgccgttgaggacgttcgcacccaacaccaccggtaaaatgccgattccttcgcggaaatccttgccgacgatgagtccgaaaagatcccggaaaaaagcgattcccaggaatatgaacatcgacaccagcacgtagtatttaagtgctgcggcattcatctgcaaaaagtccgattttttataatcggccaggaagaagggttcggcggccaaccggtacatctgcacgaaaagcatgagcaccataccgattttgacgatcgctccgtaaatacccacttcgcccatcgcaccttccggtacgaggtacttgatcatctgggggtatatgaattcgttggccgtgcctgcgatgccgctgaccatcagcggcagtgaatagacgagcacccgccgcagcaacttgccgtcgatacggggcagagtgcggttcgtcgtggtgagaattgccaatagggtgagcaggctggcgatcaggttgcccacgaagacccagcctacgccgaacgatgtttcgtaaaagccggcaagaccgaaggccactgccaaaactaccgtaattacgacgctgaaggccttgaacccgacataggtcagggcccgtccctgttcccgcaggcgtgcaaagggaatcgccgtgcaaacgtcgaggaaaatgatcgccgcgacccatactacgaagtcggggtttgcggcgtaatccgctcccatccactcggaaaccgtcgtgcggaagagggttaccagcccgaaaaaaagcagggccgccagggaagtgatgccccatgtggtagcgaacaatcgccgtttggcggccgtcacgtcgccgcccgcttcgtcggctttggctgcaaaacggaagtatcccgactccattcccatcgtcaggatcacgagagcgaatggaatcagggcatatacgtccacggtgatcccgtaaatgcccgggtcgaacacccgggtgaaatagggtgtcagcaggtagttcaggaatcgtacgacgatcgtactgatgccgtatatggcggtctgttttgcgagtttttcgagcataagtccttatggaggacaaatgtacgaaatttatttcgctttcggtctcccggtccgggcaaatatccggtccgggcgtgccgctgtccgtcgctgcccggatcggagaggacgcggaacgggcggaacggaatttcaggtatggcggacctgtcttccggactttccgaaaaacgatggttttacaagatgcggctcgggctggctcgaccgaccgacgatcggagcggatgcagaaggctctcgtggatttcgccgcgcaaggaggagaaatgctgatcaagtttggcttgtcactcacttttccccatctttgacatagtcttagataggatgcgcctcggaaaactgggcccaagtttccatttttctctcggctttccctatctttgcagaagataggattcggtttggcaatcttttgggtgcaagtccgcacgattgccctcacatttcactatctttatcaggaaacattcacttaaaaattttaggaaatggctacgattcaaactttgtatctgggcgatctgcggaccgaaatcacgcacgtccagtccggtaaccgggttatcactgacgctccgaccgacaacaacggcaaaggcgaatacatctctccgacggacatggttgctgcagctctgggaagttgtatgctgaccctgatggggatagccgctcgtcggctcgaaatcgacctgaagggaacgcgtgtggagatccagaaagtcatggccgccgaaccgcgccgcatcgccgagatccggctcgatttctacctgccgggcgattacagcgacaaagacaagaaaatcctgcaaggcgcggccgaaacctgtcccgtcggcaaatcgctccatcccgacatccggcaggcggtcacctggcattacggcagtgcgaaataacggggccgggaagatacggcggcgactgtcaagggcatcttccaccgcgacgtgcgcgacgaagcccgaatgcggtttgttttatttgattgcaaataaaattgtattttatttggtaatcaacaaagaaatgtttaatt

SEQ ID NO: 10477 - DNA, 58889 bp, Unknown
  gut microbiota DNA sequence
ccctgttccgggaattttcagaactctcggaacagggttcgaccgaaaaccctgaaattaatccgttatgaaacatttcggacttttttcgctatttttcgggttctgactgtggctggctgtacggccgatccgggcgcggagccggggcctttcggtgaaaaccctccgactgctgaaaatccgcatgcagtccctgtcgaacaggctctcgaagagttgcaatccgtcctcgaagagatcgatactcccgcggaagatggcgctgtcacccgcagcgaagccacggccgacgtggaggatctgctctacatcgtcaatttcgagaacgaggcgggctatgccattctgggggccgacgaccggttggagccggtctatgcggttgtcgatgaaggaagcctcacgaccgaagatttccggtatgccgtaacggttactcccgagcaggccgaagcggacggtgaattggtattccccctgcaaatggttgcacaggccgcgatcattggaatcgaaaatgccgatatagatgctgatggaggagtcgcacctatgagcgacgacgggcgtcacacgggggatttaggaggcaatgttttaagagaggaatacactccgttcgttgttcaagaaaggataggaccgctgattccggtaaaatgggggcagggggcaccgtataatgtttgttgtcctttggtccatggacaatctcctgttgctggttgcggagccattgctgccgcacaagtaatggtatcgaattattggaattatggatacgctccgaaatcaataggaaaaactgcgatcgattggactttgataagacgaaccatattgagtccaaaacttgtatcttcaggaataaatggaatgccaagtcctgaaggttacgcagtggctatgctaatcgctgctgtgggaatagatattgacactgaatatggcttggaagagagcatggcatatgcttatgatttacaaggttttttaatccgtatgccctccaaaaatgtcacttacgaaacatataagaacagttgtgtgcgaaatatgttacatgaccaacaaaaagcaaccattatgaggggagttcatatagagaatggcgaaaaaaaggcacatttttggaatttggatggatggctctatcgtacaagatacataaaaacatattaccgtaatggtactgtttctcaaagaggacctttcggacaaactcttgtccattgcaatttcgggtgggaaggagttgcagacggatattattacgatggaatattcgatttgagcaaaggtccggttatgccggaagattcggatgccggtactccagcttctagatattacaaagatttaagtatatttacttatacgttagtattatgaatattggaaaaataatctgcctgttattgataatcccgttgtgctgcggatgtaacgaacacgaaacatcttctgccccttcatttcgacaatgctttatcgaagtttattacagcggaggtttagaattaccaatgctccaaaccgggtattttggaacacaacctaccgttccgccacaaaatttacaaacaggatttgtcataactccgaattactcacacaataacatgtgtgattcgttctccgatccggaagagtttctgcgattagcaacacgcaacgatgatacgtcattcaatcaatgggttccggaccatctctgtcttcgcacccctgcttttgctaataatttccgagagctgcatgttgtgagtaatgccgattgggacgaagagcatcctgccggtagtctgctggatgatattctacttgtgcgactttattcctatgccaattttattcacgaaggatatcccgggaaaaacgacaatacgtttctatccaaaaggaagtatttgtctgtaattaaaaagttaatgtcggagctgacgcctgcggatatggaaatgatttactgttgtgaagtcaacgatttttccactgatacattatatcccgtgattgttttcaccagcgccccgacgctcgaaaaagagcatacattgacacttcgctggacgaccgtcgagggcgatgtcaagactgcctcggtcacctgcacgccggaggtcgatcctgcgttgcaataaatagccgacaggaacagcataatataaggtcgaacttcaatacgggctaaaattcttgccgctccagtcctgtttcgcaagaaagacgctctagacaaacgtttgatccattgcaatttcggatggggagggacagccaacgggtattattactacggagctttcgatctgcgcaacggaccggaggccggttatgacggtgaggacacgagttcgtccagcgacaagtattacgatatggaattgatagtcacttacaccaattgtccttaaaaaacgtatgattatgacacgaaaaaacttgatattattgttgttctcactcctgacactgaactcctgcaacaaacatgaaggtccggagttgaggttttgcgagaactacatccaaaactattgtcagggggatttggtattgctgtcccgaagtccggaccgccccccgcaaatcccggcagacccgcaaacccccatacgcaatttttggatagaattgaccgattgcgagtggatttcccccgaaagcgaccctcaggagttcgaacgcctggcgattcgcaacggggacgtcggttataaccgctggctcgagttttgggagtacccctctgcttttgccgataattttcagacaatgcatattaccagcaatgccgactgggatgaagagcatccggcggggacattgctggacgatatcctgtgggccgaattttggtcctacgccgattatatccgtagcggatacgaaacagggggcggcaacaatgtacagatgctcgtcgaggatttgaaagccgacgatatgcagatgatacgtgactatgtgattatctatttcacaaagaccccgaccattgatcccattcacacgctcactgtcgaatggaccaccgtcgagggggaggtcaagaccgcctcgctcacttgccggccgcaggtcaatgcgaaagaataacctgcgtgcagtcacgtacgatttaacaagatagaagagccatgaaaaagagtttattgctattgttgctgccgtttttatgcggatgttcggaaaaggaagagccgatcggaggacctgtcatcggacctacttatttgatagcccgttacgtggaaggagatatgaagctggactatattccccggaccgctgcgacggacggcaaatcgaatacgctttacatagactgggccgacaccgaagagtattataatccggatatggagaaatacaatcttggccggcaagagttctggactcccgaaaacaaggcgaaatatctcgaaatcgcaaaaagaaacggggatgaaatcggtgcgtacgagggcggcacgcctcccggtctgtatttcggcgatcagattgcccttgccgataatttcacttcgatgcatatcacgagcgatgccgactgggatgaggagcatccggccggcaaaccgctcgacgacctgttccgggtatcggtgcggagttggaaacagagggatgaatacggggccccgcttctttgccgcgagaggatggatcggatcgggccggaacatttgcagatgatccctttcaatccgaagaatccgtgggacggccggaagaatttgcggccgatcgaaatcgaaccgcttgccgagcctgcgtcggagcaacatcaccgattgacgctcacgatgaccaccaccgacggacgtacaaaatcgacttcgatcgactatccgccgaaaacgggactatagccgaccttatactgtagcccgatcaatcggaccggcgggaacaggtaacttcaggtaatattaattgctgccgggggttgtctgtatggggaaattatctccgaggaaacttgactgtacctgtcgccgggaacagcggcgcaacgtccgttgcaagcaaaatttcgggacatgaaacagaataatctgatgtcaagtcgtattcagagcacgaaggaaaaggagaacggaaacgatcctcatacaggaatcgtttccgttctttattacatccgccggtcgctatttcttcccggtttcggcgatgatcttccgaagggcggcggtaaactcttcggccggcatggatcctgttatcttgcccagcaggtcgccctcggtattgaatacgaggtaggtcgggatcgaccgtatgccgtgtttgcctgccagggctttcccggtcggtttgtcgatgtcgtacttggccgcgacgaaatattcgtccataaagtcgcccacctcctttttcgagaagacgtcgcgctccatcgccttgcaggggccgcaccaggtggcgtataaatcgatgaaaaccaatttgtcttgagcgatggcctctttgcggaccgcatcggtcgaagagtccaggaaccgtacctgcgcgtcggctgcggcgctgatgcccagcacgagtaaaagggtaaaaagaatttttttcattttcgtattttattaagaataacgaaacgggtgctgctaaaattgtgccgcctcgttctgcgccgtactcaacaggccgcaggccgcttggatatcttcgccgcgagaggtgcggatggtcgtgtgtatgcctttggcggtcagagcatcacggaacgcgatcatggcccggtcgtcgggggagaaatagggcgatccgggaattttatggaaacggatcaggttgatccggcacttgatgccgtccagcaggcggcatagctcgcggatgtgacgcggagagtcgttcaggccgctcatgacgatgtattcgaacgatacccgccgctggtgcgtgaaatcgtatcggcgcaggatttccacgacttcgcggatcggccatgccttctctacgggcatgatttcggcccgttcgtgcggaaaggggttgtgcaggctcacggccaaatgcacctgggtcgcctccagaaatcgttcgagtcgggaggctacaccggcggtcgaaaccgtgattcgtgtgggcgaccagccgaatccccacgccgaagtgaggacttcgagcgccggcagcagactgtccaggttgtcgagcggttcgcccatgcccatgaaaacgacgttggtgagccgttcccgttcgggcagcgacccgatctggttgaggatttcgttcgtcgaaagggagtgctggagcccctgtcgtccggttgcgcagaaacggcagcccatacggcagcccgcctgcgacgagatgcagagcgtcgcccggtcaccgtcggggatgtaggccgattcgatgaaatggttctgcgaggtacgatagaggtattttttcgtgccgtcggtcgaaatgctgactttttcgggagcggtgagtccgacttcgtacgtttcggcgagcagggcccgatgacgggcggatagatcgctcatcgcctcgatcgtcgtcgcgtgcttgtcgtaaagccagcgtgcgatctgtttcgccgcgaaacggggcatctccaaccggttgcagagagcttccaattggggcagggtttgtccgtaaagatattcgtgtcggggcatggaaagcggtcgtgagggagttttcgggaacaaaattagtcaaaaataaagatttttcagaccgaaagcgctgtttttgattttttatccctatatttgtcggtagttagtgtgccttcgggtcacttgaaaggataacaataaacaggaacaataatggaaattaagaaatcaccgaaagccgacctggagaacaaacggggtcttttccttgaaatcggtttggtcgtggcgttggtacttgttattggtgcattcgccgtgactccgaaggaacatcgtatcgagaaagtcgatcttggctatgctcccgtcgaagtggaaattgtcgaggttacccgcgaggaccagaagccgcccgaagctcccaagaaagtcgatatggccgtcgtgagcgacatgctggaagtcgtaaccaacgataccaagatcgaaacggagatcgattttgcggagtttgatatgaaccaggcgatcgaagtggctcccgtccagaccgaggaggttttcgaagaggagattttcatcgtcgtggaggagaaagcgtctttcatgggcggcgacgaaggtactttccgcaactgggtgcagcagcgtgtgaaataccccgcgatcgctcaggaaaacggtatccaggggaaggtaatcatctcgttcgtggtgaatacggacggttccgtatccaatatcgaggtgttgagaacccccgacagtaccttgtcggacgaggcggtacgtattatcaaatcttctccgaaatggaccgccgccaagcagcgtaacaagtcggttcgtcagaagttcgtcattccgatcgatttccgtatttcggattaaggtttgtttgaaacatttgataagggtatcctgcgtgaagccgggatacccttattttcaccgtgcaggaagatgtgtctttccgaaggcgcatagtcgtgcagaaatcgtatggcagattggaacagaataagaataaagagattgtaacgaagaacgatcaacccgcttccggggccgggttcgaacgggccgtactggtcgcggtcatccgggatcaacaggatccgcgtcaggcggaagagtacctcgccgaattggaatttttggctgaaacggccggtatcgtaggtgtccgtcgttttacgcagcgccttccacagccgtcggcccgtatttatgtcggtccggggaaattggaggagatcgctgcctattgcaaggaagaggagatcgacgtggcgattttcgacgacgaactctctccgtcgcagacgcgtaacatcgaggcggccatgccctgccggattctcgaccgcacgcgtctgattctcgatattttcatgtcgcgggcacagacggcctatgccaagacccaggtgcagttggccaattaccagtatatgctcccgcgtctgtcgggtatgtggacgcacctggagcggcagcggggcggtacgggaacgcgcggcggtgccggcgagcgcgagatcgaaaccgaccgtcgaatcatccgcaaccggatcagcaaactcaaggaggatctgcaaaagatcgaccgtcagatggctgtccagcgatcgaaccggggttcgatggtgcgtgtggcgctggtgggttataccaacgtcggcaaatcgaccctgatgaacctgatttcgaaaagcgaggtgttcgccgaaaacaaactcttcgccacgctcgatacgacggtgcgaaaggtggttttcgacaacctgcctttcctgctgtcggataccgtgggtttcatccgcaaattgccgaccgaactgatcgagtcgttcaaatcgaccctcgacgaggtgcgtgaagccgacctgttgctgcacgtggtcgatatttcgcatccgcagttcgaggaccagatcgccgtggtgaagcagacgttacaggatatcggtgccggggataaaccggtttatctggttttcaacaaggtggacgcttatacttatgtggagaaggagcctgacgacctgacgccttccacgcgtgaaaatcgttcgctcgaagacctgaaacagagctggatcgcccgggccaatacgccctgcatctttatttcggcggtcgagaagatcaatatcgagaagctgcgttcggatctgtacggcatggtccgtgaaatccattcgggccgctatccattcaacaacttcctctattgacctgaaacaaaagttaaataaatacaaccttatgttgcacattctcaacagtcagaacaccgttctcaacaagtttgtcgccgaaatccgcgacaagtcgattcagaaggattcgatgcgtttccgccgtaatctggagcgtatcggagaggtcgtggcctatgaaatatcgaaaacgttcgagtatgcggtgaaagtggtcgaaactccgctgggcgaggcttcggtagcgatgatctccgaccaggtcgtgatcgctacgatcctccgggcgggacttcccttccatcagggattcctgaactacttcgacgacgcgcagaacgctttcgtttcggcttatcgcaagagtaccaaggacggcaagtttaccgtcaaggtcgaatacatctcgtgtggcgagctggagggcaagactttgctgctggttgatcccatgctggctaccggttcttccctcgtgctggcctacaatgcgctgtgcgaacggggcgggcagcccgcgcatacccatgtcgcggcggttatcgccagcgaacagggggtcgaatatgtggagaagaatatgcccaagcgcacgaccacgatctggtgtgctgcggtggacgaggaattgacttcgcgggcttatatcgtgccgggtatcggcgatgcgggcgatctggcttatggtgagaagatctgacgtgcgacgcctgttgtttctgggggccgttttctgtacgacagtaggttggatgctgttgcagaagccggctttcctgcttttctaccatgcccgggcagcagaggcctctttcggggagtggctcggagttctttggcatggactctcactcgattgcacggtggcgggttacgtcaccgcttttctggtacttgtcgtgctggcatcgttctggattcccctttcgcagcgggtgtggcggatcgttctgacggtctatttttcgctgatcgcactggtgacggccgcgatcttcgccgtcgatctcaacctgtacggctattggggctttcggctcgacggttcggtgctgatctacctttccgatcctggggaggcgcttgcgagtgccagttggggcgaagttctgcggcagattttaatcatgctggtctatgccggggcgatgatctggagttaccggtggattttacggcttttccgggtcgaacccgttcccctgcggggccggattgtcccgacggttgcgacgctgctgatcggcggcttgacttttctggcgatccggggtggcgtgacggtcgccacggcgaatgtcagcaaggtctatttcagctcgaacatgttcctgaaccacgctgcgacgaaccccgttttttcgtttctctcttcggtcggggacaatgagaactatgccgaggcttatccgttcttcgaagaggagcggcggaagactcttttcgaagagttgcggggcaaccgtcccggggccgatgccggtacgccccgactgctgcgcagcgaccggccgaacgtcgtactgatcctgctggagagcttcggccgaacgatcatggacgaaacggtgaacggcgagcctgtgatgcccaacatgcagcgtttcaagcgggagggtgtctggttcgaaaacttcttcgccaattcgttccgtaccgaccggggacaggtggccgtcctgtgcggatttccggcccaaacgaccatgtcgatcatgaagctgccgcgaaaaagcgccacgctgccttcgctggcccgttctctcggccgggaaggttatcgttcggtattcatgtacggcggcgacctgaacttcaccaaccaggcttcgttcatgtattcgaccggctgggaggagctgatctggcagaaggatatgcagctcgatgccccgacttcgaaatggggctatgccgacgacgtggtggtcgatcttttcggggacgaggtggaagcgctgggcagagcggaacaaccgtttctggcgggtctgctgaccctttcgagccatgagccgttcgaggtgccgttcgcaaaattcgatgacaagctgttgaatgccatggccttctccgatgcacagatcggacgtctgatcgaccggctgcgggagtcgcccgtgtgggacaatttattagtggtgctggtcgccgatcacggctacccctatccgtacgatctggcctacaacgctccgctgcgacaccggattccgatgatttggctcggaggcgcacttgcgaccgcctcccgaacagtagatacgtatgcctcgcaaatcgacatttgcgctacgcttctggcgcagatgggccttccgcacgacgaattcgattacagcaagaatattttcggagcgactccgccccataagttcggttactactgtttcagcgacgggttcggcgtgatcgacgccgacggcgaaacggtctatgacaatacgggcgaaacggtgctttctcaaaccggcccgcagtccgaaaggttggagtggggcaaggcgatgttgcagaccacttacgaagatatcgggcggcgctgatccgaagggatcggtacggaaaaggtcatcgcgggaacgatgaccttttttcgtgggtggaaacaggcttatttatcgcttttgggcattagggagcgggcttccagaaatgcgtaaaaagcctccttgtagccgtctgaaacggggatgtacgttttgccgaagacgatccggccccgctcgatgattcggattttggagggttggacgatgtaggagcggtgtacccggacgaaacgttcggcgggtagttgttcttccaacgtcttgaggcttatgagcgacagcacggggcggggttcgtcttcgacgtaaatctttacgtagtccttgagtccttcgatgtagaggattttatctaattcgatctgccgaagccggtattcggtcttgacgaagatgcttccgggcccagcttctgcaggcgatggtttgccgacgctgcggcgcttgagttcgaaccattcgaaggctttgttggcggccgtcaggaagtcggcatagctgatcggcttgagcaggtagtccaccgcacccacgcggaatccttcgacggcgtatcggtcgaaagccgtcgtgaagacgacccgggtccgggtcgggagcatccgcgagagctccatgccgctgagttccggcatctggatatcgcagaaaagcaggtccaccggttcggttttcagggcctcgagtgccgtgatgcctccgttgtaagctcccttcaattccagaaagggggttttccgcacgtagctttcgagcagttcgaccgccagcggctcgtcgtcgataatggcgcaggtcagtttcatcggtcggtcaggttaatgcggagcagggtttcgtacgtgtcgccgtgttgtccgtatttcatttcgtaacgcccgggatagatcatttcgagccgccggcaaaggttcgcaagcccgatgcccgagccgctgcggtcggcctccgatttggggaagaagctgttctcgatccggcaggcgagtactccttcctcttcccggatgtcgatgtcgatgaacgaagggcggtcgttgcttacgccgtgcttgaaagcgttttcgaccagcgagatgaagagcagcggcgccacgagggtatgcgacggattttcgggcagcgaaacatcgagccgcacatggcgcggcaggcggatgcgcatcagctcgatgtaattgcccaggaagtccatttcggccttgagaggtaccgtcggccggctgctgtcgtagagtacgtaccgcagcaggcggctcaggtcgtgcaccgtttgctgggcccggtcgggatcgagctggatgagcgaatagatgttgttgagcgtgttgaataggaaatgggggttgagctggctcttgaggttttgcagctccgcttcggagcggctgcgctccaagtccttgcggatgttttcggcccggtaccactgtcccgtcatccggatggcgacgctcactccgactaccagcaggtagagcatggcattgcgcaggaagaagaacatcgtatcctgccacggacgctccatcggcggatggtgggggcgcggcggtattccgaagcggaagaaaaggtgtacgagtagcatgactccggccacgagcagcgcattagcgagcaggaatcgccccacatgccgcgtgaaaaggtagcggtcgatcagcaggaggtagttcacgtaaaatactgccatgaaggagaggggaaccaccagaaaccgcacgtattcctgcatgttcataacgggttcgcggccgcccggtacgaagaggggaaggccgaaaaccacgctccaggccgccaggtggagccagaagcccgtatgtctggattgcagggatgtcatcctgttgcaaatataggaattatccgggtatttcatgcttctttttctgtatggcgacggctgtttcggattcggccggttttccgaaaaaatagggtcggtatcttatcctgaaaagcggttattcgtagcgcagtgcgtcgatggggttgagcatcgcggctttctgggccgggtaccatccgaagaagatgcctgtaagggtgcagacggcgaacgaaaggaaaacgctccagggctggatatagatcgggaatgccgcgaagatattgacgagtacggcggcgcccacgccgacgaggatgccgatcacgccgcccgtgacgctgatcaggatcgattcgatcaggaactgcgccagaatatcgcgccctttggctccgatactcatgcgcaggccgatttcccgggtgcgttcggtcaccgagacatacatgatgttcatgatgccgatgccgcccacgagcagcgaaatgcccgccacggccgccagcagcagggtcatcatgtcggtcgtcgaagtgagcatcgacgaaagctcctgctgggagcggatcgtgaagtcgtcttcgtcggtcgccttgagcttgtggttggtccgcaggatttgcgtgatctcctcgatggcctggtcggtatattcttcgctcaatgccgagcaggtgatcgattgcaggtgggtgatggcgaggattcgcttctgaactgtggtgtagggggccagaatcaggtcgtcctggtccatacccatactgttataacccttgctctcgagtacgccgacgatgcgtagcggaatctttccgaaacggatcactttgcccacaggactttctccgtccggaaaaagctcgtccacgaccgatttgcccaccagacataccttggcggcggtcttgacgtcctgttccgagaagatgtccccgtcctcgactttgtagcgccgaatgtccaggtattcggggctgataccgtaaacggtcgtcggcgtgttgttggcaccgaagatggcctgcccggaactgttgaccgaaggcgaaatgtagctgatatagcgcgcctgcgcctgaatgtcttccaagtccttgagcttgagcgactccatgtccgccgcgtcgagccgcacaccgccccgccggtcgccgccgggatggatcatgatcatgttcgatcccatttcgctgatctgggcctgaatgctccgtttggatccctgtccgatcgccagcatcgtgattaccgaccccacgccgatgatgatgcccagcatggtgaggaatccgcgcagtttgttgttgctgagtgctttgaaggctattttgaaaagattcgtgaggttcatggtctgctcgtgtttccgtgctcgggttcggatggatggtttgttttagtcgtcggttgcgggcagtttcgccagagcttcggcagcgctcaggatctcttcgttgcggacgtcgcttatgatgtgtccgtcgcgcagggttacgttgcggctgctgtaacgggcgatttcggggttgtgcgttacgaagatgatcgtgcggccctgggcgtggagctgctggaagagcaccagcacttcgaagctggtgcgggtgtcgaggttgcccgtcgcttcgtccgcgaggatgacggcggggtcgttgaccagtgcccgcgcgatcgccacgcgttgcatctggccgcccgacatctggttgctcttatgcagcatgcggtcgcccagaccgacgttgcgaagcgcctgttcggctcgttcccgtcgctgcgcggccgagtaggtcgagttgtacatgagcggcagttcgacgttctccagcgccgtagttttggccagcagattgtagttctggaagacgaaaccgatcttgcggttgcgcagtgtggcacgggcgttcttgtccatcgagcgcacggcgattccgtccaggtagtattcgcccgaggtaggcgtgtcgaggcagccgagcgtgttcagcagcgtcgattttcccgatcccgaggtgcccatgatcgtcacgaactctccttcggtgatcgtcagcgaaattccgcgcagtgcgtgcaccacctcgtcgccgacgacgaaatcccgtcgtatgttgtccaatcggatgacctctttcatcgtcgttcgctattttttcttgtcgttgcttcccggaggtcccggcatgaaggggctgcgctcgatggcggcagtctcctcgcggggcttggccgttaccagtccggtaacgatctcctcgctgcccgtgagcccttcggtgatttcggtcatgtcgccgctggcagcgcctgcatatacccggcgggggcggagcgtcgttccctccttcacccacagttccctgcttcccggagccgcctgactgtccgtttcgactgcggtcaatccgatctctcccaacagttccgcattgggaacgaagcgcagggctttggtcgggacggctgttgcgtcgtctttttcgagcgtgaagatcgtcacgttggccgtaagtcccggtttgagtttcaggtcgggattcggagcgtcgatgaccacttcgtaggtgaccacgttcgattcggtcgtggcttcgagccgtacctggaggaccgtcccctcgaacgtgtcgtccggataggcatctacggagaactgtacccgctggccgtcggcgacctggccgatgtcggcttcgtccacatcggccacgacctgcatctgtgtcaagtcgttggcgatggtgaagagcgtcggggtttcgaatccggcagccaccgtctggccctcttcgacggcacggctgatgaccacgccgtcgatcggcgaggtgatggtcgcataacccaggttgcgctttaccttgaccattgccgcctggctctgctcgtaggcgttgcgggccgtttcgtagaggtaaaaagcctggtcgtactctgcatcgctcaccagttgtttttcatgcagggtcttggtgcgggcgtagttcttggtctggtattcgtattcggttttgctgctggcgagttgtgcctgagccgattcgagttcggcctgtagggtcaccttgtccatttcggcgatcagttgtccggctttcacctggtcgttgtagtcggcatagagcttgtcgatgatgcccgatacctgcgtgccgacctcgacctgcgtaaccggctcgaccgttccggtcgccgtcaccgagttgcggatggtgatatggcttatgggggcggtttcgagcaggactttcggccctttcgaggggcgtgcgatcagccagatgcagacgcctgcggctactacgcccgccgctatgagcagattccgttttttcatatcttcgattatcgatttatccggtgcggccccgcttggcggaacccgcttgtgcggattagtaaatgtcgctcgcaggaagcccctgatagatgttgagcagttcgatactcagcagggtgagatatttggcttgcaggacctgttgctgtgctgccgaatattcgttttgggccgtgatcagctcgacggtgtttttcactccgacgcggaactgttcgctggtcagctcgtaactctcccgggcgtatttctccttttcgcgggccgagagatactgggcctgggccgatacggcgtccaggtaggccgattccacgttccgtaacagctctttttgcagcgatgtccactccagatagctgtcgttgagggcgattttcgccttattgacggccgtgcggttcttacggttcgagaaaatcgggatgttgagcgtgagccctacgttttcgttgaagcggttccatatctggctgccgctttcgaagtcgttgttcgacatatgtcccgttcccacgctggcggatagggatatggaagggaagaatccggcacgtgcgcttttttcttccagcttcgccgcctcgatgcccaactctcccctacggatctgaggcatgactttcagagccgtttcatacacttcgtttttgggcggcaaagccttcagcacgttctcttctttaacccccggcacggccggattcatctcttccataatatctaattcaagcagttgcttgagttgcagtttatagttgtccagtgtcgagccggctacgactatctggtattcgtcgctcgaatattggctttggagctgggcgaaatccacgcggctgatcgagcccgtgcgcagcatctcttcggcccggtcgcgctgggccttcgaggcttcggccgtgctgcggttgattcgcacggcgtcggcggcgtaaaggcactgcatgtaagcctgtacgatggcgatgcggatgtcgttcacggattcctcgaccgagagagcatccatttgattctggactttctgcctcttgacttccgtacggagcttgccaccttcgaagatcgtcattcccgccgttatgccgtaggtccccgtataactgttgttgtccgtgacttcggacgaagggtagttcgtgtaactttgcgtggtcgatgccaccagcgacggaaagagggcggctttcgcctgtttggtatcctcgatgcccgaaagttggttgttgcggctttgccgtacctggatgttgttctggtaagcgtagtccagacactcctgcaaggtccatgttttggacgcttcctgtgcggttgcattccgtagccccgacagaagaagggagcaaagcagtatcggcaggagtcgtttcatggttttggttttgacgcaaaactaacgacggctttccgtgcgtgcaattgaaatagacgaagaggggaattttatcgacgaacggccggtttcgggaaataaccggaataacgaaccctgcgatccgctcggatttcgggatgcagggtcggatacgaaaaagtccgccgacctttattagggtacggggtcgtatccgctgccgccccagggatgacagcgcgagagtcttttgagcgtaagccacgttcctttcaggggaccgtacttgcgcagcgcttcgagcgcgtattgggaacaggtcggcgtgtagcggcacgaagcgggagtgaagggcgatatgcagcgttgatagaactttaccagcacgatcagcggcagcgtgcagacccgcctaaagcctcgccataatttgttccatgattttctgtacggcatgttctatgacccggtagggggtgagctctttggatgaatagatcagggcgagatccagtgcgacgggatttccctcccggtcgaagatctctttgttgagccggtaagcctccttcatacgacgacgctgcagattgcgcttgttggcccgtttctgaaacttcttgggaaccgaaaagagtacttcgaccgaaggaatttcgtccgcttcggcgatccagacgtagcgcagcggatagacgaatccgctctccccgctttcgaacaggcggcggatggccccgaacgaacgaagcctttcctgacggggaagcgaacggtctgtcatagctgaaacaggtaactgtatgcggttttaatgccgttttcggtcggtgtcggcgaaatcgcgacggaaatagcgtcgtccgcttcttgtttgccggatggaatccttcggaatcgcactttgaaccggtgatggtcgcacggagccgttccgttatttcttctccgccggagtcgtgcgccgggtacggcttttcttggctaacttatgctgttgggttcggatgaactcctctttgtcggcgtcgtgcgtgacggcgacatcttcgatctgttcgcctttcgccagtttcgtgaggtaaatatcgacggctttggccatcgaagggaccgtaggggtcggagccatggctttgaccttgatgccgacatcgaccgcagcacgcagcgtgccttcgccgaaagtggcgactgcgggcagctcctcggcggggaagcgttcgagaatggccttgacgtccgatggcgaatagagggccagcagatcgaatttcttgatgtccaaatcgttcaggtcggcggcgactgtgcgggccagaatcaccggagagaactgtaatttcaacttggcgagcgtttccggcagttcgggtttatggggttcgctcaatgccagcatgaatttttcttccttgtgctttattatcagctcgatgaagttggtgaaactgccgtcggcgaaagaaattttgcgtttgcgatatacgatgtatttttgcaggtagagcgctacggcttccgtctggcagatgtatttcatggtttcgggaaccgtaatccgggcctcttcgcaaatgtggaaaaaactatcgactgtcgtgcgcgaagtgaagatgacggccgtatgagccagtatttcaacacgctggcttcggaattccttgagcgatacccctactacgcggatgaacggcatatattcgatttcagccttgtgtttctgggataattcgtagaaaggagatttttcgaccacggccggacggggctgtgaaaccaatactctatgggctttcaaattcagaacggttttatcgggttatcaaattcttgtcagcgagagccacacgaagctcacgggaaaaatttcgacggcacaaaggtacaaaaaccaatgcaaaatcgaaatttttttcgagagaaagagcatgagcgactctttcaggtagagcaacagcagtgctccgccgaggatgaggatgccgaaagagaggatatgcccggtgtcgggcgaagccagcaggaagagtaggatcaacgggcacagaaagacgacagaaagtgctaaatagttgaattttagcgctacaagctgatctgtgatcggtcgggagagggtgacgtaacccgtgatccggagcagtcctacctggaaaagcaggagaacggccaggccgaccgtagcgagcagtcccagtaccgggatccaggcttcggggacgacctcggggatggggaaccaacggtccgtcagtctcaaggtcagtagagccagcatgggaagtcctattccgatggccgcccacaggaaccgggtgtaggtgctgccctgcgtgtcggtcatgcgtcccggcttcgaccggtcgagactcaatttccgacagaggatataaacttcccgcaggttatggtagatgatgaccagataagcgaaaaccagggccagtacgatcccttggaaaggggccgattcgtatatgggacggacggattgcgtcggaaacggttcgatcgcgagtgtcgaaccggctccgaacagctcttcggccgtgacggggggtgtcgcctgcagggtgtcggggggaatcgtcgccagcgaatcccgcagccggaagatggattcccgaagggccgtttcggttgtcggcaggctgtcggacagttgccctgccagcgaatccgtgcgtatttcgggttgcagggccatcagtcgaagtagcgtttaagggtaatgcggatatcggtgcctttgcccagttcggagtaaacgacgccgatccggccctggtgatactcttcgatcacgcggcgggaaagggagagtccgaggccccatccccgggttttggtcgtgaagcccggttcgaagatccgtttccagttgcttttggggattcctttgcccgtatctttgatgttgatcatcacgtgtttgtcgtcggaggagatctctacgtcgatccggccgtgaccctgcaaggcgtcgagcgagtttttgatgaggttctccacgacccattcgaacaacgcggtgttgatctgggctttgaccggcgcgatagccagcccgttatagtcgatcactacgttgcggggtgcccgcgtgcggaaatacatcaccgatccgcttactatttcgttgatattctcgggggtgagcggagtttcggaaccgattttcgagaagcggtccacgatcttcatcaggtggctcaagtccttgttcatctcttcgacggcaccctgatcgacgggctgcgtgcgcaggtattcgatccatcccagcagcgaggaggtgggggtgcccagttggtgcgccgtttctttggccagtccgatccatacgcggttctgctcgtcctgcttggtcgagcggaaagcgatgaaacccagcaggatgaagatcgcaatgacggagagctggatgtaggggaaccagtagagggtcttgagcagccgggactggccgaagaatatgatgtgtttgtggtctttgccccagtagtattggatcgtgatcggggtgttctcttcggtgagctggttgatcttcttgcgcaggcggtcgggatggttgatgatctcttcgggaatgagatgcgagtgcaataccttcaggttctgattggtgatgatgaaggggatgttgttgcgctgactcaggatgtcttggacgaaggggtcgttactcgagtcgctcatcacgcgctccatggcgtgtacccagagggccacttcgtgctgttccttctcccgcaggcggcgggccatgtcgttggtgaacagcagggacagcgtcaccatcgtcactccgacgacgatggctacgatccgcttgcggaacgagagtattttgcgccccagtttgagcatagccggttatttcttttcggacgtctgcatggtcgtgatttcttggtattccgtcggattttccaacacttcggtagcccggagaacctcggtgtcgtcacccaggttatgttcgatcacgccggcctgatagctgtgacgcagaacgatgtcgttgttgatcgtttcggcgatctctttccgataggtatgcagattggtctgcgtgtcgtctttcaggtcgccctcgatcgctgtgatttcctgggccaggtcgctgtaaaggtcgttttcggccgcttccttcaggaccttgagcacccggcgggtttccgattcgtaggggacttccttgccttccataaatttgacgaaggcgtcgtagtccgcatcggtgatcgagaacgtgcggttgtcgatcgtgtcggtgtggtgttcctgcatgtattcgtccacgaaatcctcgatgaatcccatagccagcagagtaacggcgaaacggctgatgtactgaggctcggtggctatgtcgggcgaaatgccgccgccgtcatagactttgcggccgccgcgggtcgtaaattcccgtacgagcgaatcggctaccttgccgaccgtgccgtcctgcttgcgcgaggagtaatcgatagcctggatgcagcgccccgagggaatgtagtatttggcggtcgtgagtttcagcagggtattgtatcccagcggacgggtcgtctgcacgaggccctttccgaagctcttctgtccgatcagtacggcccggtcgagatcctggagcgagccggcgacgatctcggccgccgaagccgaattgccgttgatcagcacggccaacggcagatcgggcaggatcggatcgttcgcggtgcggaagacattctcctgcgtagcggcccgtcccttggtgcggaccacctccgtacctttgggaacgaacatagaaacgatcttgacggcttcctgcagaatgccgcctccgttgccccggtagtcgaggatcaatccccgcagggtatcctgtgtgcggagtttctcgatcgcggtgcgcatctcttcgtacgatccttcggtgaagtcgctgtgctggatatatccgatcccttttgcgacgaacccggcgtaggggacgctgggaatggctacccgttcgcgcgtcagagtgagagtgtcgtgctcgccgccgatcagccgttcgatgacgattcggacggtggtgttgggcgtgcctttcagggcggaacttatctgtgcggggtcccaacccttggtgtcctcgccttcgatcgagaggatcttgtcgccgatgcggatgccggcccggtcggccggggagccttcgtagggctgtgcgaaaattacgtaatcgcctttcttgcggatcatcgaaccgatgcctccgtacttgcccgtggtgagcaggtcgaagttcgacatctgctcttcgggcagaaattcggtgtaggggtcgaggttgcgggtcatgccttcggcggcatcctgcattagttggtcgggatcgacttcatcgacgtagaagagcgaaagctcccgcatcatattgaccagtagctccatgtttcggcccagcccgaaatcgttgggcttgccgaaccagaagagcgtgcaaagcagggcgaggaccgcaggaatcgccgcgcggcgaagtatgggacgtttcttattcattttcattgcgtgttctttcgagataggactgcaggcggtaataaacccgggctacaccccggcgaataccttcgatcgtgatccattccccggtctgggtgactcggatttcatcttcgaaaaggagcgtgagccgcttgaagagggagtctgcccggaacaccatttcgtgttcggattcccggaccggcttgaagccctccgaaacgaaggcattgaggatctgttcgcggttcttgcgcaggctgccgatctcctgccggcggatgaagccgaacttgggatacagggccgaaagaagcaccaccgcgacgatcagcacctgtccgcgtgtggagtggacgagggccgagaaggtttccgaaggggtcagcaccgaggtattcgtgagcagcatcagcgccatgataatcagatatagaacgcagagcgcgataaaatattttacggaacggatcaggtacttcatggtcgttatcgtttttataaggttgaatttcttgtctgtttccgatacggaggcacgtgccggcgctttgcgtccgtatttcggattttttgtttcaccgcccctgcccggcgaccgcatcggccacttcctgcatcagccacttgggggtggacgtagcaccgcagataccgacggattcggctccttcgaaccattcgggacgcagctccgaagcctcttcgacgttatagctgcggggattggcccggcgacacacttcgaaaaggaccctgccgttgctcgacttgcggccgcagacgaagataattacgtcgaatcgccctgcgaactcctcgaggtgactttcgcgattggatacctggcggcagatcgtgtcgtgggcgaagacctgcgcagggtcggtggcccggctgcgcatccggtcgcacaggtgctggaacagggagatgctttgcgtggtctgcgaaaggaaatagatcggacgtgtgaagtcgatctggtcgaggtcttcctctgtttcgacgaccagcgtgggagcttcgacctgcccggtgagtccgatcacttcggcatgtccccgcttgccgagtatcacgacctgccctccgacctgccgcatcttttcgtgtgcttcgacgacgcgccgttggagtttggccacgaccgggcaggtcgcgtcgatcagctcgatgcccagctcttccgccagccggtaggtcgaaggaggttcgccgtgcgcccggatgaagaggctccgtcctcccagttccggcatctgatcgtgggtcaccgtgtgcatgccgagccgttcgagccgctgcacttcgacgcggttgtgtacgatgtcccccagcgagaagacctcgccctgctcctgcagagcctcttccgcgcgggagatcgctctcacgactccgaagcaaaaaccggaatggctgtcgatttcgactctcatagccgaggttgttcgttattgtattttatgcgatgcggttatcggccgcaagctatcctatcgaaacgctccatgaaccaggtcatttgctcttcgacggtcatgtggctgttgtccagcactacggcgtcgtcggcctggcgcagcggcgagatcgcgcgtgtcatgtcggccttgtcgcgtgcgacgatgttggcccggatctcctcgagcgatacggagtcgcctttggccagcagttcgtcgtagcggcgccgggccctgacttcgggatcggccgtcatgaagattttcatttcggcattggggaataccaccgtgccgatgtcgcgtccgtccatgaccacgccccgctggcgacccatcgcctgctgcatagccacgagtttttcgcgtacctggcggatcgagctgacgcggctcacgcagttgctcacttcgatcgtgcggatgcgtccctccgcccggtcgccattgacgtagatgtcgctcgcgccccgttcggggttgaagcggaagtcgatcgagatgtcgtcgagcagggcgatcaccttctcttcgtccacgatgcccgaaacgatggcgccgtgttcgagcgcatagagcgttacggcgcggtacatggcccccgtgtcgatgaagatatatcccagcttggctgcgatggttttggcgaaggtgcttttgccgcacgaggagaatccgtcgatggctatgatgatctttttaggcttggagcattccatgggggatgaggttgaagaaggtggataaaatcgtatagacgccgagtactccgataataatgccggccacatggttgatcgtgagcatgtggcggggacggaagcggcgccggaaaaggttgatcaggaaagccagggaggtccaccagaggatagcgcctccgaagaatcctacgatgacgagaaatccccgtcccaggccggcgacgtcgaaggtttcgatcgtcgaaattttgaaaaccgcgaagaaagtcaggatatagggaatgaccagcacgaaattggcgatcgtaaggccaaaaatcgaagcgaagtcctgtgtaaggctggtcttgccggcccggttgcggcggatctgcggtaccgggttctgaaagaagatatagacgcctacgatgactacgaagatgccggcgaccacacgcagcaactggttgtactggtcgatttgagcctggagcatcgagtagcagaagtaagcgatcatcgccatcagcgtatcggcagcggctacaccgagccccgacacgatccccgagcggcggcttttgctgagggtccgctggatgcacagaacggccaccggtcctaccgtgatcgacgcggcgacgccgacgcagaatccgcgcagcaaaatctcgatgatttccagatacatgctctttcttgcaggtttatactgcaaagatacgaaaactaacttaaaattcggcccggtttcggaaaaagggcggaaaagagggtcgaaaggagaatcgttgttctataatgttgataagttctccataactttgccttctcgggtcgggagagggatcgaaaaatggataattttgtccatacacgttaaaaattcaatactatggcagagaatcaaaaaatggagatagatctgggcgaggacgtagctcagggtaattacatcaatctggcgatcatcgcgcattcggtttcggaatttatcatcgactttgcgacggtccttcccggtgtgccgaaggccaaagtcaagagtcgtgtgatcctgaccccggaacatgccaagcgcctgctgctctccctgcaggagaacattacccgctatgaaagcaatgtgggaaaaatcgaaataccggctccgcagcgccattctcccggcgattttccgctgggcggaggtcccaagatcggtgaggcttaaagtccggtatttccggtcggctggtgcgggacgggcggttgttttgccgaagccgtgaaacaagagaaggccggccgggaagaggcggacgaaggcgcgacagctatgccgcgagagtttttgcagccgggtcggcagtgccggccacgattgaaaagccggaaggaaatgtttccttccagcttttaggtaatggctttcgccaaagggatttagggtttattcgagcacttcggcgacgacgaaattgctgcctccgatgaagatcatgtcctcctccgaggccatctcccgcgcccgggccaatgccccgctcaccgtgtcggccacttcgccccgaagaccgtatgcagccgctttttcagccagcttgccggccggaagcgcccgttcgttgccgggctgcgtgaagatataacgggcctctttgggaaacagaggcagtacgctcgataggtctttgtcattgacgaatcccagtacgcagtagaggtcgcggtggggggttgcggccaactgttccgcaacgtagcggatgccgtgggcgttgtgtcccgtatcgcagatcgtgagaggtttgtcgccgagcttctgccaccggccttgcagggccgtgcccgaagcgacggtgcgcatgccttccgtgagcgcgcgcaggctgatcgtcagcggggtttcctggtgcagcaggtcgatgacggcgattgccgtcagtatgttgtgtacctggtaattgcccgtaaggtccagttccaggttgaaaactttgttgtcgcggtggcgctggatgctgaatttctggaaatccccttccgtcgaatggttgatgcacgcgaaatcgttttcggcatagacgattttggacatcatggccgttgccgcctggtcgaagacgtggttgtattcgtcgctcttctcgccgatcacgaccgggatgctttttttgatgattcccgctttctcggctgcgattttgggaagcgtgtcgcccagcagggccatgtggtcgagtccgatgttggtgatgacgctcacgatcgggatgatgaggttggtggcgtccaaccgtccgcccagtcccgtttcgatgacggcgacctcgacgtcgctctggtcaaagtagtcgaaggcgagggccgtggacatctcgaagaacgagagtccgagctccttcatgcagtcgtagtgtttgtccacgaagttcacgactttctgcttggggatcatctctccgtccacgaggatccgttcgcggaaatcgcgcaggtgaggcgaggtgtagagccccgtgcggtagcccgcctgttggagtaccgaggcgagcatgtgcgacacggagcctttgccgttggtgccggccacgtggatcgtgaaatagttgcgctggggattgcccaggtgcttgcagaatgcggtgatgcgttccagtccgggtttataggcttcgggccccttctcctggtacgaaacgagcgatgaaaataggaattcgagcgtttggttgtaattcataatgcaaaagttccggccccctccggatttatgcgggtcttgttagcggtcgtatgtctgttccggttacttcaccagatggtttttcttcttgattcgataggcgatgtaatagaggatgcagagtcccatgaggagctccgaaattcgtcccaggtagtcgccgtatcgggtgtaaaaagtcagttcgctgttgagttcgacctctccggtgaggatgccgcgacggtcccagcccagcttttgctgcacgtccccgcgcgtgtcgatgaatcccgaagtgccggtgttggcgctgcgggcgatggcccggcggtgttcgacggcccgcaggcgggcgatcgagaagaggtgtttgtgaccgggtgtgtcgccccaccagccgtcgttcgacgagatcagcagggctctggctccctcgcgtacgaatccgccgtagaagttgccgtagagcccttcgtagcagatcggggttcccacgctcacgccgttatgaacgaatgccggacccggttcccccacgccgagttgccccaccgtgccgcccaggtcgatcaccaggaatttgagggccttgaagatccaggtcggagtgctttcgacgccgattaccagccggcccttgtggtggatcgggaggcaggcggtcgtgtcgatgccgagcgtcgagttgaatttgtcgtaaaaagctccccgttcgttttgacgggcggtttccgtctgttcctccggcggataatagacgatggtttcggctcctgtgacgatcatcgcaccggaagatttttcgcgcaggatctctcttattttcgtaacgaccggagcctgcggcagatagcgctcgtcgtaggcgtagggccagaccgtttcgggcagtacgatgaagtcggagcctgcgggagcctcttcgatcatcgagagcagcagcctttcctgcatctgctccgttcccgcagcgaatttgtcgtaacagtcgatgttgggctgcactacggataccgtgaccgagccttcgtcaggtgcttcgtaactccagaaaatgcccagcgaaacgagaatcggaaggagtacgaccgctccggcccaggtccaggcttttgcgtcgcgccgacggcgccaggcctcgtaaagcaggatattcgagagaagcacccagagcgtaccgccgaagatgcccgtgtattcgtaccattgcacggcccacacttcgtgcgagaatccgttgcccagcagcagccagggccaggagaagtcgccggtcgtgtaccagtactccgtggcgatccagcctgaaacgagcagcgtgtaggccaatgccttcggtccctttttcgaaaccgtatggaagagcatgaaggcgaccatgttcaggaaagacgaggcgatcgtcgcggcgaaagggcctacgggagtggccagccagatccaccagatcgtagaaacattccagagtacgaaggtgaggagcgcccagccgaaaactttccaccacgagcggcgggaagcgtcgtacgaatcgctgatccagagcagcggcaccaatccgaacaggagggtgaatcccgttcctccgagccatcccggcgagagcaggagggtcgagcaaagtaccgcagcgaatttgcgccccatagaagtcattaatttctggcgacaaaagtaacgaaagccctgcatatttcaaaaaatatagaatatgaattccttctttgcggaatatgccgctgattctcgaaacccccgacgaatcgcgttgggcggaggagatcgcggaattaaaacggttttcggaagaatagtcgaacggttgcgattcgcttcccgccgaaacaaccgtttcggcgggaatttttgtgcggatttccattcgcaagtttgtaaatcggaagcgtattcagtatctttggataggagtgtgagtgtttcccgttccttcgaacttataaatccgcctgccataaatattttagcggtctttttacggtattttccggcattcgaagagggggaggcgttccggaacagtattccgtctgcgcgggagattcaggaaatagctttcgggtcgaaaaacagccgggaagcgggtggctggatcattcaatatgcggggcgtcacggttacgacgcagaaacgatcgatcgtttttggagggtgtacagtatggttgctaacgaggattcttactaaactaataattaaaaaagttccgataatgaaacgattgttttttctgatagcgatagcttttttgatggctggttgcagtgacaaggatgatgaaaatgttgatatggcgagtgtcggacattatgtttggcaaaacgaaagcgatcaccgcataacattgaccgtaataggcagatttgaaaatgaagttttgctcccgaaagagcgtatttcgaaaacgatgatcggatttatttttccgccatcaccacgttcttatacaatagaggggatgaaaatttctttcgatgacgggtcttatggcggtgttttctccatcccgacggagtatccgactgcgccgtacaatccgtgtgacgagtataattatgagatgggagaggaatataaggagagcggaatgcttcagcgacaatggacttatacgtttactaacgccgactacgatgcggccgtagctcgcgggccgatgacggagcagtagcgttttgctgaaacagcgaaatccttcgagtcgaaatccccggcacagattcgctgtgccggggatttctatccgggaatttgaccgaagctttttcgcgtggaatgtgcagaagtcggattgcatgtccgaacccgtgcgttcggccgttgccgccgaacgggaatattccgatcgtaagattgttttcgattactgttccggccctgcatggccgcccgtttgccgtaccgtgtcgggtttggccgcagtgagcgaatcgggccgcagagtttccggcgccggttttttttgccccgttttttcgggtgcgggcatttcggttgcagccggtccgatcatcgaagtataggtgttgtggcggatggcggcgatgacgattaccgcgatagcggcgatggccaggatcagtccgatgattcgtttagtcatggtcgttttgggttttaagcacttcgaccgcccgcagcatgacggggtcgatcgggtagatattcacgtaaaatcccgcttcgttcaggggggtgttccgtccgatgtaggcccgtaactgggcttcgatcagcttgcgcgagcgggcgatgtccttgtagtcgggctgtacgccgttgcgggctgcgtatcggatgaagtcgttcatcagctccttgtcggcatcgagcagggcctggagttccggaatggtcttcacggcgttcagggcgtcgcggtgacggtcggcgtattcgagcgtatagcggaagaggatgttgcgtcccgacacctcgaggaaatagcgggttacgtcggtcgtatcgaccggcacgaacaggtcgggcatgatgcctcctccgccgtaaaccactttgccgccgggcgttaccttgcgcagagaatcgttgaagtgaatgctgtctgccgagaaaaactcgttgtgccggtaacggttccaaagatcttcttcataccccagcgcatcgccgttggtgtagggtttttggatcgagcgacctgtgggagtatagtagcgtgcgacggtgagccgcagggccgaaccgtcgggatagggtatctgccgttgtacgagtcctttgccgaacgagcggcgtccgatgatcgtaccccggtcgttgtcttgcagcgctccggccagaatttcgctggaggaggcgctgaattcgtcgatcagcaccgccaggggcagctcttggatcgtgccgtttccgtcgctcatttcatccgtgcggttgtggtttcggtcttcggtatagacgatcagcttgtcggccggcaggaattcgttggcgatgcggattgcctggtcgaggaaaccgccgggattgccccgcaggtcgaagatcaatcgcttcataccttgtgccttgaggttgttcaaggcggtgatgagctcgttgtgcgaggtgatggcgaactgggagagtttgatgtagccgatgctgtcgggcagcatgaaggccgcttcgaggcttttgatcggaatggcgccgcgcgtcacttcgacctcgactggttctgcgattccctgccgttcgagcgataacttgacctgtgtgccgcgtttgccccgtagccgtttgacaatttcgttgttgggtatcttctgtcctgccaccagcgaatcgttgatccggataatgcggtcgccggccttcactccggccttgtcgctcggccccgaagggatgacattgagtacgatgaccgtgtcgggcgccatgttgaagaccacgccgatgccgtcgaactcaccctgcaacggctcgttcaccgcctccatttccgatttggggatatagaccgagtgggggtcgagttcctccatcagcaggggaatcacttgctcggagagcgaatccatcgacaccgaatcgacgtattccgtttcgatcagcgagagcgtataggccagtttgttggtcggatgggtcagttgttcgaccaggttccgcagttgggcttcgggagtgttgcgacccagatagcgtcctaacagcagccccagcacaacggctgcggcgagcaggatcgggagcaggatcgcaagacgggagtttcggtacatcgtgttttcgtcggttttatggggcgttcgtgacgatcgccgccgcttatttgttcttgaacgtataggtcagtcctacgctcaacagcaactgggtctggatgtcgtagttttgcgcccggttgtagtagagctggaaattgaacgtcgtggaaaggtattttgttgccttgatgtcgatggtattttcccagcgtaccgtcggatggatttgcagcatcggtttatcgccgattccctgtgcatcatcccaggcctggagagctttttcgtaggcgctgacgctggtatatctgtttttcatgttcaaattcgacatccagcccatgaaggagaagagcgtggtgcggtagcggaaaatgccctttttgccgaacgtccggtcgaagtcgatctggattgaggaaccgccctcgtatttcgaggttttgttcgcattcgaaaggccgtaagcctgccagcccggtttgtcgtcccatctgttgctgcggaccttggcgctttcgacgaatacggcgctcagggcgatcggcgagaggttgatcttgatcggaaaacgctcgaggggacaggtgtaggtgaaaccgcccgatatgtcgaggtaacccggcgacataaaggtacttttccgatcgtcggccgtctgctgcgagcgcgacacgtaaccgttggcgaactggctgcggaatttgatgatcgagccgacctgccaactcttgttgatgatgtaggcgggattggtcgaaatctgaaattcgtcctggttcttgtaccaggtggcctcgctggtcgtagagcctccgtcgccggcgacttcgatattcatccggttgtagccgaacttggcatcgaacttggtttcgatggtaaagcgctgtttggtaaaggtgtgatgcaggaaaagcgtggcggccagaccgatcgagttatcgccgcccgaagtttcgatccacgaatcgctgtacgaggctaccgatccgagtatgccgccgccgaattcgagggtattgcgctccttgcggatcgcggcacgctcggcacggtagcgggcgcggctgaaataactctgtgcatcgaccgtcgtggggcggacttcgtttttgaggattctttccgaggggtcggtcttgacttcgtcgatcgtgatctgtgcagacacgggattgcttatcgccagggcgcagaggagggttgaaagcaggtaaaattgtttcataagcaactaattgatacaacaaatttagggatttctctacaaaaatcgctacatttgttagcaaaacgataaataataagataaagcgaacagtatgaaatatttcggagcacacgtaagtgctgcgggcggtcctgaaaacgcccctttgaatgcacataaaataggagctacgggcttcgccctttttaccaaaaaccagcgtcagtggagcgcaccgcccctgacgccggcccagatcgcggctttcggagagaattgccgggccgggggttacgcgccccggagcatcctgccgcacgacagttacctgatcaacctgggacatcccgagcgcgaagggctcgagaagtcccggacggccttcatcgacgaaatgagccgctgccaggccctcggcctcgatcgtcttaatttccatccgggcagccacctgaaccgaatttcgacggaggagtgcctggaccgcatcgccgagtcgatcaatatcgccctcgaccgcacgcagggcgtcacggccgtcatcgagaacacggccggacaaggttccaacctgggattcaggttcgaacacctggcgtatatcatcgacaaggtcgaggacaagtcgcgcgtgggtatctgcattgatacctgtcatgcgtttacggccggatacgacctgcgtaccgctgcggcttgcgatgcgacattctccgagctggatcggatcgtcggactgaaatacctgcgggggatgcacctgaacgatacgttgaagacgctcggcagccatgtcgatcgtcatgctccgctgggcgagggtgtgttggggatcgagtgtttccggtacatcgcccgcgactcccgcttcgacgacatgccgctgattctcgaaacccccgacgaatcgcgttgggcggaggagatcgcggaattaaaacggttttcggaagaatagtcgaacggttgcgattcgctttccgccgaaacggctgtttcggcggaaatttttgtgcgaatttccatccgtaagtttgtaaatcagaagcgtattcagtatctttggataggagtgtgagtgtttcccgttccttcgaacttataaatccgcctgccataaatattttagcggtctttttacggtatttcccggcattcgaagagggggaggcgttccggagttgtattccgtctgtgcgggagattcaggaaatagctttcgggtcgaaaaacagccgggaagcgggtggctggatcattcaatatgcggggcgtcacggttacaacgcagaaacgatcaatcgtttttggaatatatacactatgatcgataacgaagatacttattaaaaacgaggccatattatgaaaaagcgactgttattatttgcgatcctgtttttcgggttgtgtggttgtgataaggacaacggagaggatgtggatccgcccggaatcggccactttgtctgggtgaatgccagcgatcatcggattacgatgactgtgaacggtcagttcgaagatgagatcatgttgcccggagagcgtatttcgaaaacgatgatcggatttattgctcttccaccatcacctgatttgtatgtaatgcatgggattgaaattgtatttgacgacgggccttacggcggtgttttcacaagaccgaaggagtatccggcggctccttacaatccgtgtaatgagaaggagtatgtatgggaggatatgccggtggaaaacgatttgtcccattgggtttggacctacactttcaccaatgccgactacgatgcggccgtagctcgcgggccgatgacggagcagtagcgttttgctgaaacagcgaaatccttcgagtcgaaatccccggcgcagattcgctgcgccggggatttctgttgaatattgcttgtttcgttggagcgctgccgataattcgccgtcagattcggtcgaggcattcgcggatcaggcgggcgctgtcgcgcacttcctcctcggtgatcgtgagcggcggcgagatgcggaacgccgtatcgcagtagaggaaccagtcgctcaggatgcccgcctccttgaagagctccatcatacggaacatcttggccgacgagcccagttcgacggccagcagcaggccgctgcgccggatttccacgacctgcggatgatccgccagcagcgattcgtagaggacgcctctgccttcgacgtgttccaccgtgccggtttccaacagatattcgagggccgccagtcccgttgcgcagcagaccggatgtccgccgaaggtggtgatgtgccccagggtaggggcggtttgcagcgtgtccatgatctctttgcgcgatacgaaggctccgagaggcatcccgccgccgaaggctttggccaggcagacgatgtcgggtgtgacgccgtacttgcacatggcgaacatttcgcccgtgcgtcccatcccggtttgaatttcgtcgaagacgagcagcgcacccacctcgtcgcaacgtcgccgcagggcttcgagccatccgggaaccgggggccgtacgcccgcttcgccctgcacgggttcgaccacgacgcaggccgtgcggcgggtgatgagtcgcaattggtcgaaatcgttgaagtcgatcgcccgcacatcgggcagcagaggccggaacgcgcccttccactcctcgccttcgggctcacccatcaggctcatggctccctgcgtcgaaccgtgataggcccggcgcatcgagaccagctccgtgcggtgggtgtatcgcttggcgagcttcagggccccttcgatcgcttcggcgcccgaattgacgaaatagacgctcgaaagttctcccggcagcagctcggcgatgcgtgcggcgtaccgcacctgcggccgctcgatcatctcgccatagaccatgatgtgcatgtagtcggccgcctgccgctgcacggcttccaccacgcggggattggcatggccgacgttgctgaccgaaacccccgccaccagatcgtagtagcgtttgccttcgggtgtatagaaaaaaacgccttctgcccgcgccacctcgatcatcatgggttcgggcgaggtttggccgacgtgggccaggaactgtttgcgtagtatcgtattcatcgttttccttattcttcgggatatttgcgtcggagaatcgcttcggcgtcccgcaccgaggcgaaggtccagcgatagaggatttcggcccgttttccggcagtcagacgccagtcgggaaccgtttcccgcatccgggacgagagcatgtagatcagaatggccgccgaagccgatacattgaggctctcgaccatgccgcacatcgggatacggagaaattcgtcagccgcagcgacgatctcgtccgagatgccggcgtgctcggtgccgaagaccagcacgaagggggaagccgcgacatcgaacgtttcgggagtcttgtcttcgcggtgaggcgtggtcgccacgatgcgataaccccgccctttcaggtcggcgatcgcctcggccgtagtgcggtggcggtgcaggtcgatccatttgtccgtgccccgcacgatattgacgttggggttgaacttgcagcgggtttcgatcgtatgtatatcctgcacgccgaaggcttcgcagtggcgcaccagcgcactggcgttctgggcatggtaggtgttctcggtgaggatcgtcatgtagcgcgtgcggctgtcgagggtgcgttgcaacacctgccgccgctcttcggacatgaattccgagaggtaagccgtacgttccgcgtaccagtcgaggggtttatttgcggtatttgtcatcgtcgtcgagcattttcaggtaactttcgtagcgctgccaagatatttcgccccgttctacggcttcgcgcacggcgcagcccggttcgtggacatgggtgcaattgtagaagcggcattggggggccaggcgcatcatctcggggaagtagtgccacagctcggcatcggcgatgtcgatcagtccgaagcccttgatgccgggcgtgtcgatcaggtagccgcccgacgaaagggggtacatcgtcgagaaggtcgtggtgtggcgccctttgtgatggctttcggagatgtcgcccgtgcggatgtccagccccggctcgacggttccggccagggtcgattttcccactccggagttgccggccagcagcgtggtgtgtcccttcagtaattcccgcacggcttcgatacccgtgccgtcgagcgccgagacttcgagtacggagtacccggcgctttcataggtggctttgaatgcggctacggcttcgggatcctgtgccgccaggtcggctttggccagcagaatcgtgacgggtacgcggtaggcctcgcaggttaccaggaagcggtcgatgaactccggagccgtcacgggagagaacagcgtcacgaccagcagcgctcggtcgaggttggcggcgatgatgtgcgactctttggagaggttcgaggccctgcgaatgatgtagttgcggcgcggcactacttcgcagatgactccggcgtcctcttcgtcccgttcgcagacgacccggtcgcccacgactacggggttggtcgaacgtacgcctttcagacgcaggcgtccccggatacggcacttaaccgtttccccggcgttcgtgcggacgtcgtaccagctgcccgtcgtgcggattaccgttccggtgaattgtcgctccataattcttgttcatcgattgatacctgctctttggcccattcgagcagcgggaagagcgaatccgccagacggatcatcggacggtagcataccgaccggtcgagcgtcttttcctcggccagcgtatggtccttgttcagagattcgaacgctgagaagagcagccccaggatcagcagcgtcttggctgcggataccgcgacacccagcagatggtccgggatgccgaagcctgcgaaatgaaacaccttgcgcaacagccgtcccacgatcgccaccgcgatcagtacgaccacgaagaccgccaggaaaccgcctgccgtcgcgaactcttcgtccagatgcagcaatgcgcccgcttcggtaccgaagcggatgccgagccatgcccccaggacgatgcctgcgagcgagcagagttgcagaatgagcccctgccgccagccgttgaatacggcccacagcatcaggagtccgacgatcaggtctattacgctcatttggcttgtgtcgtttcgtttatgccggtcgcatgccttcgccgatattacctttgtccggtgaagggtccggtattcttttcggaagtactttgatccgttttcagacaactttcgcaagtcggtccgagccgcgtttttcttctacaaagatagtgaaagccgggagaaaacgggaacttgttcccggttttccgaggcgcatcctattttctgcaaagatagcgaaaggtgagagcagcgccaaaacttaatttccggtttttctgtttctgcgggaccgggattgcaagtgttcccgttatccgctccaaccgtcggttttcggtccttgttcgaacggtattttccgtaaagatacggacaaaatgcgtataatcgaaaataccgatttttttgatagagcgtcggacttgtaaagatatgtatttggtgaaagattttaagaaacagcgccgctcggttctcctctggtggttggctgtgttggatcggttctaaatataataaatataggtatttattcgctttaacggataatgtcacgaagattgacgttcagtgcattgcatatgatacacatggtctttaccgtgaggttggtgcgtccggattcgatgcggctcatattggatctttccatgtcgcagcggtatgcgagttcttgtacagtcatttgtttttctttccttaactctctgattttattcgagataaattttatctcttcctggtagctgattgtcattttaactttttcaatgaaaatttttgtcgtacaaatatttatatatatatttgcaccgtgcgtatcatatatgatacgttttcggagagttaatacgctcataataaaatatatatagtatatgaactcatttcaaaacacttatcaattatgaaaaaaacattatttgtgaagtttctgttcttacttctgtgcgggagcgtgctgactaccgcaggttgtaaggattacgatgacgacatcgacgccttgcgtaatgatgtcgaagatctgaaggggacggttgtcgaactcaacggtttcgagaatcgtattgcggcgttggagcagacccaggccgctttcgaagcgatcgatttttccggatttgcgaaaaagggcgatatttcttcgttgcaaacccagatcgaaggatgtgtcaaagacagcgatctggctgcgaaggtcgtcgcagcgatcgaatcttcactcgccgacggggccttgcaggagagcctgaacagtctgaaatcgggtattctggaggaaatagcgggtatttatgctacccaggaaactttggagagcgttcaggaaacgctggaaaatatgattgagctcaaaaaggatgccgcaggtttttcgctcgaagtgacgcagctcatcgaatcttacctgtcggacaacggtttcgaggctgccggtggagagctgaccgacagtcaggtgagccagatcgaaaccgccgcctcgcagtggatcgccgatgctatcaaggccgaactcgaaacggccggcagctcgatcaataaatggctgggcgatgaactggcagtttatatggaccagatgacattgggcgacaacctgttggggcaggtttccacgcaggcgatcgcatcggttatggaggaactggacaaggaggccagtgcgctgactgaaaagatccagggactgatccgggaaaacaacggttcgctcgtgatttccaaagaccagctcgaccaggaatttcagaattatctggcgacgttggaggccaatgtcggtttgctcggtagtcgtatccagtcgatcgtttacctgccggattatgtggacggtctgatctatttcggcaacggggagcagtatatcgtgttgtcccgtgagaacgaagttacgcacgaaaccgagtaccggaatctttatttgcgtcccagtgcggaaggcgagcagatagcgactctgcgattccgtatgacgccggcccgtgctgtgaaaaaatatgccaatacggaggccatgtcgctcataaccgaagaggtcggaacgcgtgcggcggccggttttacgatcgaagagatcaaggacatcgatgaaacgaccggtgaatttacggttgtcgctacgacggattacgattatgtttccgcagaaaaggccggcaagacgcaaatggtcgccctccatgtcgatggttcggcattgagcgaaggcgaatcgaacgatttcgaaacggacttcacgtcggcttttatcggaaccgcctatgccaaagcgggtattcagatccctgcgacgaatttcgtgttggcccgggccgatgccgagaatgagggcgaatacgtcgaatataccgacgaggtgactaccgaagtaaaatatacggacaaagaggctcatggcgtgttggccggatatacggtcatgtataaggacggtgaaacgatcctgccgctcgcagaggctgccgaagctaataattggaccgtggatctggcggcactggtatcggcgtcggcggaatttaccttcagtgattcgggtagcgaggagctgtatgccgtcgatggaaaggcgcttacattcgctgttgccgagtcggaaactgcgttgatcggacagacagtaaccgctgctgcgacttatgtattgctcgacgaagagggattttcgctcgaagtgaaagccggtgccgtgaataaattctccatcgcacccgacggtgtcgaactttccacgccgaaatccgaagtgatgtggacgtatgctgccgctacctccgacgatacgtatgaggcgaagggacttgtgctgactccggataagggtatgctttctgccgttcagtataatgcgctcaaggataatgagaatctggttgtcgaactttaccggggtacggagcttgtatcggagatcgtcccgtcgatcgaattgccggctactccgacctacgatacggacgtgcaaacggtcgatttgaaattggtcggcgatctggcacagagtgctgaatatgtcgtaaaagccgtttataccaatgacgacaagaccgtcgtaacgattacgatccccgtatccgtaacgggtattcctgaaattccgatgctggagcaaacgctcgaattgccgtataatgcggcatcctcgacgggccatcacgtcgccgtcgaagaattccgtgcgctcctttgggagagtctggatcagacggcccgggcgcaattcggagaggaaacgttcatgcagctctcctggacgagcgacatggcgaaggatgaagccggcaactatgcgacggtcggagcgagcggtaagaacatcaactttgtcttcggtaaagctgcggctctgaatgtttcctacaccgtgaagaatctctttacgactgccgatcccgtacttacgttcgaagctgtcctgcacgtgactgttacggctcccgaaatcgagttgctgcgcagatcgtcgctttcggacgacgatcgtgcccaggccgtaatgaagatcgaaggcagcacgctgcaaatcgatgcattcgacctgtcgaaaacctggtacatcgcaaaagatgctccggcagaagcaaaggtcgtttatgcgacccaggcagaaggggccgttatcacggatgcgacgctcgattggggtacctgcgacgaattgtcgatcgtggttaccgcccaggtgatgtatggtggcaaggcgttgggcgagccgaagacctttaccgtatcgatcgctgatccgatcgctgacgcgacgattgcggtcgaaaccggaaaactcgtcgccaaagtcgatgaagatgtaacgctggatgtcgctacgttgcttacattgaaggcggtcaatgatgtgaatgtattcgatggttcgacaaatgcgcagaataccaatacggcggtagccgcaaccatcgaatatggcgaggcggtggtttccatccccgacggccgtgtgaagttcgatgcggagagtcatgttcttacggtagtcgaaggcggtgatctggaactgatgaaggagattaccgtaacgattccggtgaaatatgtctatacgttcggcgaacgtacggcgcagatcgttgtgaatgtgacgaaataaccgcatagtggacggcgattgtttcaggttttcttcctgcgggggaaggagcggaagaagataaccggaaaatcgccgggtgaaaaggctccgaatctttattgaatggcgggaccggctctattcagagccggtccctttttgatatgtttttacggaggatatgacggcaatacgagtgtaggcgacactgcggcgaagactgtggggtatgcggcggtcggatgcgaaaatcgtgaattttccggtatattcgggcgtataacctgccgatcgggttatgcactgtcggctgatgttgagtatattctgcgcctcgtgcgaagtattctctgttttttctgccgcttggaaattccggatactgatttttcggttgcgtttatccgaagaacaatcccctccgcaagaggggattgacgtatcgagttgtatgcttcggaagcgtacggtccggaaaaggtccggatttttaacgggcagatgccttttattcccgctcttttttccgcagttcggcgaaacagtggcgacagatcggttcgtaggagtcctgcgcaccgagcatcacctgtttctcgtcgctggtcaggcggtgcgaatggtgcgccaggttgccgcaccgtacgcagatggcgtgtactttggttacgtactccgccgtagccatcagcgccggcatcggtccgaagggcttgcccgtgaagtccatgtcgaggcccgccacgattacccgcaccccgctgtcggccagttgccggcagacctccactagtccctggtcgaagaactgcgcctcgtcgatgcccacgacatcgacgtccgaggtcatcagcaggatgttctgcgccgaatctaccggcgtggagcggatcgcgctggcatcgtgcgaaacgacctcctcttcggagtatcgcacgtcgatgcggggtttgaagatttcgacccgcaggcgggcgaattcggctcgcttcaggcggcggatcagctcctcggttttacccgagaacatcgagccgcatatcacttcgatccaacctttctggctggcattttccaaaaacatattattactgctttgcttcgtttccttattccgggcatcggccggtcgttactcttcgacccgggtgatccgggctccgagggcgttgaggcgtccgtcgatgtccttgtaaccgcggtcgatctgttcgatgttctggatcgtgctcgtaccttcggcgctcatcgccgcgatcagcagcgccacacccgcacggatgtcgggcgaagtcatgcgcgtagcccgcagccgcatctggtggtcatgtccgatcaccgtcgcgcgatgggggtcgcagaggatgatttgggcccccatgtcgatcagcttatcgacgaaaaacaggcggctttcgaacatcttctggtgaatcagcaccgagcctttggcttgggtggccaccacgaggaataccgacagcaggtcgggcgtgagccccggccagggtgcgtcggcgatggtcatgatcgagccgtccatgaagttctcgatgcggtagtgctcctgttggggaatgtagatgtcgtcgccgtgctgttcgaagcggatgcccagacgggcgaactgggcggggatgatgcccaggttctcgaacgaaacgttgcggatcgtcagctccgaacgggtcatggctgccagaccgatgaagctgccgacctcgatcatgtcgggcagcagcgtgtgttcggtgccgtgcagctcccggacaccctcgatggtgagcaagttcgaggcgatgcccgagatgcgtgcgcccatgcggttgagcatcaggcacagttgctggatgtaaggttcgcatgcggcgttgtagatggtcgtgaaacccttggccatcacagccgccatgatgatattggccgtgccggtcaccgaagcctcgtcgagtagcatgtagcatcccttgagttccttgcagcggacttcggagcaggcggccgcagtgtcgaaatcgagcgtggcgcccagcttctgaaagccgatgaagtgggtgtcgagcctgcggcggccgatcttgtcgccgcccggcttgggcatgtagcccacgccgaaacgcgccagcatcggacccagcagcatcaccgaacccctgaggcggctggcccggcggcagtagtcgtccgagcgtaggtagtccgggtcgatgtcggcagctcggaacgaatagctctcttcggacaggcgctccacttcgacgcccatcgcctgcagtaattcgatgagttgtatcacgtccaggatctgcgggacgttgtgtacgattaccttttcctgcgtgagcagcgtggcgcagaggatctgaagcgcctcgtttttggcgccctggggcgtgatttcaccgcgcagccggcggccgccttcgactttgaatattgccatgttcgatctgttttgagcgaatgggggaggcgaaccttgcggcaaacgccgctccggatttcccggaatatctcccattattttacaaatatagtgaaaaccgtgcggcgggccaaatttgtccgggccgtcggggtgtattttctattccataacgaggggcgtaaaaggaagcggcagtcgcatttatgcgaacttgcccgaatcgcattctgtcttttcctacaaatatacggaataggtcggaaatcgaaaaggggaaaactgaaaattagaatcggattgataaatatcatcggccggattcattgcccgtgtttttagtctgtcatatgccctctttcgctgccggattaaccgctgccacaggtacaggagatgtgtcccgtaacgggattcgaggcgggtgattcgttgtcacaggcagtgcggattgtgtgtttgcggaaaatcggtggcgtacttacctccggggtactcggagcggaaggacgcaaagtcttcgagtgcgttgcgttcgcccggcgaggcggtaaaccaggatcggatgcggctcttttgcccttttctgcgaaagaaaaggcgtgtgaactatgctgggaaccggtaatttttgccttgcagcttttacggccttcttgaaaaaaggctgtgggcactttcactttgtcgccggaaaaaagtagggacgcaccgcttaaaagattgggtcggaaagaagcgtttctaccgactgaacagcaagggcggtgcatcaatgcaccgcccttgctatggcttgaatcccgaaggaattaagcgtacttgaacgtcgattcgtccgatacggtcagcttcttacgacccttcgcacggcgcgcagccaaaaccttgcgtccgttggccgtagccattctctgacggaatccgtgcttgttgattctcttccggcgcgaaggctggaatgttcttttcattgccatagatctatcgtgtttttattgttttagcgtacaatgcggagtgcaaatgtataatctttttcttgatctgccaaaaatatcgtaaatttttcttcttcttcgttccgggtgcgactccgcacaatccgctttcgtcccgtgtcttacgatcggttaccgttccggtgccgtgtctttgaagaggtccgcctcgccccgttcgaccttgccgtacatgtcggccagttcggcgatgacgggagaaacgtattcgatggtgtcgctcacggcgctcttgcctccttcgcccttgatgcggtagagcatcgcggcgtaaagcgcccggaagcagagttcgatgtcgctcatttcgcgccccagcacggcccgcagacgcggcagttcgggttcgagcctggcgaaagtctgacggtagtgctccccgatcggcagcttcatcagttgcaggtgcaggtcgttcaggtcccctatcagatgcagcgtatgctccaggtgtcccttttcctctttgccctcttcgcgcagcaggttggcgatgtccatgtaccagagcaggtagttgtggcgttgtccctcttcgattccgcgcggagcgatgagctgcgagtagatggcctcggggctgaactggagcgcccggagcaggtcctcgatctgccagaggtagagaatgtattcggcgatgttttcccgccgtttggccagtgcgatgtccatggtgaatttcgttttgcttcccggcgggaggcggagttacttgattttgttgagccactgcagcggcccgtccttgtgttcgaggaagtagcgctgcgatttgagcaggttgcgcgactgaagcaccatgctcttggtttcgttcaggatcgtcaggtagaggatgctggccttggtgttggagcggttctcgttgatacgcgtcacctccgacttgatggcgtcggcgatcgcctcgaaaagccggtcgcgcatttcgagcaccatgtccaggtcggagaagtcgcccgtacgcagcatgttgttgatgtggcggtagatcgactccacttcgtcgttgatgtgcatcaggtcctcggtctgctctttcgagagtccctcgtggttgttgtcgatgtgttcgaacgccggacgggtgatgtgcgccagcgccttggtcatttcgttcagatagtccaccacctgtacgtagtaatgggccgtatcgatgtcgcctttctgcagtttgcgcagggtgggcagcagggagtacttgcgttcgcgcgactggtagaagagttcgttggattcgcgcaccatttcgcgcagcaccttgcggttctctttgaagacggcgatcagcgtgcggtcgtagatgcgggtcgtgcgctccatcgtggcgcacacctcctgcgtgatgttatagatgatgtcggagccggtttcggcagctttcacggcggcggtttcggcagctttgttcttcttgaagaagttgctcttgacgagcatgtagccgcacagcagcgtggtgacgacgaaagcggcgatgccgccgtagatcagtatgagccccatcgccagggcgatcaggaagccgccgacggccgtgatgaaccacccggccacgacggtcatgacgcccgagatgcgatacacggcgctttcgcgtccccaggccttgtctgcgagcgacgatcccatcgctaccatgaagcagacgtaggtggtcgaaagcggcagtttgagcgacgtggccaccgaaataagcatggcggaggtcgtgaggttcaccgtggcgcggatcatgtcgtagggggcgccgctgtgctcgatgtcttcgtactggaagcggctgctgatcttgtcccggattcttttggggatcgtgcggtcgatcgcgttgcttgcattcagggcggcccgtacgatggtgcgcgagaagagcgacgagccgtactgcgtctcgctctcgccctgcgtcgaaagcgaaatttcggtttcggtgacgtgcatcgcctttttcgaggtccagagcgtgacgatcatgatgacgcctgccgtcatcagcaccaggaaattggccggaacgctggcgttcagcccttccatcagaatcgtgctgtcgccggcatgacgggcgatgctgtatgcgtcgaatccggctaccgggacgccgatgaagttcaccaggtcgttgcctgcgaatgccagagccagggcgaaggtgcccgagaggatcgtaagtcgcagaatgttgattttcagccgttgcaggaagaagagcagcaggctgccgacggcccagcacaaaaagagggagagcaggatatgctggtcgatccattcgatcgcggcgcttccggcgagcggggttttgagtcctttgaagacggcgaagtagaggatcgccgtgaaggaggctccgcaccagaaggcaccgaaacggcggaacatcgccgtatagcggaacgagaagatcagacgggagatatacatgattagggtgccgaacgtgaaagcgatcactacggagagcagaatcgccgaaacgatacccatcgcgcggcccgtgttgatgaaatggttcaggtcgcccatgccgagggcctcgtcgttggagatcttgtagatcgaaacggcgacggcggcacccaacaggcagaagatcagcgatacggtcgtcgaagtcgggagtcccatcgagttgtagaggtccagcaggatgacgttggcgaacatcacgcccatatagagcatcattacttcgtggaaggagaaaagccccgggttgaacataccgttgcgggccacttccatcatgccgcttgaggtgaccgtacccaacaggatgccgatcgaggcgaccagcagaatggtcttcatgggggcggctttcgaaccgatggccgagttgaggaaattgacggcgtcgttggaaacgcccacgaaaaggcccgaaacggccaggattcccagaataacgacgataacggtgtagatttcgctcatgttcgggattttttacacaaaatttcagacaaatttacattaaaaatccggatggaccggttgcggcggtcattgttaacattaaattaacatggagtcttttttacgtgctttcggtttcggagtttattatccggacgatccgcacacccggcatgcgggtgtgcggatcgacataccggtacatgccacggtcgaaggtctgcataccggatgcgatgaaattctggaaaaagcactggagatggtccgtacgggcgaatacgacccggcagccgaaaagtgattcgcatgcgatgaagatgaaaaagaggggccgtcggcggccgaaccggaaatcggagcggtaaggtatcccaaaagtgccgttcgatccgtcttttgcatttccgaaatgcggttttagtagccctctttgggtgcgtagcggcccgaagctcccttcgtggaggggagccagggaaagggtagaatttacaaatgcgcccatgagccgcgaataggcgaccgtcggataatggtatcttgggacatatgattacctttcgaaactatgattcttggcaatttcggcgtacacagcgacataaaaaagggttgtctaatgcacatagacaacccttttttgtaaaaatccgccgatttactcctcgtcggtgtcggtataggccttcagcagcttgtcctgcacgtccgccggaacctgttcgtaggaggcgaatttcatcgtgtaggtcgcggcacccgaactgagcgaagagagcgtcgtcgagtaacggtacagttcggccagcggtacgcgggcgttcaggcggtcgaagcccttgtcggactccatgcccataatcatcgcccggcggttttgcaggtcgctcatgacggcgcccatgtagtcgctcggcgtgaggacttcgacgtcgtagatcggctccatgatcttcggtcccgcgttgcggaacgcctctttgaaagcgttgcgggccgccagcttgaacgagatctcgttcgaatcgaccgggtgcatcttgccgtcatagacgatgacgcggatgtcgcgggcgtaggaacccgtcagcggaccttcgtccatcttctccatgatgcctttcaggatggccggcatgaagcgggcgtcgatcgcgcctccgacgatcgccgtatagaactgcagcttgccgccccagggcaggtcgtactcttccttgcccttgatgtttaccgccagttctcccttgccggggatcttgtagctcttgggttcgggcatgccttcggtgtaaggctcgatcaacaggtgcacctcgccgaactgacccgcgcctcccgactgtttcttgtggcggtagtccgcctgggctaccttggtgatggtttcgcggtaggggatcttcggtgcgatgtaatcgtactggagcttgttctccgaggcgatgcgcgagcgcaggatgttcaggtgatgttcgccctggccctggatgatggtctgtttgagctccttggagtagtccaccaggatagtcggatcttcgtatttggcgtcgttcaggagcttgcccagtttttcgtcgtcggcctggtccttggtcttgatcgccgcacggtagcggggttcggggaagacgatcgggtcgatcgtgacgggcgttccgggcgccgagagcgtgtcgttggtgcgcgtgcccttgagcttcaccgtgcagccgatgtcgccggcggccagttcggtgaccttgatgcgattcttgcccgcgacggcgaagagctgcgagagcttctccttgttgcccgtgcgggtattcaggagttccatgccttcggtgattttgccccggatgacgcgcaggtaggatatttcgccgatgtgctgttcgatctggcttttgaagatgaacgctacggccggagccgcttcgtcggcccggatctcctctccttcggtcgagaggaaggcgggggccttcagcgggccgggcgctacgttgatgatgaactccatcaggcgcttggtgccgatgtcgcgcttggcactgccgcagaatacgggcatgaccgcccgacgggatacgccgattttcaggcccgaacggatgtcgtcctgcgtcagtgtgcccttctcgaaatagagttccatcagggcgtcgtcgtattcggcggctgcctcgaccagctccttgttcagagcctgggccttctccgcttcttcggccgggatgtcgagctcttcgcgggtgccgttctcatccttgaagcggtacattttcatcagcagcacgtcgatgaaagcatcgaatcccgggcccggattgaccggatactggactacgacgggcttcacgcgcgaggccgcacggatggattcgagcgtagcgtcgaacgacgccttgtccgaatcgagctgattgacgaaagcgatgagcggcttgttcagcacacgggcgtaacgggcctggatctcgctgcctacttcccagccgttctgggcgttgaagaccatgacgcccacgtccgccaccttgaaggccgagaagaggcttccgcagaaatcgtccgatcccggacagtctatgatgttgagcttgcgctccatgaattcggtgaagaggatggtcgaatagatcgagcgcttgtactcgtgctcgatatccgtgttgtccgagagcgtgttgttcgcctctatgctacccctgcggtcgatgaccttaccctcaaaagccatcgcttcggcaagggtggtttttcccgtgccgggagcgccgataagaacgatgttcttgatttctttcgctgaatagtttttcatattcgttatctttttataaggtttttgcgataccgattcgtcctggcggaaaatccgccggtgattttcaaacttcgccttataaatatacgaaaaaaatcgatcggccaaatttccgggcataaaaaatcgcccgaagaggggcgatttttttaatttttcaaaaatgtcgaacctgaatcccccggcgggcgtttgtccgggtgttccggtcggcggcggatcatacttcgacgccggtcagttcgcggacggcccggcgcccctcgtcgcccagggagagcgaatacgaattgacgaagaagtcgatgtggtggtcgatcacccggtcgtcgagctcccgggcgtgctccttaatataggtgcgggattcctcccggtgtgcgaaagcatattcgatgctcgtgcggagcaaccgttctatttcgcagcgaagctcttccggcagtgtccgtcgggcgacgatggctcccagcggaagcggcaatccggtgcgggattcccacaactctcccaagtcggcgaccagctccaggcccagtttccgatagacgaaacggccttcgtggatcaacaccccggcgtcgtactccccgcgtgccacggcgggtgcgatttccgagaagagcaccggctttttttgcgtgatcgacgggtagaggcggctcatcagggcgttggccgtggtgtgcatcccgggtaccgcgacccggcggatcgaatcgggaggtgttccctgccgtgcgacgaaaaccggtccgttgccgcgtcccaaagccgaaccgctgtccagcagggtgtagcgggactggatttccggcagcagggcgtagctgattttgcttacgtcggtttcgcctgcttcggcacggcggttcagttcttcgatgtcgtagtaggcgacttcgaaggttagctccccgcagtcgatgcgtccgttcacgagtgcgtcgaacatgaaggtatcgttcgggcacggagaaatatgtaggcggatcgtgcgtttcaaaacatcgaatcgattaattgccgttgccttgctgtgtcccgtttttcttgcctccgaagcgtcccagcagccagccgccgccgaaaacggccgcgaggagcagaatcttccacagctggttcgagagccagaaatagatgtttttcgagaagacgacgatcagcacgaaggccacgacgatcagaacgatgtaaataatccactttttattcataatccgaaagtattcgaatgattgtttttgctaatttttctgcactttcctcgatgcgccaggccgaacgcgggtcgtcggtatagttcgacacggcccgcacctcggcgccgggcactccgaatgcccggcagacggccaggaaagcggctccttccatattttcaatttgcgtgccggacgctgcgactcccgtgcggttggtcgtattgctttcgacggtccgcaatcctgccggaatgaagtcggccgcatagcggacggcgtatttcccgggcagttcggcgattcgctcccctgcgaccgcgacgacttcgcatacggctaccgaacggtcggaagctccggcgatgccggccaggatcagtcggtcggggtgttcctccgcgatgatccgggccgtcgctgcggctgcggccgccatgccgactcccgcgatgcggaccggcgcatcgggacatgcggcccgcagcggggccgcctccgtttcggtcgggatgaggatcagcgttcgcattttattaggaggattagcgaccgacgacggcttccagctcatcgaccgtgatggggatgcgcttgtcgcctccgatcatgcgactgcccgtttcggtgacgatgatgtcgtcctcgatgcggatgccgccgaagtcgcggtaggcgtcgagggcgtcgtaatcgacgattcccttgtatttgccctcggctttgcatttgtcgatcagcgccgggatgaagtagatgcccggctcgtcggtcatcaccgtgcccggctcgatgcgccaggtcgaacgctggatgcaggtgcccgacttggcggcctgctccgcgatttcggagaaatcgaagctacgttccccgatggcttcgcagtcgtgcacgtccaggcccatgccgtgtcccagtccgtgaggcatgaagagggtcatggcgccggcagcgacggcatcttccgccgtgccgcgcatcaggcccagcgagatgaggccttcggccaggatgcggtacgaggcgttgtggatatccatgtacggcatgtgaggggcgatcatggcggccacccggtcgtgcgccgccagcacgatgttgtaaatgtctttttgtttctgggtgaacttgccgcttacggggtaagtacgggtgtggtcggaacagtagtagctcaatccctcggctccggcgtcgcacagcagcaggcggccgttttgcagtacgccgtcgctgtgcaggttatgcagcgtttcgccgtgctgcgacacgatcggcgggaacgacacgccccgtccgaatgctttggaaatgccttcgatcgtgccggcgatttcgcgctcgacgatgccgggacggcacatcttcattgccgtagtgtgcatggcgtagccgatgtggaacgatttttcgagctcctcgatctcctcgggacctttcttttcccgcatctcggctacggccatcatcaactcgaccgacttgtgatcgtgcagtgcggccggtttgagtcccagcaggtcggcgagcagcagcttggtttcgcctcggtaagggggcaggtagtggatgcggcgtccctggacgatggctttggtcaggtgcgttttcaggtcggccagcgggaaggtgttcgaaacgcctgcttcggccccttgttcgcgcagcgaaggctgcggccccgtccagatgatgtcttcgaccgtgaagtcgtcgccgtacagcgcaacctctccggagtcggcatcgatcaggccgaccagtgccggggtgttgagtccgaaataatagaggaacgaggagtcctggcggaaataataggcgttgttgaggtagttgttgggtgtgagcatattgcccggaatgaggatcaggccgctgcccatcttgccgcacaaggcgctgcggcgtcggatgtagatttcttttgcaaacatagtcgtatatttttataattttccggcgaaacggttcgttcttcgagaggacgggcccggcttctgtccatccgcgatgccggagcgcacgccgttcgaacctaattttggtaaaggtagtgaaaacgaggacagaatagaacaaattcgttcgttttttatgtcgagtgcatcctatctttctgtaaaggtagtgaaaaaatcggtaattcgtgtcataaaacgactccttgtgacgttttattaaaaacagtgtgtcgaaacggcttcgggaatcagtgccggttttcgcaaatcgcttccgattccgccggaccgaatgggcgacgggacgcagggaacgggttctgcggccggatcgtcagtaaaaatggagcggattttagatgacctattaaaaaaaatactatatttgtcccattggtctgttgtcacgaagaaaatacccgttcgtggcattttaatgtaaatttcaaaattattgaactatgaaaaaaatcttttgtctgacgattttggctgtcctgtgcactttcggcgttgcatcggcacagcagtttcccagtgtgcagatcgaaacccaggatggcaagacgatcgacaccaaaaccctgatcgacggcaagaccccggtcatcatctctttctggtccaccacctgcaagccctgcatcaaggagttagacgccatcagcgagcagatgatcgactggctggacgaagcagacttccgggttgtggctgtttctgtcgatgattcccggtctatttcccgagccaaggctctggcggccagccgtggttggactaccgatttgatggtggcctacgacaagaaccaggacttcaagcgtgcattgaacgtgaatgtaactccccacgtgttcatcttcgacaaggacggcaagatggtgtattcgcacacgagctatctgcccggcggcgagatggagctgattcagaagatcaagaccctgcagtagtcctgtaattccaaattgagcgacgaatgaagcgacttttacgaatcacggtcctgttctccgtaaccttgttgtggtggggcgaaaagggttatgccgcaactccggcgacggacgcagcagagaaagaaacggtttccgcgactgttgaagcggaggcggataagaaggacccgaaatcggataaaaaatccgacgagcccaaacgcaagcggaatttgggtcatttgagcggcagtttcgaaaccaatacgatctactatgtggaggacagcaagaccggtgcggtcgttcctcacaacagttacggttcgaacaacttcctgaagctcgactaccagttggggcgtttttcggccggcgtgcagctcgagtattatccccatccgctggtcgggactccgatgcagggttatgaatatgtgatggaaggtttctcgatcaataacctgactgagaagtatatctcgtggacggaccgcaactactcggtgaccgtcggcgacttttacgaacagttcggcagcgggttgatcctccgtgcttgggaagaccgggctttgggcttcaacaattcgctgggcggtgcacgggtcacgttcaatatcaaggacatcgtggagggtaaggtgctgtatgctttcccgcgtttcaacctgggatacctgtcgacccagattgccggtggcgacctttcattctcgctttcgaatgccatcggcttgctggatcaccggctttcgctcgagggcagcatcgtcaaccggcatttcaagaacctgccttcgtggtacaccgagtatcgggacgattatgatttcgacctttcgaagaacgtaatcagttattcggggcgtgtcaattacgagtacaggggactgtcggccaaattcgagtatgtaggcaaaagcaaggatgtctatctggacaatatgaccggtgaagaggtgttcaagcgcggtgacgcacagttgttcgaaatcggttacaccggcagcaattatgctgtgatggcgcagttccgccgcctgaactacatgcagagccagctttaccggcccgacggcggaagcggtagtttgggcctcctgccgggcaatacgatcaattacattccggccctgagtccgcaacatacctatatactggccggattggatcctaacagtccccagcaaaacggagagatcggcggtcagatcgacgcgttttacacgttcaggcgcggtacggccatcggtggcaagcgcggattgaagatccatgcgaattatgcccgctattattccatcaacgggacgatgagtaaacccggaaccaatttctactaccgggatttctcgttcgacatcgataagagttggaacagcaaactgcgcacggttcttttcgtgtcgttgcagaagaatgcgatgcacggtggggaagacgtcatccgccagaatgttttcgttgcggacgtgacctataagtttacgccgaaattctcgttgcgggccgagcttcaatatctctatgcgcctcatgcggagggttccaaagaggtggatggtgactgggtggccggattgctggaagccagcttcgcccccaagtggagtatcttcgtacaggatatgtacaaccacggcggttcggagatcaactactactcggcgggcgccagcttcacccactcgttcattcgcatcgcattgagttacggacgtaaccgcgcagggtatatctgctcgggcggtgtttgccgcgagatgccggcttatacgggcggtaatctggcgatgacgctgactttctgatcgtgaagattctgatcgtcgaaaattcccgtatgtttgaaaatctaagaaagagaaaaatcaaccaaaattactgaaattatgaaaggacgaactaaatttttcaactatttcatcgcctgcattgcgacgctctctctggcgactttcgcagcgtgcagcgacgatgatccggagactccgtccggcaaattggtgctgaaggcgagcgcttcttcttttgtcgccggtgaaggcaacgtgactttcatggtgacgtatgacggggaggatgtgacctcgcaagcagcgattaccaatgtgacgaccggtgaaccggtggaaaacgctgcgtggaccacgacagagatcggcgagtacaagttccaggctgtttacgacagctatacttcggatcccgttacggtaagcgccatagacaaaaacaaagacaaagagttctatcgctacgtactgctgctcaagtttacgtatatgacgtgcgggaattgtgttacggcacaaggatatttcgatgcgctggatgaagcggaccgtgaccattttctggtcgttgccgcccaccagcctgaaggaatgccaatggatccttattggtgttcggaggggattagtttgaagagtaagatgaaagtaggggtgtagcccacctggtcttataatttcgaagatttggttgtcggtatcggagcgggtgccatttccaaaacttcgatccggcagcagatcagtcatgcggagaaaacctatccggccgtttgcggtgtgaaagcgacctccacgctcgaaggttcgacggctaagatcgaggcgaccgttcagttccagcaggccggtaattacaagatcgcttgcgtgctggttgagaataatattgaaaacaaggagacgtacaatactttcaaccatgttttgcgtgcggcccagaccgatatggagggcgatgccgttacgccggccgtaactgctccggaggagcgtacgttcaacttcgaggcgacgattgaggagggctggaatgccgagaactgtgccttcgtggtttatgtattcaaagaggaggccaatggcaagtatattgtcaataacggtgctgaatgtgctgttgacggttctgtggattacagatatgagttgtaggatataatttgta

SEQ ID NO: 10478 - DNA, 1485 bp, Unknown
  gut microbiota DNA sequence
cttctcccaacagaaagaagagcatacaacatgatgtgcaccccaaagtttggactgattaataattcagatagcatgagttcggtattgtaccgggctcatgttgtttaaagcggtctttattcgcttgttattgtagtaatttatgtattcctccagttccttgcggaaatgatcgacagactcgaacttctgcaaatataataattctgattttaacagtccgaaaaagttttccataaccgcattatccaaacagtttcccttacgagacatgctctgactaatacctttttcacgcagccgatattgatagcgtttcatctggtactgccaaccctgatccgagtgaagtataagttccggagcatcgggcagatcctttatggcatcttcaagcattttcattgtttggtaaaaggtcggatgttcagctatattataacttattatttccctgttatataagtccataataggcgacagataaagcttcttgccgaacagagaaaattcagtaaggtctgtaacccacttttgattaggacgttccgccataaaattacgtttcagcaagtcgggcaccacggcaccaacctctcctttgtatgaacgatatttttttaggcgcacctggcatttaactccacattcgttcattaacctcagtaccgttttatggtttatagaatatccgcgattgtgcatctctactgtgatacggcggtaaccataacgtcccttatgatcgtggtatatacttacaatctcgtttttctcttgtttgtatttatcggggaactttaactgcttcagatgataatagaacgtactacgcgccatccccgtaacttccaatagcgtgggaagggtatgttccggtcttagttcttcgatggcttttgcccgttcccgttctcgcggacgatgcgttcctcgactaagaccctcaatttttttaagtaagcaacctcggcgcgaagacgttggttttcgactcgcaagtcattttcttcctgtggttgtagttcctgtttattaggtttggttctcatcttaccccgattatcacggtaaagaccggattcaccttcttcataatagatacgctcccatttgctcagcgtactctcattgtaaataccgaactttgccgttgtttccgttaaagataagtgattctcgtgcatgtgcctgatagctgacaacttaaaatcgccgctgtaagtatattgccgtatacgaagacctgcttcgccgaactctttataacgcgcaatccaacgcgacaaaggcgtatagcttattccaaaatgcttggaggcggacgatacggaatgttgccctctgacaacagacaaaactgctgttaatttctcctcataactgtacttcataaaacaccccaaaagttatgtccaacttttggggtgcagttcatgatgatcttccccttttcacagaccgcatcagcgctgcgctttc

SEQ ID NO: 10479 - DNA, 149808 bp, Unknown
  gut microbiota DNA sequence
ggataaagaatctttccaccaagagtagtataagggatttggcggttgtcccggtaattctgcaaggagcgtttcgagatgctgaagatgctgcaaatctcctcactggtcaggtacagttcatttccgatggtcgggcggtgcgtgtcgatcagaatatcgacggcacggatggctttgacgatgtcgcggcgcagttccttgaacgcggcgctgtcgcgggtaatgatctcttcggtcatgctacaggctttttatcaggttcttttccagaagttgccggatgtcgtcgtcccggaacaatactttattccccaaggccgtataggggatgatgccggcggagcgatagtattgcaaggctcgcttggtgatgctcaaggccttgcagacctcctcggccgtaagcctccggacagttgtcggttgggcggagagggaatggagcgcagacactcgctccagaagacgttgaaggtgcgcctgcatctctttataggcgctcgtttccataaggacgcaatccataatgctgagggtttaggtgatttctgcgttaaggatgtgcaagataatccaagccttcagaaaacgatccccatgtccgctccagaccgatccagtccgctcaaaggaaaaaatgatcggcggtgacgctgatgtacgccataaatcggaaaatagagagataaaaattctatttgcttttttatcagatattcactatatttgtatagagttgtttgacaggatgaacctcgatgtaagtttattcaagacttgcgtttctaaatcattacctcataaaaaaacaacgccgtaacttattaggttacagcattgttttgtaaatcctcggaaacttttctatgggaagccggtgctttcgtatcggtgtcgtacattccggaattttcggtccgagaatccgtttccgtcaatatcccaggatgcggagcatcgagcggtaggactgttctttggcgaacaggcgggtgtagtattcgttgtcgtccttgtcccggtcgatgatgacgtgtttgggggccggaatcagacagtgctggatgccgccgaagccgccgatcgactcctgataggctcccgtatggaagaagccgatatattgcggattccccggttcgagcttgggcaggaagatcgcgttgatgtgcgattccgagttgtagaaatcttcgctgtcgcaggtcaggccgcccagcagcacacgctggtattctttgtcccagttgttgatcgccagcatgatgtagcgctggttgatgccccacgtatcgggcaaagtcgtgatgaaggagctgtcgatcatgtaccagttctcgcggtcgttctgctgtttctgattgacgatcgagtagagggtcgcgccgctttcgccgacggtaaacgatccgaattcagtgaatatgtgcggttcgtcgattccgttgcgggtacagatgttcttgatctgcgcgatgatctcttcggtcaggtactcgtagtcgtacgagaagtcgagcgagtttttgatcggaaagccgcctccgatgttgaggctgtccagatcggggcaaatggccttcaattcgcagtagatgttcaggcatttcgacagttcgttccagtagtaggccgtgtccttgataccggtattgatgaagaagtgcagcattttgagcttgaacttcttgtttttctggatcttggttttgtagaagttgatgatgtcgttgtagcggatccccaggcgcgaggtgtagaactcgaatttgggctcctcctcgctggcgatccggataccgattttgcattttttggtaatggcatcgtcgtagaggtcgatctcttccttgttgtcgatcacggggatcgtgttttcgaacccgtcgttgatcaactgggcgatattttcgacgtattgcggacgtttgaagccgttgcagatgatatagcggtccttgtcgatcacgccgctgtcgtacagggcgttgatgatgtgaatgtcgtaagccgaggaggtttcgagatgaatgtcgtttttcatcgcctcttccagcacgaacgagaagtgactcgacttggtacagtagcagtagttgtatgtacccttgtaatcgaccttcgccatcgctacgttgaacatgcgcttggcccgattgatctgctgggagatcttcggcaggtaggttatcttgagcggagtgccgtactgcttgattaattccatcaggggaatgtcgtggaagttcaattcgttgtcctcgacggtaaattcatcctgcgggaaatcgaacgtctgttcgatcaggtcgatgtacttgtctttcatggctcgtttgtgttttttgcggtataatccgagcgagctacattgtaaattccggagtaaagtagctcgtgcggattgttttttattttgggatgcaaagtaggtaattattttcgagatcggcaatggtttatccgtatattttgaaaaaacaggtgaattttttcgtttttgtccgatgaaaattgtatttttgggtcgaattttaatcgggacagaacggtgttgactggaatcataacgaattacctgacccagcacaggaggctggtcgtgccgcaactgggaacttttgtcgtgaaggttcccgaaggcggtgtggtcttttcggagttgcttaagcgcgacgacggcatcttgcgcgggttgctggtgcagcagggtggaatgaacgatctggaggctgccggtgcgatcgaccgcttcgtgtttgaagtgcgtcatgccctcgagcatgagggggcctatgcaatcgagggcttcggtcgtctgaccctttcaccgggcggtgcaatcgtctttcaggcggttctggctacgcctgtagctgctgcgggacctgttgtcggggaatcggctccggaggaaggaaataaaatttcctcggccgcagctcttcatcccgcttccgtcgctgcgtctgcggagtccgttgcaccccgtgtgcgatcccgttccgaagcgaaggcttctcctgtaatcgacggcggtatttccgaacctcggatctccgtttctgccaagcgcaaacccgcaccttatgtaaagggattgcaatacggcaaaccgcttaaaaccaccgagggatatacctatgtgggttccaagccccgccggaggatcgataaatttatggtcatcgccatcgtggtcgctgtgttggccgtaggcgtcatcgtttacggttatctacgccgggcgaagatcgagcgtctggagcgcgaatacctcgaacaactcgcacctgccgtgccggagcccgtggctgccggaacggacgggggtgtggagtccgttccggatacgactcaggaatagtttgcctgtattggctgtaaaacaggattgatagagtaggaatgacagatctgacatccataaaaaaccgtttcgggatcatcggtaactccgaggcgctcaaccgtgcgctggaggttgccctgcgtgtggcgccgaccgatctttcggtactcgttacgggtgaaagcggcgtcggcaaggagtttttcccgcaggtgatccatgcctattcggcacgtaaacacaataaatatatcgccgtgaactgcggcgccattcccgaaggaacgatcgattccgaattgttcggacacgagaagggggccttcaccggagcagtcgaagcccgcaagggttatttcgaggaggcggacggcgggacgatctttctggacgaggtggccgagctgcctcattcgacccaggtgcggttgttgcgtgtgttgcagaccggcgagttcatccgcgtcggttcggccaaggtgcagaagaccaacgtgcgcgtggtggcggcgacgaatacgaatttgcaggatgcgatccaggcggggcgtttccgcgaggatctctattaccggctcaatacggtgccgatccaggtgcctcctctgcgggaacggaaggaggatattttcttgcttttccgcaagttcgcggccgatgtagcggcccagtaccgtatgccggctatttctctggaccccgaggcccggcagatgctggagaattactattggcggggcaatatccgtcagttgaaaaatgtcgccgaacagatttcggccatcgaggaggcgcggctcattacgcctgccatcctgacgaagtacctgcccgcacaatctcaaagcggagcatctacgtcgatgagtacggccttgcatagcggtccgggcgacggcgtgtctttcgaacgggagttgctttacaaagtgcttttcgacctgcgggccgacgtcaatgacctgaagcggatgcttaccgagctgatgcagcgtgccgagcgtcctgccgagccgaccaaagacctggcggggttgttgccggcttccgcccacagtatcgcttctccggactatacggagagcgaggaggtggtcgatgaacagccttcgcgggaactgaccaaagccgatgtgctgcgggagcagatccttcgggccctgcggcgcaacaacggccgccgccgggaagccgctgccgagctgtttatgtcggagagaactctttaccgtaaaatcaaggagctcggcatcgacgagaactcctgaaaaatatcgtttataatcgaatgaaagctgtactcaaatatgcgatcgtcgtcgcagcgggcctcttgctggccggttgcgggtacaaggtgaactattcgttgtcgggcgcttcgattccgcccgatgccaagaccttcagtgtggcctacttcccgaacaacgccccgatggtggctccgatcctgagctcgacgctgacggatgccttgcgggacaagtttacgcgccagacgcgtttgacgcaggtggacgaaggcggcgatttcgctttcgaaggcgagatcaccggttatacttcgacgacggcttcggtttcgggttcgtccgaaacggccctgttgaaccgattgaccattaccgtcaatgtgcgcttcaccaatgcggtggacgagagcatgtcgtggaaaaagacgttttcggcgttcgaggatttcgattcttcgaaactgctgaatgaaatcgagggcgaactgattccccaaatcgtcgataaactggtgacggacattttccaggcatcggcggcaaactggtagcggatggcagatttcaaggaatatacgatgtccggaggcacggtaggcccggtcgatgaagcgcagctcgatgcgctcgtcgggcgttacgagtggtttactcccgcccgtatcctgcgcgtgcttcaaaccgggcgttccgaccgtcgggtgtcgatcgcggcggtgtcgcgtctgctgccgctcggacggttcacggtcgatcgggaggcgctttgtgcgctttcgcctgccgacctgatcgaccgtttcctgaaggagggggggcatcggatcgtggccgaggagggcgaagtcgttgaagaggtccgcaccgaggccgaattgagcggtgacgacgacctcgttacggaggatctggcggaaatctacctggcccaagggctttacgacgaagcaatcgccatttatcgcaaattaagtttgttaaatccggaaaaaagtgtttactttgcgtcgcttattgacaaaatcgcaaataaataattaaaacgataggaacatgttatacactctttgtatcattctgattctggttgcaagtattctcatcattctggctgtactcgttcagaatcccaaaagcggcatggctgccaatttcggtgcttcgaaccaggtgatgggcgttcgccagacttcggatttcctggagaaatttacgtggacgatggccgtcgtgatcgtcgtgttgagtctgttggctacgctggctatggatcgcggtctggtggctcgcagcaacgtggaactcgagaaagatgccaatgcgctgatggagaagatgatcgtcgaagatcccgctcctgcggttccgcaggcggaacttccggcttccgatcagcagcctgcgccggccgctgctcctgccgaataagcgggcgattcattccgatataaaaggctgtggatttttccacggccttttttttgcagcttcgaacggtctggttggccataaggtcagaacttcggccgggccggtttttaggcgggaggacaagattcggatacgaagggctgttcgcacggtcgaattttcgataaggttccggttcatagtttgggccgggaggccgggacagggacccgtttgcgatcttgaccgatggaatattcggtgacgacagttgttggaatattcgaaaggttccctgtgcggtgctccggtcctggtctaacgttttcgggtattgtagggcgagccgctgccgggaaattttgccggcggcggctcgcagattagaggggcgtcgtgagttttatcgaaggttttccggccgggtttccggttctgtctctgcgtatccgttcgtccggatcatgtacaggacgtgccgtcgcagaggatgtcccgttggtagtgcggggtggtcgaattcctgtaatcgtgtcataccgagccgttgcatgacccgttgtgagcgcagattgctcaaggcggtgaaagagataatggattccattttcgacaggctggcgtaatgaagacagcttcgggccgcttccgtggcatacccgttgccccacatgtcgctgcgcagtcgccagccgatttccacccggccgtacaacggtccgtcgaacgtgacccggtgaagtcccgtataacccagcagctccccgtccgtgcgacgttcgagggcgtagagtccgaacctttccgtttcgaattcccggcggatgcggtcgaagaaagcggcggattccgggagggagagcggagcgggaaaatactccatcacccgggaatcggcgttcatccgggcgaatgcgggaaaatcttcatcctgccaacagcgcagaataagacggtccgtcggggaggggagcagcatggtatggtgatgtgaagagtgtctaactacccatcgtcgcgtgacggtctttttgccggttggctccgaaatgacgttgtaatagattggccagctgatcgggagcgatgtcgcggtggatcgtcccgccgtgtgcgatcgagatgccgccggtttcttcggaaacgaccagaatgatcgcatccgaaatttcgctcatgccgatcgcggcccggtgacgcgtaccgtaggatttgggaacgtcgctctgcgttacggggaggatgcatttggctgcgacgatgcggtcgccttcgatgacgacggcgccgtcgtgcagcggtgcgttcttgaagaagatattttcgagaagcggcgtcgagattttggcatcgatggcgataccgccttcggtgatgagccgcaggtcgctctggcggccgatcacgatgagcgcacccgttttgtgggcggacatctcccggcaggcctggacgatcggtgcgatgatcgttaccgaggtattgtcgtttcggttgaagatgcgggcgatgaagttgaaccgtttctggcgcatgccgatcatctgcaaaaaccgcctgatttcaggctggaagacgatgataagggcgatgacgccgacgctgacgaactgccccaggatgttggagagcagctccatgttgagcgtgcgtacgacaacccacatcaggtagatcatgatgatcccggagatgatgtagggggcgtttgttccccgggtagcgcggtagatccagaacatgatcgccgctaccaggatgatatctatgaaatcgatgaatgtgaacggaacaaatcccatggtgtatttcgttaaggcaattatatctttcaatgtgtcgctgtccgacggtcgcggcatcgtatccgagaatcgttcgtccgcgatccgtgtccgcgtttgtacttcgctctatctctaaatcttctcctcgacgggaaaatgggtcgctgcgcccaggaggggtactaaaagcatataatcacgttttttaattaaaaacaaaattataaaaaatctctggaataacctcgaaaaacgggagaaatgacgctaaacgacttaatatcagagttgttacggcgtcaaatgatgacaagccgaaaaattggaaaacgcaaagaaaagcggatttaagaagaatggttgcaaagtcattacctcaaaatcgagtaattctcctaaagtcttttgtataaagcactaacagaagttttccagaattacggaaaaatttttttcaaagggagaaaaaacggattgacaaagcctatgaggaaaaggatgagcgcttactgcgaactttggacaaagaaatgatggcaggaatcaacgaatatccgttggaatatcgtcgtatgatctataaacgtattgaggcagcgaccggagaaagtgccgaaaagatcgagaaggcttatttcaagaagttggaaaagattctcaaacgcggggtaataaaggatagagaagaatatgagttggtgcatagtcgcatcgacgaattggtccataatacaccagaagacgacccagcccgaaaagacctcccggagttggaacggatctttatgaattatgccattggagaatagccaaatcgaatcgcccgtaatgctacgggcgattttttatatcgatatttttgtttgtaatttgtctgatccaagaaattcgtattacgttgaataaggaggctgtgcgtccgacgggttttatttggctgattgtcctgtggttgtatgtggtggctgacacagccgcagccgcaacctttgttgctgtcgcccggttttggataaccggctctgtttccggagatattcggcggcgtatttgccttattcggtcctatgggagttttgcatagaatttgtggaatttataaaaatgtgtaacgataatcggatgattatgaaaacaaaaaatgtattgctgggtatggctgcggtttgcggctgcgcttttcaggcgatcgcttgtaccggcatcgcgcttacggctgcggatggcagctatgtacaatcccgcactatcgaatgggcgcgtggcgtcttgcagagcgagtatgtcgtcatcccacgaggtcagcgtctgcgatcttttactccttccggagctgatggcatggttttcacatccaaatacggcgtggtgggattggccgtcgtgcagaaagagttcatcgccgaaggaatcaacgaagcgggactgtcggccggacttttcttctttccgcagtacggaggctatgaacagtacgatccggcgcagagcgaccgcacgctggccgatctgcaactcgtggcctggatactgacgcagttctcgaccatcgaccaggtgaaagcggccatcgcttcggttcgggtcgtcggactggagccctcgtcggtcgtgcattggcgtatcggagagccttccggacggcaggtggtgctggaaatcgtcggcggggtgccgcatttctacgagaacgaagtcggcgtactcaccaatgcccccggtttcgagtggcagctcaccaatctgaacaactatgtgaacctttatcccggtgacgctcctgcccggcggttgagcggcatcacgctgcgtcctatcggcggcaattccggatttctcggtcttccgggcgacgccacgccgccgtcgcgcttcgtgagagcggctttttatcgggcgacggctccgcagcgtgctaccggattcgaaaccgtgcagcaatgttttcacctgctcaacaatttcgatgtgcccatcggcatcgagcatcccgaaggggagtgtccggacatcccgagcgctacgcagtggacttcggccatcgatctgaccaatcgccgggtctattacaaaacggcctataacaatacgatccgctgcatagaccttgcgcagatcgacttcggtaaaagctcctaccagtcccatccgttggaccggatccaggaacagcccgtggaaatggtcgtccttccggagtaggttcggttacacttcgagcatctcttcgacgctgtcttcgtcggtatcgcccagactgaactccttgtcggcgaagaggtcggcaaggcccgtgatttgtttgagccgcagcagttcgtcgcggtccataccgatatgacgcatgatccactggtcggacatgttcgcccgggtcagttcggcgacgatttcgctcatcagttcgacgttgtgcgtgccgcgtgcccggttgtggcggatggtcgaggccatgcggttcgagagatccttttcgatcacggcgacggggagcaggccccgttcgcgttcgtagatccgcttcgaggttttgaggaccaggtagcggtgatagccgtccacgagttcgtagcggtcccgctccgcatcgtagtagcagacgcacggcatcgtgtagccgtcttcccagatcgacagttcgagcagcttcatttcgggcggcgcaaccacgttgggattgtagctgttcgccacgaccttctctaccggcacggcgcggacgttatagaccgggctccggtaggcgctcttcgtttgagattcagagtaacgattcatatttttccatgattttcttgcggcgctgcgtttcgttcttgttcggcgcgaagcccatgtatttgcaggcgtggtcgtttttcaaaatacagatacagatgcgcttgaaggtaggcagatggctgaattcgggcaggcttatgtcgtcgaggtactccatacgtaccggccgcttgtccgtgcgataggcgctgcggtcgccgacttcgatccgaatgccggccttttgcagcttcgtgatggtttcgtcggagaggcatccgcccttgtcgcgccagaagcggatgcttacggagagtttttccagataattgcgtcgtatcggttccggaagggtcgagagcaggaaatgcatgtagctctcccaggtcattccttgcggcaaatgaaccgactgccagcctgcggcggttgtccgaccgtacagcgctgcgaaattggctccgtttacccggcccaccatacggccccatgtgttcggatcgatggctttgtagagatgcaggcttgcgatggccggcgagatgaagggactggcgacacgctggctgtccagcggtacgcctgcgcggtaaaacaggtcgtacagccggttgtacgaccacccgaaccgtccgttcgccgtccatacgtcggttgtcagccagtcgtaaagcggataggcgttgcagatgccgctgccgacccattggcggatccatcgtttgccggcgaaccggtagtggttgcggtcgctgtaaatcgtgcgccagcggttgaagctctcctgcgtgcggatgccgatcagacagcaggtgcgcttcgcaccgctgcgtctgtggagccactcggcgaaacggttctgaaactcgtagtcccacatttcgtcggtgaagaacggaaaatcgtgctgtgtcaggcttccttccggcatttcccgtacccaaatgtcccgcatggagccgtcccacggccgccagtattgctggaacatcgaagtacaggtctgtactttgaacgggatgcagacccgatagacgtcgagaatatcggcgttcgcggccagcgtccggttcacgtagtcgagcgtatcgcggtactggatttcgtaatccatatggaacactccgattcggcgttgcaatccgtgttgccggatgtagtcgatgcagaggttgagcagcacaccgctgtccttgccgccggaaaaggagacgtagatattgtcgaaaaggtcgaaaaccgttttcaaccgttgctgtgtccgctcataaacattcatggctaccggtttttgctgtactccatcgttacgtactgcgtccactctttcatcgggacgaacccttcggagcggaatatctccgcatggcggatcagcgtcatggagcgtatcgtatagtcgcggcggtaatattggattatttcgcgtaaaaagcgcgacagcaaatgcggatcgtcgcccgaaacgtagtagttgttgatcttggccacaccgccgtcggtgatctctacgggtatgaacccgaaaacggtttcgccctcccaggccacgaaccaggtatgcgagcgcgaagtccagaacgggtagttgttgttctggcgcagtacgctgcgccgcatgaccaacggtgcgacgagtgtgtagaggcgaggcgaagttccgtccagtttttcgattgtcatatccgaaaggttataaagtgaccgaatgttatatatttggaaccgaatgtgttaaaaatgcattccagagccacaaatataaaaaataacggtcgttttctcaaatttccgggtctgtacgataatcgatattttactattttattcctgattatatgtcccggtgcaccgatcggctccgatcggtatgccttgacttttctcttcgaatcctttttcgaagaggaggggatggggcacgttgaataatgtgcagggtaccggactatcgccgaaataagcaagaaaacgatcgtggtatatctattatggcggattttttctccacctaagactgttttgtatttgggaatattagcttcgatttatgaaccgtgccgatcacttcggttgatgcgatattcgtttgatgggtgtggataatggactattgttccgcagacaggaagcgacttgccgagctctgtagttcgtgacgggatgatccgccggtagactttcgtaggacaagttttcgccgctttcgtcaccgaaaagagggtctttgtccgtctcttcgaagagtctttttcctttttgttgtaaacataaaagattatttagacgaatcgatgtattccgcccgtgatatatttacaatgagtctgttacttgcggactttgatcgtgccgctctccgtgtcgaaggtgacgaacgaattgctgaacagccgttcgatgtagccgctgcacgccatatccggggtcggaaggtagcgcagcacgggtgggtcgatcagggcgatcgagtcgcagagcgaaagggcgatgtccagttcgtgcgtcgagaagaggatgcacttgcggtggtcgtgtgccagccgtcgcagcagcgtgcagagttcgtaacggttcggcaggtcgaggaacgaggtcggttcgtcgagcaggatgatcggggtgtcctgggccagggcccgggcgatcattacccgctggcattcgccgtcggacatgcggtccatcgtttttccggcgaaagctgccatgccgactagttccagcgagcgttccacgatggctttgtcctgttcctgtacgcgtccgatccagttggtgtagggggctcgtccgagggctacgacatcttcgcaccgtaggttgggaatgcggacccgttccgtggtgacgaagctgacggtggtggccagttgctggggtgagagcgtttccagagagtgtccgtcgagccggatttcgccccccagccgttcgccgaggccggcgatagcccgcagcagggtcgattttcccgtaccgttgcggcctacgagggcgaccagttccccggcgggaatcgtcgccgaggcgtgttgcagcagaatgcggtggccgtaaccgatagtaaggtcgttcagtcggatcatacgatgcttttgttacggatgacgacccagatgacgatggggatgcccaataacgccgtgatcgtgttgatggggaaggtgaggagtttggccagcacgtcgcaaaggagcatcaccacgatacccgtaaggatcgaggccgggaccagaatccggtggtcggcatcggcgaagaggatgcgggcgacgtgcgggacggccaggccgatgaatccgatcgggccgcagaaggcggtgaccgtaccggccagcagggtggtggagaggaagatcaactgccgcgaacggcggatgtcgagtcccatcgtgcgggcgtagttttcgcccagcaggagcaggttcagaggtttgatgaccgcgacggccagcacgagtccgagaacgacagccggaagcagcagcccgagctgtccgagcgtaacgtcgccgagcgatcccatcgtccagacgacgaaagatttgagggcggcttcgttgctcaggtattgcaggatctgcacgacggctccgacacccgacgaaaacatcatgcccaggatgagaatgaccatgatgtctttgatgcggcggctgaccgcagcgatcagcatcaggatcagcgccgagccgatccaggcagcgcccgcaatgccgagggtggaaattagcgggtgtcccgtgaggcccagaagcggagcgcccagcaggaagatcgctacgccgaggctcgcgccggagctgatgcccagcacgtatggtccggccagcggattgcggaagagggtctgcatttgcaggccgctcacggcgagggcggcgccggccagcagagcgactacggctttcagcaggcggatgttcaggataatcttcgttgtgacggggtcgtttccgctgcccgtcagtgcggcgaggacttcgcggatcgggatgggtacggctccgaccgagagatcgacgacgaaaagtaccgccgccagaactccgaacaggagaaagaggatgcgctgccgccgttgcatcggtttagttcagttttcggtaataggtcggttcggcatccgtcaattccgggtggaagatgcggatcagatcttgcagaatcaggtccgggtgtatgacgcccgattcccaatagtcgttgccgcccgagggattggtgcgccggttgttgttatagaccctcccttcccgcacggggcgcgtatccatgaatttggggacgatctccgctagttccttgagcgatgcggcggagccgacgttgatccagcagtcggacatttcggccagccggtatgcctcctccgtgtcgatggggcgcgactgattgcccgtgtcctgggtatagacgtattgtcctcctgcgtcggcgatcagccgggcgacatagctcgaaggcggagccatcagccaggagtcgccgtagggagtgttcagcatgacgacgggttttcgttcggctttcgccgcgagggttttcaggctgtcgtaacggaggggtatttcgcggaacacctcttcgccccgttcgcgcattccggcgatttccgctacggccacgagccattcggccttgcccagcggcgactgttcgaggtactcgcccatataggcgtagggaatacccagttcgcggagcttgggttccatggcgctggcgccgctgacgccgaacagcagcacgatgtccggggagagcgaaagcagccgctcgtagttcatgttgccgtcgtagcccacgtcgccgatctgttccttgtgcgaggcgacgtaggggttgctgatgtagtcgatgcccgatacgccgactacccgctgcggttcgcccagggcgtcgagcatggcgatgtaggtcgaggacatgcagacgatgcgccgggcgtcgccgtcgagtacctgtcccggaaaatccgccggagcctgttcgccgttgcgggcgatgaagagctgcgtttcctcgccttcggctccctgccacggggcgtatgtcttcagtatcgtgcttttcatcccttccgctccgaaaatttcgaagcccgaggagtaggcgggggcgtagaggctgatgtcgaaatccccgagcgaggcggcggatcggtggtgacaggcggttgcggccgcgaggatcgccgacaacaggatataaagtagttttttcattgtcagagtttcgttttcagcccggtcggagtttcgaggggcggtgcaaagttactgttttttattccgttttccccatttagggcggatgtcgaggaaaatctcgtagttcagccggggcatcgggcgcgaaagcaccgactgatactcttcgttgaagaggttgttgatgactcctttaagcgagaggtcggcccagcggaacgagaaggctttttcgagcgaaatgtcgctcatgaagtaaggcttcacacgtccgatcttggtcttcatatcgttgtccgaggtggtgaaacgctcgctgtaatagcaccatttgtaggtgaaccgccacgaacggtaggtcaggtgccccgttaccgaagccgaaaattcggggatgtaaacgagctgtttgccgatcgccttgtcgtaccagtccaccgggtcgccgtggttgatcgagggggtccacgagaagttgccgtcggcgctcaactgccagtctttggccaactgtacgtccagccccgctttcacctccacgccgtaggcatgcacctccttgacgtttttgggcgtccagaatcctttggccgtaggcagccagacgatccagttgtcgatgtaggagtcgaaccaagtggcttcgccccgcagggtgtaaactccgtcgcggcccgtagcgaacgacagaccggcgtcgtaggtgaagccgtgctcctttttcaggtcggggttgccgcccggcaggaagtagaggtcgttcagcgacgggaagcggtagttgcgcgaaatggaggccttggcgacgaggttgccgcgtttcgagatcagatagtcggtgaagaaggccggaatgatcggtgtccactccgagccgaacatctcttcgcgcaggcctatcgaaaggcccaggcgctcggtggggcggtagcggatcgacacgtatcccgacagttcgatgcgtcctttgtcataaccgacgggcactttggttttgttgccgttgggatcggtcggctgctggttatccatcgggataatgtttttgtcgatgcttcgtaccagatgctggtgtgccgaaacggttgccgtgaagagccacttctccccgaggtagtattctccgtccacctggccgaagaaggtgttgatcgtgctgcgcgagcggatcatcttctccatttttccgttgccgagttcccgttcgtagtcgtaggccatccaggtatggatataaccggctttgacgcccactttccactttttgcgcaggtgatcccacgaaaggatgctgcgcagggtttgttcgcgctgttggttcaggtagtcgtcgttctccttgtgatcgaccgacagcatcggaagtccccgcttcgaattgacataccaggcctgcaatccgaaacggtcgccgtgtccggtattgtaatagacttcctgcaacgcgtggaaatcgtggtatgcaccgcttttgttgcgttcgatcgggtagtaggagccgatgatgttgtggtcgtcgtccaggataagcacgtttttatcgtagtttctgtacttgaagtcgtttggcgaggaggaatagacgacgcgtgtcgaagtttgccagcggtcgttgccgtaggtgaggcgcaaaaactcgtcgaaagtcgaaaacgagccgacaccctgcgtgtattgcaggttgaaaccgtccgcatcggcagggcgcgtggagagcttgaccgccccgcccaggccgccgcccgcctcattgaccgaagaggtgccgtgcagcagcgaggcgtcgtcgatgaagtaggaggggatcatcgagaagtccgtcatgcccagcatcggggagttgattcgcataccgttccacgtcacctgcgtatgcgagggcgacgtaccgcggaacgccacggtcgaaagggtggcgcggccgtactgtttgacgaaaatcgacgtgttgaaagtcaggatgtccgccatcgagagtgcgatgttttcatgcaatatcgtagtgtcgagctgggttttctggatgccgatctccttcatcggccgccgtgccgtgacattgacttcgcggatgggaacggcatacgaaggattgccgttccaccactcgctttttttgattttctcctcctgtgcaagcccggtgagcgttgtgaggcacagtacgattgtcaataggtgtttcatcatttggattcggctccggtttcgccgtcgagcatttgttgatatgtagggttatagctgcagtctgtcacgctccaggtctgttcggagagtcggggaaggacctgcgtgaaggtcgagaaatccgttaccgacgagaggttgccgatgcggatcgccccggcagcggtcagggcggagaaatcgagcgttgcgaccgacctgtttttgtaggccgtgtgtccgacgctgatttctcccgcgacgctctgcagggaggggaagcggaacgcgacggcccggtcggtcgatgtgttccaggtggataccagcatgctgccgtttacccgttgcaggctcggcaggatgaattcacccgcgcaacccgaaggcatcgtgtagagggcgtagtcgtctgccggatcatccgaaacgggctctccgttgccgacggtttccagcagcggaaattcgaggacggtgaacgacgaggcacctacgtagaacgagagctgccggccgacgtttttcagccggggaaacgaagccgaattcgcttcgcctgccttgccgcagttgcggcagagaagcgttccccgcacttcgacgagattcggcagcgagagcgtgaacggggcttgcgatccgcaattttcgatcgtgaggtcatcgcagctttccgtcggcaaagagagttcggaaacatgcgtgaatccggcgatccgcagggtatcgaggtttttgaacccggtgattccgaaaggcatcgcttccggttgcggcgtcagcgacgaggcgtcgatccgcagcgagccgccgaaatcgccgccccggagctccgtcagtcgcgtcgcggcgaccagacgcaggtcgagcgtactgttcggagaaaaagtgcatcccgagagatccagtacgccttcgagcgacgacaggtcgtcgatcgacaggtcgcctgaaatggctttgagcgccggaaggaattccccgaaatccttgatcgcggggagcgttgccaggctaacgtcgccgtcgaaacgctccgctttcgggaaggataatgtttcgatggccggacaccccgtaatttcgagcgatccggcgtcggtgagtgccggcagcaggaccgatcgcaaaatagggcagtcggtgacggtgatgttcccggtggtttcgatcagcggaaattcgaacgtattggccagagcgagatgttcgtagcgaagcgctccggcctgggtcagaacaccgaacgtggtgcccagtcccgataaccggtcgaagcgggagagggtaagcgtcccgtcgatgcgttgcagtttcggaaaatacatctgttcgcacggggctttggcttcgtctgcggtcgttccgatcagcgtcatattcccggcaacggtggtcagctcgtcggccgtcagttggagcagggcgtccgactggaggacgaagtgcccggcgacgctttgcagggatttgaaatccgccgtttgcagagccgtgccgtagacgcacaggtcgcctttgatctctttcagggccgggagtgaaagctgcctgagcgtttcgttgggatgggccgcgctgccgatccgcagcgattcgcaggcggtcaggttttccagtccggccaatgtttcacccgtataggcggcggtgatcgtcaggtcgcagcggaccgaaacgaggtttttcaacccgtccagattcgtgacggggttttcttcgtcctcgcctccgatggtgaggttgccttcgacggtgttgattccgctccgggcgaaagcgtccacttcggcctgcgtccgaagtgtcagactgccatcggtcgcaatgtcggtgcgctctaccgtatagaggtaggtgcggtcgttttgattgtcgtaggagctgaccagaaactgccactcctggtcccagtcggcgacagtcgccgggtcggggtagatcgaggcgtgctcgcataattcgtaggatacctgcgcgtcttccaacgatacgttgtaggggatgcttaccgtaatccggccgtcgcggatgacggccgggtaggtgtcggcgccggtagtcagcgaaaacgatactatgtagttgtcgctgccccagggcagttcggtcttctcttcgctgcatgccgtgcacagtagtgcgaggcagcagattatacctgttattttcatattcccgcctatttgccctggttgatgttttcgtccgtaaatccgaatacctccgtggagttctcgcccagccagccggctttggcattgacgccggtctgtacccggatgaagtcgatgtatttgaggttggcgggctgtccgttcttatcgaccgcgttcgagattttgaaatagaccttcatggcgcctgctgcggcattgtcgtcctccgaaagacggtcgttgccgaaattgtcggcgtagccccagtcgtattcgccattgacccagtaggagccgttgcccgactggtcgtaggtgcggctcttcaggcagggaccgtaaagcgtatagctgtccgtgccgatccacgccgggtagtagctgggctggtcgtggtactgtttcaggtagtcgatcttgcccttgacgccctggttgtccttccattgtacgtcggctcccgagtaggtcggccggtaataggtgaccgcgtaatcctgaacggtctcctctttgccgtattccgatcctttgagttcataccattcgtcgtcgggcagggtgttgccgttggtgtcctgcatcacatagacgatacccggttcggacgaacccttgaaggcgttgcccgtgatcgagaagttgtagcctcccttgtatccggacgaggagttgtcgatgctgtggtcgaagcccacgacgatgtagccgccccagccgccgagcgatacccaggtatttttcttcatccgttcttcggcgtaggcgactgccgcttcgggactggtttccgtaccggtgaatccgcccgaaaccagttcgttgatgaactgtcccggggccggcgtatattcgtacacccggtcccacgtcgcgctgctggctcccgaagccgggcggcggtgcgactcttcttcgctgtggcattcgacggtgaactccagcgtagcccgggtttcattggtgcgcgtgatgcacttcgagagggtcatttcgggttcgtcggtggtatccgttacggtgaaaacgatctttttgattcccgtttcggtcggggtataggtgtacgaaagctcggtcccgacctcttgtccgtcgatcgtccaactgaacttggggttggtgccgttccagatgaatggccgcagagtgatcgtgcggtcgagcgatacggtgcgggtcagaccgtcgtatttgcgtccgataggtaccgccgtaaccgataccgccagtgcatcgaccacctccacctcgattgtcatttcgtccgagccgtcctcgttttccgtgcgcagggagacttcgtatgttccggcgatctcctcgcagaattcatagacggcctcatcgccgaccggttcggcttcggcggcacccggacggcgcagcgtccagagaaaagtgctgttctcggccgactgtacggtgggcgcgaattcgtatttgcgtcctttcacgacctccagcccgtcggtctgcatggggaaagagatcaggggcggcagcagctcctgtacctcgacgagaaccgtttcgacggtcgtgccgttcggggtggttacctccaggtcgatgtagtagccgttgacgccttccgaaatttcattgccggaatcgaaccggtaggtgagctgcggttcggtcgagatgattttgcccgtttcttccagtttccatgagtaaacggcccgatcgacgaactggtaggagggcgtaatggtgaactcccggccgaccttgacgggatagacggccgggtcggtgtcgaacgtgatgatcggcacctgttcgacatcggtggtgatgagctcgtccttgttgcaggcgaccgccgtcagagcgagcaatatgaaatagatccgtattttgttcatggatgatgattcttattatatgattagcgccagcagaaggcgccggggatgatcccgacatagaattcgtcgagcagttcgccgtcgggcgaatagcgcagtacgacaccgttctgcacgtaatcgatcgcgtcggcgatatagacttccgaattgacagggttgatcgtcagtccgtagtagagcgtattgttgtagggaaggaatggttttaccggaaacttgtcggccgttaccggcaggcgccagaccgccttgttgatgaagtagagcgtgtcgcgtgtgccgttgagctgcacttcggagggccagtcgccgaatttgaacttgaactgtttctcgatcttgcgggttgcggcgtcgatgcagtagagcgatggcgcctcgtgtccgtagggcgaaccttcgtagccgccgtcggtcaccgtccagatcttgttgtacttgtccatgaccagcgaggtgggctggatgcccacggtgatctggtcgcagaccttgtcggtttcggtgtcgatcaccaggattcggttctggtacgaccagcagttggtgaagacgtatttgtcgtattgcaccatctgttcagtcgaaccggtttcgaaatccatatccgtttcgacatagccggtgatctggtaggtcttgggattgacgatgtagatgcgcggatcccagatttgggtgacgtaggctttttcgtcgctcaggaaatggatgtagcggggcgaagtgaagcccgtgatgcgtcccacctccttgaaggtgttgatgtcgatcgcatagatcacgcccgagttgttcactacgatccaaccgataccgttgcggatgaccatcgactgcgcgacgtcgcccagcttgatggcgttggctctggcgaaaacttcattctcgacatgttttttctccggatcgtaataggagagcgaggcattgccgtacatgaaattcccttcgttggtgatgaagagccccttgccggtcacttcgtcgcccgaacctatgttgtcgatttcgaaatcctctttctctatcggtccgtaatccatgcacgacacggccagcgccgcgcatgcacagattacgattcctcttttcaacccattgaacataagtctatctgtttatccattcgtccgagaaacggtaggcgaaatccacgcctgccggactcgctttcttctggtagaagctcgaaaactccagggcatcgctccgcgatacgtcatagacatggacggcgctctgcgtataggtcgatttgccgacccataactgttcggtcgtcgggtgtacgcccatgtagccgtagatgatgtcgccgcccgaatgatccgcatcgaggtctgccgtgatgtagtcccaattgaccttgccggtttcgtagttgtaacgcatcgcttcataggcgctgaagtcctgtttgccgatgaaatagaggtgcggctgcgtgaagctcgcacacatctgcactgtcggcgaagccgtgcccgtgcgcagttcgatctgttcgggcaggttcgtttccgaaacgacctcgccgttcgcgtccaacgctacgatcatagccggtttggtgaagctcgccgcaccggtcatgcccgagtttccggtaaattcgcccgtaaagatagcataaattttcccatcgtaaccctttgcgaggtctttcacctggcggttttcgtaggtgacggttttgattacggcatccgtcgcgggatcgaggacgatcaccgaattgccgcgtccggcgaagaccttgccgcgcgagaagatcatgcgggccttggtcgcccccgttttcgtgaagacgccgaatgtacccgggatgtcgctcgtacggatgatattggtctgaaggtccacgatacggatgcccgaatgggattcgttgtcggccgtggaatattggatgtaggctttttcgggacttacgaccacgatgtgctgcggccagcagagggtcgattttgaactttgggtggcacccgtagaggtatcgatgtttgcgtagaacggcatgtcgcgtgccacgaggcgtttcatcgtgtgggcatcgcagacgacgaagcgtccgtcgccgttgaatgtagttcccatgctgcttgtcttgccgttttgggtaatgaagtagatcttgccgttggccaggtacatatcctgaaggacgttgccgatttcgttgtcgttgatctcctcgtaaaccttttcatgatagcgcatgtgttggtcgaaatagacgatcgtgccgttctccgaggtcatgttgccctctatgaggacgaacgtgccttcgggatgggtgaagtcgagcacgtagtactcctgcgagaggatcggtttgtcgtcggactggatcgttacggtgttttccaaatccattccgtcggtgtattccgcaggaggagcgatcaggagcgaacgccgtgcgatatcgaaatcggccgtccagcctgccggtgccgatgtcatttcgaccgtgggaatccatcctccggccgtcagtgcatacgcttccgaagcgccgtatttcatacaaacgggttcgtccgaatcctccagcccctgaatttcgaggctgcctccgtcgcgcttggtaatctcggtcgtcaggcggtagatacggcccgcttcgaaattgcgtccggttttggtctcggtatagacgctgccgtcggcgaaggtgtaggttacgtgtatttcctctgcgctgcaatccgccggatagacgaccgctgcggcgaatacgctcgcggtgctgctcgtcgcgggcagttcgacaccctccttgccgaacgaaagcgttacggcgttgttcgcatcggtcgcatcgctgaatccggtgccgtcgaaggtgcgcgtaccggtcagtacggtcgaggcgtcggtcgctgccagcgtgacggaaacgagcttctccttcacgtcctgcgaccaggggttgaaccagacgtaagcggtggcgtgcgagagggtgaatcgtccttcggagtcggtcgtggcatagccgaaatcgccgttcggtccgagttgcagtttgcccggctccgcctggcgttgttcggtcggaacgacggcttcggcgtcggtgccggtcatgttgtaataaatccggtagggtgcagcccccgggaggttcgtgaatccgaagtcggcgacattgccgtccgttcccgcttcggcgctctgtacgccgcctgcccagattcggtcgccggtgctccattgaaattgaatttcggtcccgtcgccaggcacgaattgggtgcggctcgcggtgccggaaatacccgtgagggttacctcccgtccgggttggggaccgacttcgggaagttcctcgatgtccgaggtgcaggccgccaggccgagtcctgcgaggatgtatagtaattttttcatggcgattcgattaaatgcggatgaaaatgcctgcaatccggggaggattgccgacattttcaccgcgcgatcattctattttagtgttagccttccacatcgtatttgaaggcgaatccataagttgaggaggtcaatttaacccacgaagagtcggcgtaggctcccgtaccgccgaccggatcggccgatttcggaaggtggatgatccggttctcagcagggacgtctttgcctgcaacgggactccaatcgccgccgaagggaccggtaccgtagtcgtccttcagggtcggcggggtagttgcccgacagatgatgtcacccagcaaggggcagcctttcgagtagccgacgaaacagtatgcttcgagtgttttcatattcttgcctaacgaaatcttagccagttttggacaatctccgaaggcattctgcccgagtgtttccgtggcatccgggaggatgatctcggtcagctctccgcaattttggaatgcggaattctcgatcgtttttacaccctgaccgaagttgatcgttgtcagcgagcagccgttgaatgcgcttgctccgatcttcgtgacggaattgggcagggttacgtcggtcagtttggtgttctggaacatgtagttgccgatttcggtcacaccctcctcgacagtcacgctgacgagcgatgcgcaggagtcgaaagcgttcgatccatagctgatgcctttcagtagcgttaccgaggtcatgcccgttttttggaaagcggccgaagcggttttcgttacgttctgcgggaatacgatgcctgcgaggttcgcattcgatttgaacgagttagggaaggtttccgattcgtaaacgacttccgagaaatccaccgtagccggagttgcgagtgctttcacggcatccgctacggccttcatctgttctgccgtcatcaccgtattgtcaccggccgtcttgacgtacagcgtagtgaaggtttgcggaatttctgatttccagggatcttcgccggaagcgcggtagtaaaggccttcgctcaggtagtcgggaccgagcgcctccatcgtatagccgctggcggctgtggtccaggaggagtaggcttcgaccgatgctacgtggaacgttttgctgccttgtaccgaagtacccgcgccggagaaactgtcggcctgtaccgcaggggccgtcgtcggttccgcatagacgtctgcgagcagtgcggcgttttcgaaggccttgctgccgatcgaagtcagcgtgttgcccgagatggtcaatttggtcagcttcgaccagtcggagaaagaacccgcaccgatcgtcacgatcgttttcggaatggtcaggttttcgatcgcgtcgttcgttgcgaaggcattgtcgctgatagcggtgaggcctgcaccgaattggagcgtagcgatattggggttgttgctgaaggctccgtcacccagcgtggtaacgttgtcgggcagggcgagtgccgtcaggccgcagtcggcgaaagcacgatcgccgagggttgtcacgccagaacccaatgtcagggtcgccagcttggaacagccttcgaaagcgctcgcgccgattgtctgaaccgaagcgggaatggtgacggtcgtaatagccgtacagccggcgaacatttcggccgggatggtcgttgccgaaccgagggtaatggccgtgagttcggtacagtcgcggaagctcttttcgccgagtgtcgtggcagaaatttttgccgaggtaagaccggtaccggcgaatgcctcggttccgatgttttcgatcgcagataggcttgtttcgacgagtgcgctacaccctttgaacgctttgtcgccgacggttttaacgctcgacggcagggtgagggatgccagcgctgtacatccttcgaacgtgctttcgccgatgatttcgacaccggtcggaacggtcgccttggtcagggccgtgcagcctttgaaggctccggctgcgatcgaggtcgtattttcgaagaatttgatcgtacccagtttcgcattgccggccagtgagacggggaattccgttgcgtcgaatttcgccatgctcaagtcgagcgtcacgggagcggactgtgccgagattttggtgacgagggtattgagttgactggcggtgagggccgcatcgtcgcctacggtgcgtacatacagtgcggtgaacgtcgcaggcagggtcggaacccagtcggcctcgcgcgaagcacggtagtagatgccgtccgtcagttgctggtcgttgatgtcctgcagcgcatatccttgtgaggttacgtccgtccaggccgtttcataggcatcgtaggacgctgccggaacatagaggattttctttccctccaccttgctgccggcgctgccgaaggcggtgcttcccagcgagggcgcattcttggcccggcaggtgatcgtttgcagattgttagccatgatgaacgtattgcgtccgatcgaggtgaccttctcgcccaagtcgatcgaggtgacgttggcgcagttccagaaggcgtagttggcgatctcggggatgtcgatgacgatgcgggtgaaggcgctgcagccgccgaacgagcgctcgtcgagcgatttcagcgtttcggggaaggttacgtcctgcaacttgccgcagttgtagaaggcgtcgttgccgacagtctccagcttggagggcatattgattgtcgtgagggccgaacatgcgttgcacaggttggccggaattgcagtcagtgcatcgggaaactgtatgcgttccagtgatttgcagttcttgaatacggatgattctattgtagtcacgctttccgggatcgtgatctcttcgagtccggtcgcttcgaatgcttcggctccgatgctcttcagtgtcgagggcagggttacatcggtcagagctgtgcaactgtcgaataagaatcgtggaattgcttccacaccttcgggaattacgaccgatgtcagcaatttgcagccgtagaacgcatagatgtccaatgtgcgcaccgaggaaggaagctcgatggattccagtttggcacagttgcggaagcagttctgcccgatggcagtcaggccttccggaaaggttacccgcgtcaggttcttacagccgtagaaagccccggaattgtaggtgctgggagtgaaagtctggatattacggggcagtgcgatctcctgaagattggtcttgcgggtgaagtccatcggaaattcggtcgtggcgaaggtagcttcacccagatcgatgaccgcaccgtttgcgaggttgcctgcaatcgaggtgagttcttcggccgagagggtcgattcgcccagggtaacgactttcaggtagccgatcggctcggtcggcagctcttccgcaacaccggcttcggtcatgaagaatgcgccggagcttttgcagtcggacttggcgatctgtgtcgagaggcgcagcgtgtggcctggggtaagcgttttgcctgatttggtttgcagataaaccgaaccgtcggcgaatttatagacgatcgaaaccgttgccgtcgaaagatcggcggggtagagcaccatggcggcgaacacgtcggtatcgttgctctgcgaaggcagggcgacaccctcttcgccgaacgacagggtgacggacgaagagcctttgcagtcgcccagctttccgtcggcgaaagcggcttcgccggcgatggtctgaccgcccgatacgctcaaggtgatcgagagcagattcgaggtgacgtcgctcgaataggtgtcgaaccaaacgtaggaggtcgcatgctcgagcgtaaaggttccgttttgcgccgtcgcataaccgaagtcaccgttttggcccaggttcaactctccggctgcctgctgtgtctgctcggctggaatcagggctgttgcggctgccgggccggtcaggttgtagaatacgtcgtacgtgtcggccgtttcgagggattcgaaaacgaatgtcgcctggctgccgccttcggcgatggcttcgcttcgggtattgcgtgcccagatgtagtcgccggcgctccagaggaacggaacggctccgtcttcggctccgccgaaaccggtgcgggtgccccggccggagaatccggtcagcacgacctgtgcattttcatcaggggcgggggcgataggttctacgtccgcatctttcgtacatcctgcgaatgcgagcaggaatgtgcataatatgtataagtagtttttcatcggtaattgtctttttattcgttagttccactcttcccagtcgctcgatccggcacctgcgccgccgagaatttcatcggtggcgagtacctgaaccttggctataaccgttgcggtggcacctacggctacgacagatacttcacccgaggtttcggcatatacgttctccttggcgggagcggtgatggtcagtacatcgccttcgagcgaagtgcgccagccgtcgggtttggtgatggcgagggtctcgacccctttctgggtcacggcgaggtcctgcgaagcgccgaatttcagtgtcagcgacgtgcgctcgatgacgaaattcacctccttggctttgggcagaacaatctggtcgccgttggtgagcgtgaaggttacgttgtcagcgtcctgtacgacgcttttgaagaaagagtcgccgtcttcacctttgtctccgtttgcgccgtccttgccgaccgctttgatcggctgtccgtcttcgcctttgatggtttcgccgtcgatctcccaatagccgtccttgttgatggtcggggttttaccgttttggcccgcaaccggaatcttgttcttgtcgtcgtcgagcagccactggtcatcgccgcccagcgtccagtaatagacgccttcgaactgtgcgattccgatgaccggagccgctgcgccgtccttgccgttgtgcagcgtgatggccttgccgtcattgaaagtgatcgtacagcttccgtctgccgcttcggtgtagttggtgatgaatttgttctcgttcagggcgtcgatgatcgtcttgagcgagttgacctgttccttcatcgaagcgatctcctgtttgaggttttcgatctcctggcggatttcggtgtcgtcgtacttgtcgtccgaacagctccaggtcattgctgcgcagcaggcagcgagagctaacagcgtaaagatttttttcatagttcagttgatttattggttgaatattttcgaatctttggaggtgctgaaatgggaaaagcgtccgccggagcagatgggaagttctctccggtgaacgctcaaagcgcagacttgcgacggtcggtggggcgggcgtatgccgcgtccgtcgaaatgtcagccgtaaaatagccgtaggtcatcgatactcctgtcgtttaggttccttcggaacttacacgcgagggtacgtatgaagaaatacatggaaaaatagtgcgcagaagactatcttgcatgatttctacccgaaacccgcgggtgtaaatcctgattgtcaaggcaggtcttctgactcgttccctccgcagcgccttcccagcggtatcgccagtggcaaagagtgtgcggagccgccctttcggggctgaaactcacagcagcaggtactgtcgccgattttcacggcattccctattaatcggcttggaaaagtgattccaagtccgaaccttgcgggtgcaaaggtattgcttttccgggattattcgcaaacgaaatcggaaataaatttcaatgaattctgtaattcattgaaaaacattgctttgccaagtggctatttgcggaagatgaaatagacggccagaatcaggcagacgaaacccgccagatggttccaccgcagggtgtccgatttcatgaagacgacggcgaagaccgtgaagaccagcagggagatgacctcctggatcactttgagttcccagatcgaaaaggggcctcccagttgggagctgccgatgcggttggccgggacctggaaacagtattcgaacagggcgatgccccagctgagcaggatgatggacagcatcccgaagcgttctatcttcgatttgaaagcgatatgcccgtaccaagccaatgtcataaaggtattggaaaggatcagcagggcgatggtggcgagggcacggctcataatagcagagtattgagatcggttatcgaggcgaaatcgtcgatgacgacatcggcttccgtttgggttgcgagcgtatgacggggtagagtcgttgccagggccacgatgcggcctgctccggcccggcgggcagcagtgatgccgacccgggcatcctcgaatacaaggcattcggccgaaggcaggtgcagtccttcggctgccagcaggtatatttccgggtcgggcttgcagcgggtcacccggtcgccgctgacgatgcaggagaagtagtcggtgataccgcagttgctgaggacgaaatcgacgttctcgcggcagcctgaagaaccgacggcgcagcggattccgcgacggcgcagctcttcgagcagttccacgagcccccgtacggggcggatttccggagcatagacttcgcggtagatggcttctttctcctcgccgagcgctttcattcccttttcgcggatgatttcttcgggcaggatcaggcgcatgatgtcgtcgttacccatgccgaaagcggtctggagcttgtgctgccaatcttcgacgccgtaacgctcgcagaatatctcgaatgccttgacgtgtgcctgggtattgtttaccagtacgccgtccatatcgaacaggactccccgtatcattttgttgttttttgagtcgcaaaagtaatcatatttccgggagttgccgccgaaacgaccgggaaattgcagcgtagcacttcgaggcggggccgtagtctaaaatggcgattgtagttttttagtaccctttccgacgatcgcggcatcgaactcgaggtccgtttattgcggcctgtggccgcatccgtaattccgatcctctcctgaatcccctcttcggagaggatttggacgctgcgtacctgaagaggtacctaatatatattcacgcttaaaatttgaggttaagactgaaattgaccgtgaaggtcgggatcgacagtccggggacggcgcggtgatgcgtcagacgccagatgcaatccacgcgcagcaaacggaagatgttttcgatgccgaagccggtttcgaggtaaggatgttcgaccgatgacattcctgccggaaagagcataacggctttcgtattcggaagactgccgtcgttgcgggccgagagagtgccgtaaactcctttgaaaacaaagacttcgcgccagttgagttttttgaggagcggtacgcggcccaacaggaacccgttgaagtggtgttcgtagaagaacgaaatccaggcgtccgacgagaattcgtagaaattcatgcacgagaaggcgtagcggtcgtaaaaataggtgccgtttccttcgtgcagcttcagcagcaggtagggaaccttgccgaagatcttgccgccttcgagcatgagttgcgagtaaccgatcggaggcagattgagccggtattgcatccgcccttcgagccgcaggtagtcgtagctggcgggtaagattcctttttttgcccccgtgaagtcgaaggagaaaatcgggtatttcgaacccatgtgtcggacctcgaacggcatgcggacgatcgtttcgtctttggacagccgcagcccgatccgtatcgaagcgtcgttgatgccatgcagcgaacgcccgttgggtaggatcatcggtacgtagcggttcgaggagatgtgacggccccgcagctcgaacgaactgctgatcccgtgcagccactcgtgttcgtagagggcgatcccttcctcgatagtcgaaagccgcgaggtgccgcctcgggagaagatcgagcttaggatgttgttttccgagagggcgctgacgcccgagctgagctgtatcgcgtcgttgcggtaggtgaccgtcagtttgcgcagcaactgtctgcggaacatcacctctatttccgatgcacccttgaagtcctcgtcccgggtgccgtaggccaggtaggtcgagagccttacgcgccgactgaactctttggtcgtacgtacgcctatctggaagcgggtgccctccagtcggttgaagctgattactttggagtagggacctatgccgacgtatttggtattgtaatagccgccgatgatggtgttgagaaccgtgtaaatgtttttgtagaggggaacctgctggatcgaatcgaccattcggtagatggtcttctccttttgagagagggcgtagggacgcagtgagtcccattcgacccgcttgcccgaaatggcatcgtccgagaggatcacgttggccgacgtacccagaacctgtttggggatcggcgtgtcgaactttacgtcggaataggttacctcgcggctgcccaggaaagcgatcatcttcgaggagtcggatttggtcagcgtaaaatcggcggtcatcttctcccgctgcggaaaccacagcgagtcggccgtcaatcggttgtcggcttcgatcgccaggtggcgaatccagtttacattgactcctttggccatttttacgcgggccgaacgcagcgcatagcttgccgagtcgatattgacctcgccgtcgagtaccggggtggcgacacttttggggtgaaaccggattttgtaggtcttgcgcccttccacgttcgtactgtccaccagaaagtatttgtagaatgagcgtcccgagttggagagggggctggcgaacttcacgccgaacaggtcgatgaagttttcgtaaagattcacgtcggcgtgcaggtgtccggtgaattgtgcgagcatgctgttgtcttcgataccggatatctggctggcgcggatcacctcacgggcgacggtcggcgtgcggctgtggtagtaatccgctgccgtttcggagatcattacgggcaggtagggttgtccggtgacatccgatgtgtcgatgtgctcgaaaatgaaaccgaagttttgctggagttttctgcttcgaaattcccggacattggccaggccgagttccattttcgtataggtgcggcagatgtagcggtcgtattcttcgggatcgttgtattttttgttgcgtacgatgcccgcgagaatcgggtgtgccggattgtcccccggtgtgaccacgacatttccgatttcgaggtgcgtgggattgagccggaaatccacccggttgtcgcttccggccgggatcggacgaatctggggctcgtagctgaccatttctgcccggatgtagctcgacgtgtcgcggctttcgagcgagtagaacccttcgtcgtcggtggtgatgccggtggtcgtacccgggaacaggacgacggcgtagggaatcggctcgcccgtctgtgcgtccgtgaccgtaccgcgcacccgggtgttctgggcggcgcagggggcgtacagaaatagtcccgcaagagcgaggagtatgccgcagagtcgtttcatcgaagcctttccggaatgtcgtttcggattttcctaaaatataaatatacccaaaaatacaaagattttaccggactgtcaaaaattattatttttgccgatccggatggaactactttctgcggaatgaaacatgggaacgtcaaaatagaaaagaccaatgcggcccgtctgctcgaccgagccaaaatcgcctacgaattgatcccgtatcgggtggatgaggagcatctggccgcgactcacgtggccgaacagctcggcgaagatgttgctgcggttttcaagacgctcgtgcttcgtggtgaccggacgggccatttcgtctgtgtcgtccctggagatcacgaggtcgatctgaaagctgccgcccgcatttcgggcaacaagaaagccgatctgattcccgtccgggagttgcttccgacgaccggatacatccggggcggctgttccccgatcgggatgaaaaaaccgttcccgacctttttccatatttccgttttgcaacactccgtcatttatatcagtgcgggagttcggggattgcagatccggatcgctccgcaggatctgcttcgcttcgtcgggggcgaaacggccgaaatcagccgtccgtcgtctgtggcggcggaataagatccgtaattcttttttgctattcgatccctttctgcaggtcggcggaattgtcgtgttgtcgaagcgaccgccggaccggtatttcggaaacgattcgttatttctctttgggtgccggtctggtttcgcccttgagtgccggaagggagatgccgtaccgtaccgccagaatccgaatgaggatcaccgagcaggcggcgatgaactgcgtgggggccgccggcaggtcgagatacatacagagatagtagatcagtccgccgcagatgcaggcgatggcgtagatgtctttgcggaaaataaggggtacttcgttcagcagcacgtcgcgcagcataccgcccgccgcaccggtcagcgtacccatgatgatacccacccacatcggatagccgacggctatgcttttctgaatgccgacgacggtgaaaagtcccagtccgacggcatcgaaaatgaagaaggtgttgttgagccggatcacgtatttgcgcagcccgactacgaacaggaaggcgaatcccgatacgaccaggtaggaaacgttctgcatccagaaagggggcaggcccagcagcaggtcgcgcagcgtaccgccgccgacggccgtgacgaatccgaccacataggctccgaaccagtcgaaatgtttggccgaagcgagccggatgccgctgatggcgaatgcgaaggtaccgacatagtcgagaagggtgatgaaattcatgatgtttcgatttttcggccgcaaaggtagtaattatctcgccggattatcgataacgacgaaataaattcgatagctgcgatcgggctgccgatttctgttttctgttttctgttaccggccgtatgatacggggcggaggcgtttcctgcgggtctttgcggaattttccggcaaggagtgttcgggtttcgttttttttcgtacttttatgcggcgtaaattcggctcggaacgatggttttacttcttcattccggttcattggtttgctttttcatgttacttaaatatttcccactatgaaattttttatcgatacagctaacctggcccagatccgggaagctaacgaaatgggtgtgctcgacggggtgacgaccaatccttcgctgatggccaaggagaacattcgcggtgaggaggcctgccgtcgccattacctcgaaatctgctccatcgtcgatggcgatgtgagcgccgaggtgatcgccaccgatttcgacggtatggtccgcgaaggggaagcgttggcggccttgcacaagaatatcgtggtcaaactcccgtgtacggccgacggtattcgtgccgtgaagtatttcgcgggcaagaatatccgcaccaactgcacgctggtcttttccgtcggtcaggctctgctggcagccaaggccggtgcgacgtatgtgtcgccgttcgtaggccgtctggacgatatttgcgagaacggggtggctctcgtcgccgagatcgtgcgtatgtatcgttactacggttatgatacgcaggtgctggcggcttcgattcggcatacgcagcacatcgtccagtgtgtcgaggcgggggccgacgtggcgacctgcccgcttgcggcgatcaagggtttgctgaaacacccgctgaccgacatcggtttggcgcagttcctggcagaccacgccaaggtgaattcgtagggaggcggcgtttcccgtaatggaaaagcgatgccgatgatcgaaaaatcatcggcatcgtcgtttcgtattcgggccggaatccgatcagatttccagccccatgatatagtcgttcatgtagaatccgcctccgatttcgaaatcgccttcgcgcaatttgcgcatacccatccgttcgtagaattttacggctttgttatggcgatttacgtggagctccatccggcagggagccgggtggagctgtttgatgtgttcgatagccttgcggaagaggaagctccccgcgtgcacaccctggaatcggggcaggatgtagattttttgcaggatgtagaggtcgtctgcttcgggctggacagagagatagccgcagggagtgccgtccttgtaggcgatgtaatatacgtgcccttcggccatctgccgccggaggttttcgggggagtacatccactccatcatgtagtccaactgttcgggcgaaaggatggttttataggtgtcgggaaatgcgacgcaggccatttcgcgtatcagtccgcaatcttcgacggaggcttttctggcagtaaacataaggtgttcgattcggtttcgctcttgcaaatatattgaaagccaggagaaaccgggaacttgttcccggttttctgaggtgcattctatctagaatatgttcaaagatggtgattctggtagtcggagagttctgtttttgtcgcgataatttgtcgggctgtatgagacggatgcctgggcaataacaaattaggccaatattgtagccacaaaatttctatagtccctcctcgacggttttccgtacaggttcctggtactgtttaccttttccgaaacggaagttgattttcaacattactctgttccaggcattttttacataagaagtcccttgtgttctgacgatactgttctcgatggaatggtaatggctttccggattggtgaggaaattgtcgcaggagagttgaaatgcccagtctttgtatttatatctcacacctatcgcagaggataattcactgtcgtatatcatcggaatagacaatcctttacaaggtatcgcaccctgataatatgcggaaaagtttttgtagttgaaagtcagctcatagtacatcggagcctgaaaatgagtcaccctccccaatactttcgaatcgacttttgtataactgaatcctccgcctaatttcaatgccagcaagtcgtttttgaatgggctgagtctcaaatcataatgtacggagtgcacatctgcccagttgtcattaatcggtgagtatgcgatatacggctgttcatactgataatagtagtcgattggattcttgtaatataagtagctgtatgaaacatttatattgagccatttgttatgatatacgacattgaaagtcgtctggttcgcacggccgccgaccagctcgggattcccgtgtacgataatattttgattataaaacgaagtggcttcgctgagttgtcccagtcctggctgcatattggcttggacgaatccggctttcagcataaaagagggtgaaatacgataaccgatatctacccgaggcgcaaagacccattgccaaatatcgttgtcgtttgtttttgttcgtgtccctgttactcccaaagaaaaacgataagtaaaccgaggcccgatctttccggtgatctctccggcaaaataatttttcagaatgctgttagtttcccgggaatagcccgacgtgttgtctattcgatatttgctaatatcatagtaaaaataatctccgaatgaaagcgtcagcttgtcgaaagtcttggtatagagagcttggccgttcatctgatagccgtctccgtccatattaagaaaatcttcaaatacaggcgtatcgtccgataatgcgtattggttcttataggtatcggaaacagaatttatgtaatcgcctcgaagtgttatcattagttcatgccggttgcggaattgcctccagaagtacaggtcgagcgtcggattgaatgagtgggactcgctttccttcactccgtaacggtccgaacctatgccatcctgaataaaggcaagccgggaatcggtctgttgagaatgcttatcataacttgggaaaaagcgggcttgaaatacatattttccggggagttgattcgtgtatttgagactaaattgaggacttaagaagttgttttcactctgccgttcttcctcctgccggaaatccaccccgtcgagcgtatattccatttcatccgaggcatattgatcatcccatgatccgtagcctatgtttgcagtaaatgccaactgatgccgtccccggttgtattgcaggaaaaaactatcgttcaaccagggcgaagtcagatgttggttcagctccacacttccgtatattccgtcttcccgaattttcgtgataatgttgatgactttattgccgttgctgaggccgaatttgatgggcggcagatcgtagtattcgatctttcggacatcttcgggccgcagagtcgtcaattcctgttccgaagaggcgataccgtttaccaagaccgtcacactgccatcggacgcggtgatttgattggtctggcggttgattctgatctgcggaatcttgttggtcagatcgagactcgtgaccgccgccttccggtcttcattggtgatggtatataccgtccggtcgaaatagctggctgtgttgttggccgtgacgaccaccgcatcgatctctgcgacatcttcggacaggacgtaatcccggacgacctccgtcatgcctatcgaaggtttgcgaagaagcaccgtatcgtaaagagtcttgtacccgattgtccgaaccgatagcaggtagcggcccgcacggtgttttccgaaccggtaattgccggccatatcggttatcacgccttccgtgtagcgggtcgtatccggcagttgctggagaatgaccggggcgaaggcgaccggttcgtttttctcggtggtaattttacctttcaggacgatttgcgcctggagcggtgtcgccaggctcgttatgatgatcagaagaagaacggggataagtcgggggtgtctcatagttgcggagtttgaaaagaatataaaatagagtagtgaagacggggcgggaagggagcggattatagttcgcaaccgggggaaggcgtcagttgttccttaatggagggggcattgaaattcactccgacagttacgaaattcaataccccgtcgtaatacggctcttccaggttgtccagtctgtaatattcgatacgctcgatgttgtctgcggtcagatttgtcaaaatagctgcatatccagcctcatccggaataataccgctgaacataagacataccgtggcgccgttttcatcggtcaaataaccatcttcgtaggttatgcccggaatatggctgtaaagatcctcgatcgtccgggcatcgggggcaatctgtttgggacgatacgtttccacgggtcggaaagctacggtatcggcagagcgctcgacaggaatgtagtaatcgatgttgcctattctgccgggaacgtatttgatctcgatctccttgcttctcgttcggatacccggacccgatattttaagctgataggtctgatcggttgcgacgtttccgaaatcataccaaccgttcattgccgtaatagtcccgtattcgggttctccggtcgccggatcgcataaccataccgatgcgaaaggaacgggggtaggtgtttccgatacatacacaaaacctgtgatctcctgctcttgtcctgccgcagaacttatgaagcctgccaaagcgaaaaataataaaacgaatcttttcatagccgttgaatgtttcttaattaaaaataagcattttatcgggaatcagacaaataattttcggataaaatagttgcgaaatcgaagaatggtaattttatttgtgtgatattgaactttttctatatcttatttgaatatatatttacgatggacggagttgcggagcaataaaaatatcgaggtatgacgcgaaattgcattttgaccgttgttttgaacaaaatgcagactttgtaaaaatgaattaaaatcggagaaagaaaaatgcctgatttttttcggctgcagatttcgataggatagggtaaagacaaaggcagccgataatcgatcgattatcggctatttttttgttatcctgctggacctaaaagtgatccagtcggaatcactcaatgagccgtcggagtcttcctgaaaatgccgcttatatgatattacaagctatattttcggatcgtggtttatttcagtctgtttcaatttgtaacttatcttgagcgtacttcataacgtggttatgtaatttttcgtttcttgtggtaggatttgattctattatttccggttataatcttgaaatacattacggaatgttttgccgcgatatttttaaacaatcttgatattgctgcttggaatataaacaggatggttgtataaagtcccaagtggatttttcaagaaggttaccgatcgactcgtttttatggtttgatatattaataaacattattgttgcatagtatgtgtcataagacaacttctagctatgaaaagagataaattgtcgaattgtgtttgcaatatttataattattattaaatttgatcaggaattgtttggtatttacatctttataatttttcaaacttataagcaatacagaatggtcatatatcttacttaaaattatctttctaatatttattgcttatgaaaaacattaaactttttgtaacattcgttgcttctttattttttcttttctcttgcgagaaagaaaaagttgaaacttgtggatttgacacgatcagactcacagagtctttcttgacagaatatgcaaagggagacggagtggacaactatatgatagctcttgcaagtggtccgacagtcttcgatccaacaaatcagcaatggcatactgaaaatgacggatgggtaatgcttattagtctgttcgcagaacctgttgccaatcttggggcgccggaaattcctgaaggaaaatatacgcttggaagtgctccgggtgcgggtgtttggagttctgaagaagatgtcaatcaactatactataccggaaaagacggtgttagcaccttggtaccggtaagcggagagcttacttttgccaaaacggcagatggatacataatgactggaaagtttttggctgctgaccagaaagaatattgcgtaacctataccggaactcttaaattccagccgcaaggagaaacttcggttattgatcagcctgtgaatacaaaattcataggtggacaggcaatatataaaggtccggatccatccttcggcgatttgggctgggtacaacttgaactttatgatgcagagccggatccggagatggggacgattttgggtaatttcttaaaaatcaagatgtttattcctattcagacagaaaaattcacgtccatgccatctggcacttggaaattgaatgcttctgctgatgaaaatacggcagaacctggatatgatagcggagaagaccttcctaccggatcatacgtagtccagacaagttcggacggttcgacaatgaaactcggtatgttgaaccaagggacaataacagtaacggaagaccagcatgttgtaatagatgcttacacaaccgaaggaattagtgtaaaaggaaacttaaacaaacctctcgaaatactggatcttggaggtggggaagtcgatgattctcaatattctactcttacaacagacaaagtaatagatcttagtggcgcagaaacagcgtactttcttgattatgaagattattatgagaacggcacacgaaatgtagtgcttcagatcttggatagtcagtcaatgacaggtatgtttcttgatctggcattgtcgaaagcagataatagatacgatccccttcccaactgtacatgcaccctcgatccgggagataacagggcgtttacgtttgcaggaggaagtatttggcagtcaaatgccgtaggaacctggggattcctcaagcttcaaaccaatggcgagactataatgcctgatttctcagaagcaggaaatgcagccgggggatcgcttaccattaccagaaacggagatgaatatactataacagtaaatttcattgatgacgcagaaactccgcatcgtatcacaggaacttggactggcactctgactccttattcatacacggcatccgtaagtggtttgttagagcaatcgatgaaaccagttaaataatcggacaagggatgttttttatagttagaaagattatataatatttcttattgagataaataaaagagtctttcaggtaggcgaatgaaaggagggtaactaattttttagttaccctccttgtttttacctgtattctgtctctatcgtaattgtgatacttgtgtagataaaaagatagcttcattttataacggctatggattccgattaccaatattcgacaaatgagagcgacttatttataaattcgttacggcttttatagtaacgaattgacagcgattcattttcacagggtgactttttgaggcctttttctgtcgcaggtaggtggaaaacatctttaaaccactggtttaaagatgtttgtcttggtttgtcagagtttttcatttctctgaagtgatctcgctgggatccgtttgtgaactcgatggaatcatcctatgatccgtctggggccttcctgaaaatgccgcttacatattgctataagctatattttcgagaggttggcttctttgattcggcttccacttgttgcttgtttctaacgtaggtcacaacgtggttacacaactctgtcgcttcttgtcatagaacttaataggggtatttcctgttataatcttgaaaaagcgatctaattttcttgcatcaacaattacctttcattaatagtaaatttccgatttgggggcagattttccgggttgggtaaatccatccggcgaaagagggggtggatcggtaattttatatcaaatatccgaaataggtggctctgcttatacgcatcatgccattggtatatcgctctttggattttgccgtgcatggaggtactgcaatcaacctttttcacaagaatatgccccggtattcggttgatatcgatctgcccctcccatacagaatagggaagaaagtctgagggcaataaacaggcactttgaagatctgaaagggtacattgaaaaatccatacccggaatcaggattgtacccaaatataatgtctggaaattacaatgtaaattggatggggctactgtaaaaatagaagtgaacggaccaagaggggcttgataggagaaacggccgacatgatgctttgtgataaagcgcagaaggagttcaatatggcttgtaaggcccggactgtttcttattccttgctatacggaggtaagatggcggctgcactaagccggcagcatccgagagatttatttgactgcaagtatatggaaaaaagtaacgactctgaaacaaagccgttacttttttgtcgagatacggaccccgggtgagcggagcgctcttctatttcttgtccttgtctttcttttccagggcatagagacgattcacctcctgaagcacggcgggcgtgatgtcgagcgtcgaatcggcgtcgagcagggcattggcattgacgatgagtttgtaacgaccatcggcattaaggttctcgatggcgcggtgcagcaggtcctgagcccggttcgagaagacgaaattctcttcgtcgagcgctttggcttccttctgtgccgcagcctggtacgaagctatgcggcgctcgatgttctcctgtgtggattgcgcgtcgttggtggtgataagccccttttggtatttctcctggagctgggctacttcgtactggaagttctgctccttctgtgcccagctcttctgtgccttttcggtcttgtctttcagggcgatgccttctgcattgtaaagatcggactgcgcgagcacggcttcgacctgcacgtatgcgatgtcaccgccgcctacttcccgttgctcggttgcttcggtagctgccgtttcgacgtttttggtgccgcaggcggtaaatcctgccagggcgatcaatgccgcgaagaagagttttttcatgtgttatccgttgttttggttaaaaatatcgctttgaaaggcaaaggtagaaaaaaatctttacttttgtcaagccacattcaaaattagaaactcatgtacgaatatctctccggtaccatttccgaactcgctcccacccatgccgtgttggatgtcggcggagtggggtactttcttcagatatcgttgcagacatattccgaaatcgagcactccgaccgagtgaaactgttcgttcattacgtggttcgggaagacgcccagttgctttacggcttcgcgtcgaaggccgaacgggaactgttccgccacctgataagtgtctccggcgtaggcggcaataccgcccggatgattctctcgacctattcgccgagggagttgcaggggatcatcgctaccgaaaacgccgtccttctcaaaaatgtcaagggattggggctgaaaacggcgcagaagatcatcgtcgagttgagcggcaagatggccggcctgggactgacgggggatactgttacagcccctgtcgccggcggggattacgaggaggcgcttgcggcgctggtcatgctcgggttcgggaaagcggcggcggataaagtcgtaaaaatcgttgctcgggaaaatcccggagcttcggtggaggatctggtccgtatgtcccttaaacgattgtagcatataatcgtacatttctatttcgcaggttactcatatctttcgatgtatctttttttgacggttgcagcatcgaatccgagggtcgcttattcgcggtatgtgtctgcgtctgtaacgcggacctttccctaaatatccttctcgaaaggggcgtggggcgctacgttcccgattaattattacgtttttgtaacggccttcttgtttttgtcgatttaatatttttgaaactttttttatatttttcttaaaatatttggggggggggaaattttttttatattagttttgcgccgaaaagagtaaacgaacccccaaaatgtttatcgtaaaaatggaaggatttgcaggctttgtcggccttatgtttggtcttgttgttttatcggtcatcataaccctggtcgtatgtgccgttaagaggcatcgcagggagtggcttcaggacggacagcgtagagtctgattttgttttgtaaagttattggagctgccggagcgattctttcgctccggcagtcgatttttttgttcggttcgtttccggacgtttcggatggtccgaacattcggaaggtcggactccatatcgttttgtcgtgacgcgggctttcgtgtgcaactccggttctgtgtcgggagcgcaggaaaaccggccgccggaccgtcgggtttctttgccagagagggaaacattgtttttcggggggtggcctgactgcggcgtctgcgttggcagtatccggcctcgcagtcgctgcagcggatttgcaatcacggttcgcggggtgtgtgggcgtggtatcgccgccgtaagcgatgcagtgtatagccgagccgcgatacgttcggggtgtaatcgtcgttttttatccctgtacgaatactaaaatcgcccggtctgccgtattgttaagaagagcactggcgggcgaggcgggcttcggtgtgtggagttgccgggccggggacgcgatgcgaatgattccgggtttccggacttcgggactgtccgagcgatgtcggtcgggaaaacgaagaatgaagcccggtaaattttgcaagtcccgcaggatttgttaaatttgcgcgattgtatgtcgaaaatccgtttccatattttgcttgctgcgctgttggttgtcaccggctgcggcgaggatgacaaggttcttcccgaacagcagcagcagttcgagagtttcctttccggtagccaccagcctcgtctggtgaccgagcaggaggctatgagttcggatgaagatctcgatttttactccacgttcgggcgctggtcgtatcgatatatttaccattattacgattcggaacgtcagacgcgtcctgaagcggagatcggcgatgaggtggatcttgttttctgggtctatctgttcgagaatcgggcaatcactgcgagtacgatgccgatctacaccaatgacagaaagtgggccgaaaaacttcaggagcagggactcgatacgaaatactggagtttcgaaccccgtcccgtccgtgtcggcggcggctctttcgtcgaaggggtcgaattgtcgctgccgggctgccgcgagaaagatacggtcgaagtatatatgacatacaatatggcttacggcgatgcgctgatcaatttcattccggagcagagtccgatcgccgttttttatacgattgattcggttcgtaaataagaaaacaatgaatagtatgggacgttggttgcctgcgatactccttttcggtctgacgacgctctgctcctgcgctgaggagcctgacaatgcttatccggggaatacccagaacaaagctctgaaagcctggatgacgcagaatcgtcccgatctgctggagaattaccaggaggaaggggagtattacgtggatgtcgtttcgctgggcgatctggcggacagtgcgattctggagacggagagctgggtgtggtacgatatcacggggcgggatttgcaggggaatatcagtgtggcccgggattccgtttatgcgcttcagcagggaacttttactccttatacacattacgttccttactatcagttctacggtgagctggcgagcggaacttttaaggaggggacttatctggctatgcggaacccgttgaagctgggtgaaacgtatgccgcgcagaagggatttccccgtgaggtcgaattgcgcgtgggggccgaggtcgtgctgtatatgcctgcgacgatcatatccaccgaagccaatggcgacggaggttacgaggggcagtatgcattgagtgccaaccacccgatgatcgcccggatcaagctggtcggaagatcgagtcagccgattgaaacggagagcgtcgcggtcgatgattttgcggcggcgaacggcggactggacccgacggttcctccgcaggacgacgattccgaaacggcttcggtcaaagccggagagccggccccgtcgtatcgttggaaaatcgccacgtcggaggcgcctcaaatctatgtgaacgagagtttcaatcctgcggacgatgcgaccggacttttcacctattcgaatgtttatgtgggatcgcagcaaaaggcggacgagatcgatcgtaagattaacaaagctttggtcgagcgcttcggtacggacgaaccgggcgaactgatcgatcccgagaagaatgtccgggtctggtacatcgcccgattcctggacgggttcgtacagagtaccaatatcgacgaggtgaaacgaatcgtttacggcgaggtggaatccaccggtacgtacatgagctacactccttcgctgaataaggacaaacagattctggcctggtattacgccttgccgcacttccgctacggaagctggggcgctttgctgaccgtttcgagcaatgcgtacggtgtggtcggcattaccgggacaacccagaccagttcttctacgaattacgccgctacgtacgctatgatgaattattacggcatgatgaacaattactacggtaataattacatgggcaactattacgacgattattatggcagctatatgaacggtctttacggcggttcggtctataatccttactatgtagacaactccacatcgaccagtacgacgatcaccgaggttttgccctatacgccgctgttgatcgaattttatatcgagccggctcaatagtccgttgccggttttgttttctggccgtctgcaggattcctgcgggcggcttcggtttttattctttgggctgcggggcttttcattcccgactcattcccggcattggatttggaacatttcgattgtaagacggattctgtcggtaaattgggtgtaattgacgattttttcaactttttgttccggaaaattttgaaattatcggaaaaggatttaatttagaggaaagaaaaagaggccatctccggtctgccgacaaatgggtgccgaacagggtcggactttgtcggaagcggagaagacgaaaaataaattcaacctaaataattagcagtatgattatcacatttaatgagttgcgtcgtatcaaggacagactgcccagcggcagctcgcaacggattgcagacgaattgggaatctcggtcgattcggttcgtaattatttcggcggacggcaccccgaggcgaaggaaggcgtaggcattcatatcgaacaagggcccgacggcggcgttgtgacgttggacgatacgacgatcctggatgcggcgatgcgtattctgaatgaaaaataggatcggaatccccgattatggtaccccggctccagaggccggggttttctgttgcattccgtatcgtcgtgcggatcgggggcaggcaggctgcgaaatgacagcgatgtccgaaagggagtttcgggctgacattgtgacagtcggaatgtcagtccttccggcggtttgtcagattttacgctccggaaaagcaggatggtgcgaaaagaacatttggtacaacctttgttcactaaacgatcgtccgcacggcagcggcagggctgtggaggcggagttgaaaaagaaattattaaactataaagcaacgatattatggcaaagattattggtattgatttaggtacgacgaactcgtgcgtcgcagtaatggagggtaacgaacctatcgtaatccccaattccgaaggacaccggactactccttcgatcgtcgcgttcaccgacaacggcgagcgtaaggtcggcgatccggccaaacgtcaggcgattacgaaccccaagcgtacgatcttctcgatcaaacgttttatgggcgaaacttacgatcaggtggcacaagaggtcgagcgtgcgccttataaggtggttcgcggcgataacaatacgccgcgtgtggatatcgacggccgccagtattcgccgcaggagatttcggcgatcattttacagaaaatgaagaagacggccgaggattacctggggcaggaggtttcggaagcggtaatcaccgttccggcctatttctccgattcgcagcgtcaggctacgaaggaggccggtgagatcgcgggcctgaaggtgcggcgtatcatcaacgagccgacggccgctgcgctggcttacggtctggataagaaaggcaaggatatgaaggtcgccgtcttcgacttgggcggcggtacgttcgatatttcgatcctggagctgggcgacggcgtgttcgaagtgaaatcgaccaacggcgatacgcacctgggcggcgatgatttcgaccatgtgctgatcgattatatggccgaggcattcaaagccgagcacaacgtggatctgcgcaaggacccgatggccatgcagcgtctgaaggaagctgccgagaaggcgaagatcgaactgtcgtcctcgactactacggagatcaaccttccgtacatcatgccgatcgacggcattccgcagcacctggttatgacgcttacgcgtgccaaattcgaacagttgtgcgatcacttgatccacaagaccatcgagccttgcaaggtggccctgcgcgatgccggtctcgatgccaagcagatcgacgaggtgatcctcgtgggcggttcgacccgtattcccgcgatccagaaggtcgtcgaggatttcttcggcaaggtgcccagcaagggtgtgaaccccgatgaggtcgttgccatcggcgctgcgatccagggcggtgtcctgaccggtgaggtgaaggacgtgctgctgctcgacgttactccgctgtcgttgggtatcgagacgctgggcggcgtgatgaccaagttgatcgaggccaacacgacgatcccgacccggaagagcgaggtcttctcgacggcggccgacaaccagccttcggtggagatcaacgtctgccagggtgagcgtccgctggcccgcgacaacaagtcgatcggccgcttccacttggacggcattccggctgctccgcgcggtgtgccgcagatcgaggtaaccttcgatatcgacgccaacggcatcctgaacgtatcggctaaagataagggtacgggtaaggagcagaagatccgcatcgaggcttcgtcgggtcttaccgagcaggagatccagcgtatgcgcgacgaagccaaggctaacgaggcgaaggacaaagaggagaaggagcgtattgacaagatcaacgccgccgattcgaacatcttcgctaccgagaaacagctcaaagagtacggcgacaagttgccggccgacaagaaggctgccatcgaaacggcgctgggcaagttgaaggaagcgcataagaacgctgacgtagccgctatcgatacggctttggccgagctcaatgcagcatggcaggctgcttcgcaggatatctatgccgcgcaacagcagcagggcggtgcccagcagggtgctccccatgccgatgcaggagccggtacgaacggtcagcagcagggtggatccaatcagcccgaagatgtagagttcgaagaggttaaataaaaagttggagggaaggttcggtttgcggactttccggtagaagagccagggtcggcagtatgtcggccctggcttttttgtctgtagggcggattgcgggctgcggtttcggggaacaggtgcttcgataccgcttttcagcgcccttgttgccggtcgggacggtcggactccttcggtgttttcccgcgcgtccggtgtgcggtctttgctgtcggggtgccgcccggaaatgaaatcgcactccttcgattttcggtttcaacggtgaaatcggatggtttccagcgtttttttgtctattccttttttgtttcccgcaattttttctatttttgtgcgtttattgggatttctgaaatcccgtttcgggtaacggaaaagaaacaaacaaattataacaaactaatttatacccaatgcaaagtaaaggcgtaatcaagttacttgcaatcctgctggcgattgcttgtatctaccagctctccttctcactgaaagcgagaagcgtggagaaaaaggcggccgagtatgccgcgaaagtttcggagtcggattcgctccgtcaggcggcggagatctattacctggactccgtgcagaacaggcccgtttatgatctcggattcatttcattcacctacaaggaggtcaaggagaaggagatcaacttgggtctcgacctgaagggcggtatgaatgtcatgctcgaggtgcaggtggaggacgtgctgaaagccctggcaggtgacagcgcacacgatccgatgttcgaggaggccatcgcccgtgccaacaaggcgcttaaagagggtaccaacaactacatcggcgagttcgccaaggcttatcgtgaggtttccggcggtgctccgctggctgcgcttttcgtaagtccggatcgtaaggatatcacgccgaacagctcggacagcgaggtcgagaagatcttgcaggaggaaaccgacgctgcgatcgacgcttcgttcaacatcctgcgcagtcgtatcgaccatttcggcgttacgcagcccaacatccagcgcctgcccaattcgcaccgtattctggtcgagctgccgggcgtgaaggagccggagcgcgtacgcaagctgttgcagggtaccgcttcgctcgagttctggacgacttataataacaccgagttggtgcgtgccctggagcaggccgatcagcttttgcgcgacgaattggctgccggggcgaccgatgcggccgtggaggaaacgcttactgaggagcagccgactgctgccggtaccgaagatacgaccgaaagcctgatcgcagaggtgcagaacaatgctccggctgcggaggaggctgcctcggcttcgggggcatcccgctatacccgcgaggaaaatccgctcttctcgctgctcaatccctatgatggcggaggcgctgtcgtgggttccgtagccgttgccgatacggcgaccgttgccggctacctgcgtatggatgccgtgcgcgagttgctgccttcggacgttcgtttcgagtggggtatcaagggcgaaccgcagaacaacgggcgtttctctctttatgcgctcaaggtcagcacgcccgacggcaaggctccgctggacggcagcgtgatcgtggatgcgcgtgaaacctatgccgagcgcggtgccgaagccaaggtttcgatgtcgatgaactcggaaggtattcaggactgggcgcgtctgacgggcgacaatatcggccgctgcatcgccatcgtgctcgacggttatgtctattccgctccggtcgttcgccagaagatcgaaggcggaagttcggaaatctcgggtaacttcaccattcaggaggcgaaagacctcgccaacgtgctcaagtcgggtaaggtgcccgctccggcacgtattattcaggataccgtcgtaggtccgtcgctggggcaggagtcgatcaatgcgggtattctttcgtttgtactcgcgttcgtgctggtgcttctctatatgggcctctactataagacagccggctggttgtccgatatcgccttgttgtgcaacgtattcctgctgctcggtgttctggtttcgttcggtgccgtgctgacgctgcccggtatcgcgggtatcgtgctgacgatgggtatggccgtggatgccaacgtgattatttacgaacgcatcaaggaggagcttcgcggcggtaagggtttgagcctggctatcaaggacggtttctcgaaagcatactccgcgatcatcgacggtaaccttaccacgatcatcaccggtatcgttctgttcatcttcggaaacggtccggtgcagggtttcgccactacgttgattatcggtattctgacctcgctcttctgttcgatcttcattacccgcctgctgatcgagggcgtagtcaataaatggggaaagatctccttctcgcgcaagtggtcggagaatcttatgggcaacgctcatttcgacttcctgggcaagagtaagatctcttacatcgttatgatcgtcgttttggccgtttcgtgcgtttcgttcgcggtacgcggtctgaacatgggtgctgagttcaccggcggccgtgcatacgtgattcgtttcgaccgcccggtacaggcagaggaggtacgtatgaagttgcaggatgtcttctccggttacgaggatgccgctaatgtcagcttcgaggtgaagcagtacggcaatgagaaccagatgcgtatcgtgacgcagtacaagtacgacgacacttcggacgaggctacttcggaagtggatcggattctgtacgacgcgctgcacggtctgtacggttatcccatcaccttcgagaatttccgcaatacgcaaaacgatatcaacggtattcttacggcagacaagatcggtccttcgatcgccaaggatatgacttggggcgctatttggtcggtgctcttctcgctgatcgccatcggcctctacatttcgctccgcttcaagaaatggcagtatgcgaccggcgctacgaccgcgctggcattcaatgccctggtggtgatcggcgtcttctcgctctgctacggctggctgcccttcaacctggaggtgaaccaggccttcatcgcggcgatcctgacgatcatcggttatacgatcaacgatacggtggtggttttcgaccgtatccgtgaatatctggtgctctatcccaagcgcgatctgcgcgagaacgtgaacaatgcgctcaatgcgaccctgtcgcgtacgatcaatacgtcgggtacgacattggttactctgctcgccatcctcttcttcggcggcgagacgattcgcgggtttatcttcgcattggctttgggtgtggttgtcggtacgctttcgaccctgtttgtggcgactccgatcgcttacggtctgatgaagcgcgagggcctcggcaagaaataaaggtccgctttttgaataaaataggctgcaacgtattgttgcggcctattttatttttaactttgcctgacttaaaaattgtctgtcatggagcgtttcggttggttgcgtcgttatatatctccggtctttctggccctgctcgtcgcgtcgttcattctctggtatatcgccaagttgaactatacctatacgaccgagcagcctttcaccgtgaatgtggacggcgagcgtttcaaagtttcctgtgtggtggaaggagtcggtaccaacttgttcggctatcgagtctatatgagtaagcggctccggattcccctgtcggagttgaaattccgttccgtgaaggccgaagacggagagaaattcctgaagatagattctctctctctgcacaacgccatttccgtccggttgagcgatatcaaggtcatctccgtcggatcggttcccgaaattccggatccccgtcagcaagaaaaatgattaaggtaggtataacaggaggtatcggcagcggtaaatcgaccgtctgccggctttttgccgcttgcggcgcccctgtctatgattccgatacgcaggccaaacgccttatggaggaggatgggccgttacggaggcggctcgccgcacgcttcggggaggagatctatgcgggcggacgtctgaatcgcaagttgctggccggccgtgtcttttccgatcctgcggagctttcggcgctcaacgcgctggtgcaccccgccgtgatggaggatttcgaacggtggtgcgggcggcagtccggcgccgactatgtggttttggagagcgccatccttttcgaggccggattggaggggtatgtggaccgtacgatcgcggtcacggctcctatcgacgtgcgtattgcacgcacctgcctgcgtgacggggcttcggccgaggaggtacgacgccgtatcgcggtccagctcgacgaagaggagttgcgccggcgggccgactatacccttgtcaatataaatctcggggagctcgaatacgaggttgcccgcctggataaattgttacgcgatgaaaaccgaaaacattctgcctgatttgaccacgccgcgcgttatggcgatcgtcaatgtcacgcccgactcctttttcgccggcagccgcacaccggatgccgaggctatcgaacggcgtgtccgcgaagcggccgatgccggttgcgatctgttcgacgtcggaggctactcctcccgggccggagccgccgaggtgacgtccgaggaggagtggcgtcgtgtggaagcgggggtggccgccgtgcggcggatcgctcccacactgcccgtttcggtcgatacgttccgtgccgaggtagcccggcgggtgctcgaaacattcggcccggtgatcgtcaatgacatctcggccggagagatggatccggccatcgtcgatgtggtcgccgagtacgacgctccctatatcgctatgcacatgcggggtactcctgcgacgatgcaggggatgacctcttaccgcgatgtggtggaggaggtcgtttcctatttccggctccgtgccgagcagttgcgtcgctgcggcgtgcgtcggttgattctcgatccgggcttcgggttcgccaaaaccctcgaacagaactacgatctgcttcgggggctgcacaacctttgctcgctgggctatcccgtactggccggagtgtcgcgcaagtccatgatctataaagtgctcgatacgacgcccgaccgggcgctcgccgggacgatcgctctgggctgggagtgcctgcggcagggggctgcgattctgcgcgtgcacgacgtgcgggaagcggtcgatacggtacgtattttcaaagcattccgcccatgataaaagctacggatatccataagagttacggtgcgctggaggtgctccggggagtatcgctcgaggtgtcgcgcggcgaggtggtttcgatcgtcggtgccagcggcgccggcaagacgaccttgcttcagatactgggtacgctttccaaagcggatcgcggcagcgtcgagatcgacggacaggatgtttcatcgctcggtgatcgggctttgtcgcggttccgtaacgagaagatcggattcgttttccagttccaccacctgctgcccgaatttacggctttcgagaatgtctgtatccctggcctgatcggacggcgtccgaaagccgaagtggagcggcgtgccggagagctgctggcgctcgtggggctgacccaacgccgcgatcataagcccggcgagctgtcgggcggcgagcagcagcgggtcgccattgcccgggcgctggtgaattctcccgccgtgctgttggccgacgaaccttcgggcaacctcgatacccgcaacaaggaggaggtgcaccgcctgttcttcgatctgcgtgaacgcttggggcagacgatcgtgctggtgactcacgacgagtcgctggctctccgggccgaccgtcggatcgtaatgagcgacggtctgatccttcctgagtgacgggagtgactgttctgaaattagtagatcccatttacacgattcttatggagttcgaaccgctgcgcgagttgctcgaaaccctgtacgaccgctacaaccggacggagttcatcgctcccgatccgatcagcgtgccgcatcgtttcgaggggcgtgaagaccgtgaaatcgcgggctttctctcggcgactatcgcctggggcaaccgtcgtgcgatcgtcggcaatgcctgccggatgatgtcgtatatggacaacgcccctgcggatttcgtgaaaaatgcttcggaggaggagcttcgcaagctgacagtctgcgtgcatcggaccttcaacggcgaggacctgatcgcttatgtacgggcgctgcgttcgcttttccgtcgttacggcagtctgggcgagttcttcgaggggcgttatgcggccacggggtcgatcccgtccgttctctccgattttcgccgcgagtttttcgccgagccgcacccgatccgttcggagaagcacctttcgtcgatcgacaaaggctcggcttgcaagcggctgaatatgtttctgcgctggatggtgcgccgcgatgatcggggcgtggatttcgggctctggcgctcgatccccatgtcggcgctctatctgccgctcgaccttcattcgggcgacgtggcacggactttgggattgcttgtccggcggcagaacgactggcgggccgtcgaggaggttaccgccgtgcttcgcacgttcgacccggaggatcccgtgcgttatgatttcgcgctgttcggcgccggtatggacggttttctaaaaggatagccatgttccggttcaaacagtttgccgtgcggcaggatcgctgcccgatgaaggtcggaaccgacggggtgctgctcggtgcctgggccgaagtgcgtcccggggatcggcggatgctcgacgtaggtacgggcacgggcctgatcgccctgatgctggcccagcggagtgcagcccggatcacggcggtggacgtcgatgcggagtgcgcgacgcaggcggctgaaaattttgccgcgtcgccctgggcagaccgtttggatgcagtagccgtcgcggtgcagcgatacgatccggttgaaagattcgatctgatcgtgtcgaatccgccttattacgtcgattcgctgctttcgcccgatgaagggcgcaacaccgcccgccatgcggcgggattgccgttcggggagcttgcggcggccgtcgttcggctgcttgcgcccggcggacgctttgcattggtgttgccacccgtcgagatgcagcgatttcgttcggcggctctcgggcggctctatcccgttcgctggacggaggtttattctacgccccggcgcggggtgcggcgtatccttgcggagttctgcacgacgcccgtaccgccgccggaaccttcgcggctcgtgatcgaactcggcggctcggactcctatacggaggattaccgccgtctgacgggggatttctaccttaaattttgattatacgggcaattcgtataaatttgcataaattaaaattttccgtgaatatgaagagaatgttatggatgcttccgctgcttttcgccgggatgacgactgcggcccagaatcaggatatggtccgattgggaacctatatggacaacggcgagttcgtggtcggaacggccgaaaccgttcttgcggccgatattacggtgcgttgtgagaagatcgtctgcggtccctatgcccgctatgcccagaagttcctcggtctgcgtgcaccgcttaccgacaagaccgtctatacggtcgccgatgccgccattgcgctgatgccgggcgagcgatacgtgaccgccggggaattgcccgcttcgacctgtcgggtggagagttacgaggcccagggggccgatttcgcccggttgcagaccgaccgcctcgacatgaccgaaaccgatctgcaaaccgctgcccggaatgccgctgccgcgattttttcgctgcgtaaacaccgtcttgacctgattagcggcgaggctggagagaatgtcttcggtgcgggacttcctgcggcgttggagcgtctcgaccggctggagcaggagtatttggagctcttcctcggccgacgtgtagtgacaaccgaaacccaccgtttccgcgtgacgcccgccgagggtaaattgcagcagatcgtctgccgtttcagccccgatgcggggttgttgccggccaacgacctgacgggagatatcgtcctgttgcagtacgagccgcagggtatggctgtcgatgaagccggtgtgcgtcccacttcctctacgattccgtaccgtattgccgctctcacgcgctgttcgctcatcgctgccgggcaggagcaggccgcgcaggtgctgcccgttttccagttcggccgtacgatagcccttcaggttcccagaaaccgctaaaccaatggattatacgtcgcggatggctgccctgctggggcgttttcgccgggagcggaacggcgtggtggccgatacgatgcagtattgggggaaagcgtatggactgaattacggtgtgagcttgccgacgatccgtgctgtcgcgcgagccgagcggcccgattccgattttgcccgtttcctctaccggcaggatgtgcgggagctgaaattggccgctttctggatcgccgatcccgtgcaggtgacttccgtcgaattttccgactggggcgaaggtattgccaattcggagatggccgaagagtgtgccttcgcgctgatgtcccggtcgccgcgcggcgacgagtggggcagagcctggtgcgacacggggaacgaattgctcgggtatgccggcttgttggctctttcccgcattccgcatcccgatttcagttccttggtcccggtgctccggaggttggttgtgacgtatcccgaatcgaatttggtcgcgcagggtgtcgtggcgctgctggcggcgatcatgacgaatcccgccgtgcaacggcgggacatcgaaatattcctctcttcgctcgggccgggaaaaacggcccgttacatcggggaggagatgacctggcggctggagtactaattcaggcagacgtgttcgactgtttcgacctgttcctgaagcgccagcaattcctgataggtcagcgggccttcgcagcgccggatttcatcccctttgcggaagtagatcagcgtcggtgtcgtgcggatcatataacggtagagcaggtaggcattttcgtccgcatcggtgttgatccggtagatgtccacgcgtccggccatgcggcgttcgaattggtcgagcgcaggctccatggcttcgcacggaacgcagcggctggtgaaaaaatagatcatcgtgatcgcgttgcgacctattatcttatcgaaatctttcatatttaagcggtattttttgtttttgccgatctttgaatccttttcgaatgacagatcccgcatctgtttctcgaaggattcttccttttcgatagaagtaccaaaaatagtgccccgatgataactcatcggggcttctcgtgcaagttttcaaaagataccgggaattcagcctatccttccgcgaacagggcacgcggcagttggtcgatgctgttgatcgtgacgatttcgatacctttgggttttttgatcgaacggcccaggtagcccgatacgacgatccgtctgaacccgagccgggcagcttcgctgatacgctgttccgtacggggggcggggcgcacttcgcccgacaagccgatttctcccgccaggcagatcccttcgccgatcggacgatcgtagtaggaggagatcaccgctgccgtgaccgcgaggtccagtcccggatcggcgaccttgaatccgccggcgaagttgaggaatacgtccttcgagaacatcttcattcccacgcgtttttcgagcacggcgagcagcatgttcatacgtttgttgtcgtaaccggtcgccgtgcgctgcggagtgccgtaggccgcgttgctcaccagtgcctgcacttcgatcaggtaggggcggatgccgtccaccgaagctcctacggcgatgccgctgagcggggtttcgtagtgcgaaagcaggatttccgacggattgtccacctcgcgcaaccctgcgtcgagcatctcgaaaacgccgatttcgaacgtagctccgaaacggttcttgattcctcgcagaatacggtatatcaggttgttgtccccttcgaactgaagtacgacatcgacgatgtgctccaggattttcgggccggcgatcgtgccgtccttggtgatgtgaccgatgatgaagatcgatgttccggtcgctttggcgtatttgagcagcgatgccgcacattcgcggatctgcgaaacgctcccggccgacgattcgatgatgtcggtatagatggtttggatagagtctatgaccaccaggtcgggccgttgctcttcgatctgggccagaatattttccaacagagtttcggcatagatcagacacccttcgttgccgatgcccagacgcagggcccgcatcttgatctgctcggccgactcttcgcccgaaacatagagggttttcaggccgttgtccgccagggcgatttgcaggctgagggtcgatttgccgatacccggctcgccgccgagcagcacgagggagccgggcacaagccctccgcccaacacgcggttcacctcccggtttcccaggtcgatgcggcggtgttcgctttcgtggatgtcggcgattcgctgcggacgggctttgggcaggttggcgacagtcgtaggtccgccgccgctttcacgggcgatcacctcctcggtgaaagtgttccattccccgcaggaggggcagcgtcccaaccatttgggggcttcgaagccgcagttgcggcagaagaatgctttcttgacctttgccatatcgtatcgtttttccggggagtgccgatgctgccgcgacgggcatccgcattccttgttataatcccatttcctcgtcgatcagaatcacggtaatccgcttgcggggaaagcagcgctccatccgcagatgcgtgttgcagatgcgcccttccgagtcgcagtcggcgcaaacgcctgtcgctgcacaaggggttttctgtcccagccgggcgacgttccggggtgccgcgatgtcgcggatgcgtgcctcggccgcagcgcgtgtcgccacgatcttgttacgccctgcgaccagcagcaccttgcgggggccgaaggcgatcgccgctacccggttgccgatcccgtcgagccaatagagcgccccctcttccgtgatggcattgattcccgaaatgtacagatcggccagcaaaccctgtcgccggatctcgatccgttcttcgggaggtaaggtgtaatccactccgtcgaacaggcggtaacgcccctcccggcgaagctcatcgacgatgcccgtcgcctccatcgtcatggagcctccgaaagagatcgtttccggggcggcggcccgaatctcctcccgcaggatctgccgggcctcttcggtcgttgcggcgatccggacttcgaatcctctgcggaggaggttcttgcggcactgttcgaatgtttcgttcatatcgtcagtagaaaatcgtaatcttcggtttcgttctcttcaggggcctttacaagccgaggtcttcgtcgatcaacactacggtaatccgcttgcggggaaaacagcgttccatccgcaggtgcgtgttgcagatacggtcttccgagtagcagtcggcgcagacacccgttacggcgcagggcgtgcggaatcccggatgccgggctatgttctgcggggccgcgatggtgcggatccgttcttcggccgcttcgcgggtcggtgtaatcttgttgcgtcccacgaccagcagtactttgcgcggcccgaaggcgatcggggcgatgcggttgccgatcatgtcgagccacagcagggcaccgtcttccgtgacggcgtttataccggtaatgaagagatcggccagcaagccctggcgccggatttccagcttctgcggccgaggcatcgcagggtcgaaaccgtcgaacaggcggtagtggccgtcccgatgcaggtcatcgacgatacccgtggctttcatcgtcatcgaatccccgaaacagatcgtttccggggcggcggcccgaatttcttcccacagaatttgccgggcctcttcggtcgttgcggcgatccgggcttcgaatccgcgccggacgagattccggcggcagcgttccaatgtttcgttcatggcggcgttatttgatgaagaatcggtaaatgtcgtttccgttggcatagaccagcagcgccagaataatcatcaggccgacgtattgggccacctcgaggaacttttcgctcggcttgcggcgcgtgatgatctcccacagggtgaacagggcgtgtccgccgtccagtcccgggatcgggagcaggttcatcaccgcgaggatgatggacaggaaggcggtcttgagccagaagtcatgccagtcccagctaccggggaagatgctgccgatagccacgaatccgcccagttcctcgtacattttggttttgggctgcacgatcagcttcagttggtcccagtagctcgaaatcgtctttccggccttgtggatgcctgccgggatggactcccagaatgtgtaatattgtgttcgaagcgaatagggattcgtgaccgtcacgccgatccgtccttcggcatcgacgggcagtgcgagcgaatcgatgagcgcaccgtcgcggcggacggtcagcagaaccttgtcgttcttgtgcttttgcaggtagtcgcggtatcgggggtagtccgcatcgcgcagatcgtcgatcgctaccacttcgtcgccggactggaggcccgcttcgactgccgaggtgtaggatacgctgtccacgatgaaggggagccgcagggtgaagaggtcttcgtaagccttttcctgccgcatacggagcagggattcgaagggaatgtcgagcgttaccggctctccgccccgttcgactaccacgcggcggccgccgtcggtaatcagcaggtcgttttgtacccgcatgacgttgtcgatctcctcgccgtcgatcgacacgaaacggtcgccgtcccggaagcccatttcgtgagccgtcgggttgaaattatagccccatttcgcgtcctggttcgaaaagtaggagtcgccccaggtgtagcaaacggcgcagtagatgacgatggccagcaggacgttcatcatgacgccggccaccattaccaggagccgctgccaggcgggtttggcccggaattcgtcgggtttgaccggctgtttcatctgttccttgtccatcgattcgtcgatcatgccggcgatcttgacgtagccgcccagcggcagccagcccagaccgtactccgtgtcgccccgcttgaacttgaagagcgaaaaccacgggtcgaagaagatgtagaatttttcgacgcggatcttgaaagcccgggccatcaggaagtgcccgagttcgtgaatgcccacgaggatcgtgaagcagagaaaaagttgagcgattttgataagaatatccattgcttaagcgttcgtttttcagtttgttttctatgtcaggtacggcggtaaccccgttctgtctttacctgtcgaaaacatttattgtaagaatgttctttgccgataatcagagccgcaggtattcggcggccagacaccgggcttcggcgttcgtttcgcccaggtccccgagggacggcacggctgcgaacgaggatttgcccagtgcgtattcgatgctgcgcacgatctccagataaccgcaccggcgggcgaggaaggctgccacggccacttcgttggcgccgttcatcgtacagccggccgtgccgccgcgccgcagacagtcgtaggcgaggtcgagggccgggtatttgatccgatcgacctcggcgaaggtgagggtggggtgctctgcgaagctgaaaggcgccaccggacggtcgaggcgctgcggaaaactgagcgcataggcgatcggtgtccgcatgtcgggcgatcccagctgggccttgatcgctccgtcgccgaattcgaccatcgaatgaacgatcgactgggggtgtatcagcaccgatatccgttcggccggtacgccgaacagccagtgcgcctcgatcacctcgaatcctttattgaccagcgtggcgctgtcgatcgtgatcttgtcgcccatccgccattggggatgcttcagtgcctgttccaccgttacgtgagccagctcctcgcggctgcggtcgcggaaagctccgccgctgcaagtgacgatcagccgtcgcacgggcgacttttctcccgccaggcactggaagatcgccgagtgttccgagtcgatcgggacgatcggggctttgtgccgggccgccagcggcatcacgtaacagccgcccgccaccagcgtttctttgttggccagcgccacctttttgcccgcttcgaccgccgctatcgtcggcattaggccgacgtagcccaccagggcgttcacgactacatcgacctgcccgctctgtacgacttgccgcagggcttcctcgccggcatataccttgatcgacgtgccgtcgagtgcctgccgcagggcgtcgtattgccgttcgtcggcgatcaccacgctgtcggcgtcgaactccacggcctgccgggcgagccgctcccagttgcgatgggccgtaagggtcgtgatctcgaacagtccgggattttcccgaacgatgtcgagggtctgtattccgatggatccggtcgatccgagcaaggcgattctttgtttcataacgaaggtcagaagacgatataactctccggatcgacgggcttgccgttgctccaaagttcgaattcgaaaattttggcgtcgccgccgtcggccagcacttccgtattggatccgatgacaccgccccgttttattcgctgtcctttggctactaacgatttggacaggtttttataaatcgatatcaggttgttggagtgctgtatttcgatcaggtaacccgtttcgggggtccagagattcatcaccaccacgccgtcgtccgccgcgacgatctgggtgtcgggcgatgcggcgatgcggatgccgaaattctcgcgtttgatgtcgaaccgctcgatgacgatgccttcgatcggggcgaccatttcgatgggcttgcgtgcggcaccgccgcctgtgctctgcccgaggctgtaaggaccttctccctccagttcggcccgcagcagcgaatcttcgcggctgggcaccacgagtgtcttgttcgtgcggatgctgtcttccttgcctacggttcgcaccaccggagtcttgccctccatgatgagggcgatgttgttgttataggtaatcatgtcgttcatcatccgctccatggaatccagacggatgacgctttgcatcagattttcgcgcgagcgggccgcttcgacgcggtagccgggcaggagttccagcaccggcgtataggccacgatcgacagaatgaggatgaaaagcagcagcgcgaaagccagaaacgcggcgagcagacctgccggggagatgtgggtgtaccactcctcgacgttgtcggtcgcattgagcatgctcaggcggcgtttgcgggagaagcgtttccaccacgaggatatggaatgaaatgcgttcatggttctgtttttgatcgttgtttgcgattggaccgaaatccgcaggggtttctgccggtcgaaaagccggggctgtccgtttcgtctttccggtccggcatatcgaacggggccgatggtattcctgccttttcgcgccggaaagttgaattgtacaaaggtaacaataaatctttgaatttaatgccggtttccttacctttgtacgtttctttgaaacgagtaaaaactgaatatagtatgataaaaccgacattattggtgttggctgccggcatgggatcccgttacggatcgctcaagcagatggacggggtaggtcccggcaacgaagccatcatcgactattccgtatatgacgccattcgtgctggcttcggcaaggtggtattcgtgatccgccacagttttgcttccgacttccaggaggttttcaccgaagagcgtttcggtggcaggatccgcgtggagtatgtctatcaggagctggattgtctgcccgaggggttcaccgtacccgaagggcgtgtgaaaccctggggaacgaaccatgcgattctggtggcgagggatgccgttcacgagcctttcgccgtaatcaatgccgatgatttttatggagcggaagcgttccgtaccatcgccgaataccttcgcggattgaatggagcgtcgggacgctattgcatggtggcgtacgagttgagccggacgctttccgaaaacgggacggtgtcgcgcggcgtctgttcggtaaacgctgccggcgaccttacgggaatggtcgagcatacgcagatcgaacgcacggcggccgggatcgtcgatcacggtgcgaacggggatgaaccgttggccgaagatacgcccgtgtcgatgaaccttttcggctttactcccgattacttcgcccactccgaggctttttttcggtcgtttctgcaggagagtgccgggaatttgaaagccgagtgctatatcccgtcgatggtcaataagttgatcgccgacggcacggcttccgttcgggtcctccgttctccggcgcagtggttcggcgtgacctataaggaggataaaccgttgctggtcgccaatttgaagaagatgatccgggcggggatttatcccgaatacttgtggcgatagacaaatcgtcgtcggtccggtaatggaaaatcgccgatccaaacggatcggcgattttgattggttttcctgcactcgacgaagtcggtttgcgagtagaaggcttttacaagtttgggtgtcgtcccatgtcctgatcgaaagaccaggctattccgttcgtctttcgctttctatgcccgatgcccctgaaaggccgctcgttgttgttaccagccacctgtcagcctctctaaaacgaggtttaggctctcgaccacctgtccgccggctccgattcggaggtattcgtgattccgggacaggtgaaatacccgggcttaatccaggtaaccggcttctaccagttgttggcggattttcacccagtcggctaccggacgggctacgccgtccataaagcggatcggacatcccagtgcactgtcgtcgatataaaggtcggcgtggactttcggcgacgaagtccaggacttctgtccgggattctcattgatggcgtacagcggaattttctgttccttgaaccattggacggctttttcgagtagttgtccgctgcgcatggtgtacaggatgagtttgcagtcgttcgccacgagctccttgagtacgggaaccgcacctgcgtccatccccatatgcggataggcgtgtgtcacgacggttccgtcgaaatcgatcgctatgattgctcctttaacggccatatcggttatttcttttgaaatttattacgtgtccattcgcataatttgccccagaaacccttctttgtcgtggtttcctcttcgtcgaggccgtacccgtaaccatagccgtagccataaccgtacccgtgacgttttgtcgagctggctccgttgaggatgatggccatgttatggaatttcttttcgcggtacagccgttcgatatccggcaactgacgacggtcgagcaggccttcccgtactacgtaaatgctgaggtctgccaggcggtcggtgatgatggcgtccgctacggccatcgccggggtgctgtcgataattatgtagtcgtagtggagtttcagttccgcgatcaactcttccatccgctggctcaacagcatttcgctcgggttgggcggctggatgccggcgtagatgatgtcgagtttttccgacagtttggatttgcggatgattgcctgaagctccgtgcttccggacaggtagctcgaaaccccgttggtatctccgccgtgccccatctgtttggagaaggtgcggcgccgcaggtccagatccatgatgacgaccttcttgcccgtcgtggcgaacgtcatggccaggttggtcgaaacgaacgtctttccggcgtggggattcgacgaggtgaccataatgacttttatctcgcccttgcccaggttcatgaagttcatgttcgagcggatcatgcggaaagcttccgacaccggatcgcggccgttttcgcgtacgacgaagctgccctgttgcttttctcccgaatattgcggaatatcccccaggaacggagccgaaaggttgtcctcgatgtccttcctcccccggatcgtggtgtcgagtatctggatcaggtagatgatcaggaaggggatgcccagtccgaacaggaaggcgattcccgcaatcagcacggtattgggcgacacggggcgcggggaaccgtatgcactgtcgatcgtgcgcgagttgctttccgtgatgaccatggtgatggcgttctcctcgcgtttgttgagcaggtagaggtaaagttcctccttgattttctgctgacggacgatgtccagaatctgtttttcctgcgtcggtaccgaggatattcgttgattggtcagcgcctcttcctttcgtaaagcggccagttggatctgcaacgtggagatataggaatcgagcgtcgcgatgatcgaccggcgtgtggaagccagtccgttgccgagattctgaatgatcgggttgttctccgaactctcggagttgagcttcatatagcgttgcaactcggtattgtagccctctatctgggagttgatcgcggggctgttgatcgagagcgttccgggaatcagttcattggttttggtcgggtccagcaggtattctttgaggaattccgtcattcggatctggttttccagcgagaggccgtcggttttatattgggcgctttcggtaatcgtctgctcggcttccgatacgatatcgtatattttgttgtcttttttgaatttttcgatgttgcggtccacttcgctcagttcttcggagatgatctccaaccgattgtcgatgaattgtcccgtgctttctgcgatcccccgtttgtcgtcgatcgcatctttttcgtaaaccgcgatcagcgtattgatgacatcttccgcttttttgggaacggaacttttcatagaaatggtgatgatcgaggcctgtttgttggctacgaaacttttgacttcatgctggtagaactgcgttactacgcccaagttgcctttggtgacccggatcggagccttttcgtagtaatcgggggacatatagagagtcggccggataatcatttggccgacaggcgtggagatcgtatcgccgaatacggccgaaatttcctgcttgaatttctgtttgtcgggaccgaatatttcgaagtagttgagttttacgatgctgtcggggcgcagcgaaacttcgaaccggaatccctgccggtcgttatcgttgatgaactccactgcgatcggactttgcccgtagagatcctggggccgtaatccttccttcgtttcgtattgaacggtcaaacccaactgtttgaccacttccgtcatcaggcggcgtgattggagaatataaatttcgttgtccacattgcggcgctgtgacaggcccgccaggtcgctcagggtcgccaggtcggtatctcctcccttgcggctgtctttcacgaggatgttggccgtgcggctgtatattttcggggtgcgtaaaatgtagatgtaaccgcatccgacgcaaacgaataccgagatgacgaaccagtaccagttggcgattaccgtctggatcagatcgtgcaccgagaaagtaatgtgttcctcctgctttgtatcgctgttcgcggagttcgggttgatattgttaggtgtcatgccttgttgtgaaaattaacgggtgagtgtgacgatcagagtcgctacggacacggcggtgctgaccagcgagatatagaaactgcggttctggctgatttcgccggcctgggcccggtacttgttcggcttcacgtaaattacgtcgttctgctggagatagaaatagggcgaatcgtaaatgtcctgcgaagtcagatcgagagatgccgtggtgcggacgccgttttcctcccggattaccttaacgtcggagcgcacgccgtagatggtcagatcacctgccagcgacagggcgtccaacagggagatgcggtcgttggtgatgtcgtactgtccgggacgggcgacttctccgatgaccgagattttcatatcggcgaactgtatattgaccgtcgggtcgctgatgtatccgccttcccggattttgtccgcgatttcctgggccagttcgctgcgggtcttgcccttgcattgaatggggccgatgatcggcatatcgaggtcgccgttttcatcgacggtcctgatctgtaacgacgcactgttcgacgaataggtcgaaagaggcgttccggtcagggagttgagagaggtcgatgtattgaacggcgcagccagttccgggtcccggctgttgaccacgacggtcagacggtccagcggcttgatgcgtatttgataatcctgggcgattttgacctgctcgtcggcttgagtgtcttgcaggtagatcacgcgcttctgggaggcgcatgacgcaagaacgacgaccccgagcaggagggcgaaggcctttattcgtttcatttcgaaatagttttgtagtacacgtgtaattttggtatgcaaaggtagaaaaaatatatgaatgggaaggtttttgtttgctatatttgcgattactgtattttataacgctaaaagagacgattgattatatgatgaatgctgtgtggagccggaatgccgtgttgtacgagatgaatctgcggcaggcgacgcccgaaggaacgcttgccgccgctgcggagcggctcggttttttgcgggatttgggcatcgatgccgtttggctgatgcctcattatcccatcggggaggtcggtcgcaagggatcgctgggctcctattattcgattcgggattaccgggccgtcgatcccgaactggggacgctggccgatttcgacgcttttgttcggagggctcacgccctgggaatgaaggtcttgatcgattgggtggccaaccacacttcgcgcgacgcccgctggctcgcggaatgtccggccgactggtacgaacgggacgcttcgggcaggcccgccgttcctaacggatgggacgatacggccaagctcgactacaccaatcgggccgtctggcagggacagatcgacgccatgcgtttttggcttgcggaacacggggtggacggtttccgctgcgatatggcgatgctggttcccatcgaattttggcaggaggcggcacggtggttgcgggcggtgaaacccgacctgttcctgctggccgaagccgaggaagattacctgttcgaccgggctttcgacgcgtcgtatgcctggcggctttatcacctgatgaacgacgtggcgcagcagaagtgccgggtcgatcgtattcgggagtatctttatgccgatcggaagcacgtcccggcttgggctttgcggctgatgttcacttcgaatcatgacgagaactcctggagcggtagcgaattcgtccgcctggggcctgccgtgcgggtcatgacggccctgacgtttctgctgccgcagtcgctgccgttggtttacacggggcaggagttcggttatgaccactctttcgcctttttcgaccgggacccgctgcccgcttgcgagccgaacgaaacgacggagttctaccggcggctgatcgctttgcggcacgatgctccggctctcgcttccggggagcggggcggctccttcgtcgaaatccgcaacaatgccgaggattgcctgctgactttcgtgagggaaactccggaaaatcgggtagtcgccctgttgaacgtatcgccttatgaagtacatgccgatttcgatacgggaatctacgccggaggctatgcggacgccctgacgggcgaacgcgtacagctctgctcgcatgtcgatgagcggatgtcgggctggagcttccggattttgacacggccgatgtagataggccggattttttcgtacatttgccggcgacggggaggccgttttgcgaagcggcaacggcttcccggtttcggaaatgcgcatataatataagttgcattaggtaggtttagtaggacgatgaaaaaaataattctgacgatattttgcttcggaatgctgttcccgcttctgggttcggctgcccggccgtacggtgtggaggagattcccaacgtgcaggtcggcaaccgttatcggttcacgtcgaatcccgacggggttctttccccttcggcagtcgccgagatagactcgctttgctattcgctcaggcatcgggcgctggcccaggtcgccgtggtcgctgtggaggatattcgcggagatgatcttttctccttcgcccatacgcttttttcccaatggggtgtcggccgcgccgattcggacaacggactgggcattctcttggtcgtcgatcgccgggaagtgcggttcgtgaccggaccgggactggaaggtgtcttgcccgatgcactttgcaagcggatccagatgcgttacatgctgccgtatttccgggagggagattacagcgccggcatggtggcggggctgcgtgccgtggcatcggtgcttgagggcagcgagctcgatctgggcggcaacgacgatttccgggcaacggacgatttgccggcgtgggcggttttcctgatcgtctttctggtcgtcttcgtgccgctgggcgtcatgctggtcggattctaccgttccagacgttgtccccggtgtcgtgctttcgcgttggtgctgcaatcgcggaacctcgtcgggcagacggaccattacaacctgttcgaagacacttaccgttgcggcaaatgcggtttcgtcgtgaagcggcagtcccgaagtgcacgcagcgataacaacaaccatcgcgggggcgggggtatgtggatcggaggtttcggcggcggacacggttcgggcggcggcttcggtggaggtttcggcggcggcagcttcggtggcggcggtgccggttcccgttggtaaatttggaaattcactaaaaaacgatagaaaaaatgaaaaaagttatctggatcgtagtggtcgtacttgtggtgctgttcatcagcggctcctgttcggcctataacagaatggtcacggccgaagagaccgtcaatacgacttgggccgatgtcgaggcgcagtaccagcgtcgttccgacctgattcccaatctggtcaataccgtcaagggctatgctgcgcacgagcagtccacttttaccgaggtggtcgaagcccgtgcccaggccatgtcgttcaaactggatgcagcggacctgacgcccgagaagctggccgagtttcagcaggcgcagcagaaggtgggatcggctctgggacgtctgatcgccgttgcggagcaatatcccgacttgaaggccaaccagaatttcctggagctgcaagcccaactggaaggaacggaaaaccggatcgccgtggcccgcacacgcttcaacgatgcgacccggcagtataacgtgacgatccgccgcttccctgccaacctgatcgccggcatgttcggcttcgatcagaaagcctattttgcggccgaggaaggtgcgcagaccgtaccggaggtgaagttttgagattccggcctgtgaacggcggtgcggcgatcctgaaaggtcgccgcaccgcgttatgtgtcgaggtcgtaaatgggatttcgccggtcctccgaaggcttcggccgtggtgcgaacccttttttgccgcagggaggtattgataaaaatttcggggatcgcggttaaaatacccgataaatttttgtacttttgttccttgaattatcgtggataattgtgaccataccttatgttaagcgttttattctaccttttcctgttcgttatctgcactttttttctggtattgtccgccgtggcgttgcttttgacgtggcctttcgacaaatcccggaggatcgtgcacgaactgtcccggatactggtccgtattttctatgcagttccgcctctgtggaagttccgggttaccggcagggagtatatcgaccgtcgcaaaccgtacgttatcgtggtcaatcaccaggccggcctggatattccgaccctctatttcgtaccgctcaacttccggtgggtttccaagcgggaagttttcaaggtgccgtttttcggccagttccttttgctgcacggggatatctgcatcaaccggggacatgctacggccgcgatggagaaggtgatccgcgacggaaagctgtggctttcgcgcggggcttcggtggcgatctttccggagggcacgcgttcgcacgacggcgaaatctatcgtttcaaggcgggggctttcacgctggcgcgcgaggcgggcgtcgaaattctgcctgtggtgctcgacggtacgaccacgatgatcggccgcaacgggatgttcaactggcgcaataaattgacggtaagtattctgccgccggtgagcgccgaacgggtcgccgctgccgatccgaaggagctgatggagcaggtgcgggcttcgatgtgcgtaaggctcgccgaaatcaggaaacagaaataaacgattatgttcgataaaaagatagataacaccagcaacagctatggcgacgatgccatcgtgaccctctcgccgagggagcacatccggttgaggccgggtatgtatatcggcaaactgggcgacggctcgcaggccgacgacggcatttacgtcctgatcaaggaggtggtggacaactctgtcgatgagttcatcatgggtgccggtaagcagatcgacgtgacggtcgaggacgacattgtgactgtccgcgactacgggcgcggcattccgctcaagtccctcgctgcggccgtcagcgagatgaataccggcggcaagtatggcggttcggccttcaagaagaccgtcggactgaacggtgtcggcgtcaaggccgtcaatatgctttcgagcgaatttaccgcccgttcggtgcgcgacggcgaggcccgcacggtgactttcgcgcaggggctcgaacagagcgaccgctgggagagcggcgtgcaggagaaaaacggtacgtttatcagtttccgtgtggaccgggaggtgttcggcgactattcctacaatctggagtacgtcgagcagatgattcgcaactatacttacctcaatctggggctgaccttccgtttcaacggtcagagctatgtttcgaagaacggcttgctggaccttctgggcgagaacatgaccgaggagccgctctatgcgccgatccacctttcgggcgaggatatcgaagtggccatcgcacacggtacgggttacggcgagagttactattcgttcgtcaatggacaatacacctcgcagggcggtacgcatcaggcggctttccgtgaagcgatcgccaagaccatcaaggagttttatcacaaggattacgatccttcggacatccgcacgtcgatcatcgccgccatttcggtccgtgtgaccgatccggtgttcgagtcgcagaccaagatcaaactgggctcgaaggagatcgaaccgggggttccgctgcgcaacttcatcgtcgattttctggccaagcacttggacgactacctgcacaagcactccgagacggcgcagattctgcaaaagaagatcgtcgagaacgagaaggagcgcaaggcgatctccggtattcagaagaaagcccgcgaaacggccaagaaggtgtcgctcaacaacaagaagctgcgcgactgcaagatacatctgacggacaagaacgagctggccgaggagtcgatgatcttcattacggagggtaattcggcatccggttcgatcaccaagagccgcgacgtgcgtacgcaggcggttttctcgctgcggggcaagccgctcaactgcttcggcctcacgaagaaggtcgtatatgagaacgaggagttcaacctgttgcaggcggcgctcaacatcgaggaggatatggacaacctgcggtacaacaaggtcgtgatcgccaccgatgccgatgtcgatggcatgcacatccgtctgttgctgatgacctttttcctgcaattctttcctgacgtgatccgcggcggacacctgtacgtgttgcagacaccgttgttccgggtgcgtaacaagaaggagacgcattactgttacagcgaggaggagaaaaaccgggcggtcgcacgatgcggcgccaacgccgaaatcacccgtttcaaaggtctgggtgagatttctcccgacgagttccgggggttcatcggccaggatatccgcctggacaaggtgcggcttacgaaggacgacccgatccacgatatgctggagttctacatgggtaagaacacctatgagcggcagggctttattatcggtaacctgcgtatcgaggaggatatcgtggagagcgacctggcgatcgggtaaccgccgtttcttatcgaccggtgcggttttcttgtgcggtgccggtgcgaaaccgaaaacagaacatagattatgagcgaacaaagagaagatatgacggaacgggacgatctgcccggcgaggttcctgcggcggcggatgacgctgcggggagtgtcggggccgaagagtccgccgctccgacgggcaaatacggcaagttgctctccgaggagggcggcgtgcgcaagctgacgggtatgtaccgtaactggttcctcgattacgcttcgtatgtcatcctggaacgagccgttccgcacgtgcaggacggactcaagccggtgcagcggcgtattctgcatgccatgaaagccgtcgatgacggtcgttacaacaaggtggccaatatcgtgggccagaccatgcagtatcacccgcacggcgatgcttcgatcaaggatgcgctggtgcagttgggacagaaggacctgctgatagactgtcagggcaactggggcaacatcctcaccggcgacgaagccgctgcgggccgttacatcgaagcccgcctgtcgaaattcgccctcgacgtggttttcaacaagaagacgaccgagtggatgcgctcctacgacggccgtaacgaggagccggtgacgcttcccgtgaaattcccgctgctgctggcgcagggtgccgacggtatcgcggtcggtctggcgtcgaagattctgccgcacaacttcatcgagctgatcaatgcggcgatcgcgcatttgcaggggagggatttcgtgctgtaccccgatttcccgacgggcggcatgatcgacgtgagccgctacaacgacggactgcggggcggtacggtcaaggtgcgtgcccgcatttcgaagatcgacaagcggacgctggccatcaccgagattccctacaccacgaccaccgagtctatcaaggattcgatcgtcaaggccaacgagaagggaaagatcaagatccgcaaggtggacgacaatacggccgagaaggtcgaaatcatcgtgcaggtcgcgcccgacgagtcgtcggacaagaccatcgacgcgctctacgcttttacggactgcgaagtgtcgatcgccccgaatgcctgcgtgatctgcgatgacaaaccccatttcctgggggtgagcgagatcctgcgccgttcagcggagcatacccgcgagctgctgaaaatggagcttgaaatccgcctgaacgaactcaacgaagcatggcatgcggcttctctggagcggattttcatcgttaataaattgtatcagctcatcgagggctgcaaaacccgcgaggaggcttacgcagccgtcggcaaggggttggaaccgtttaccaaggtgctgcgccgtgcggtcacgaccgaggacatccagcgtctgacggagctgaagttcatccgtatttcgcgttacgacagcgacaaggccgacaacgagatccggcagatcgaggaggatatcgcccagacgcagcaccatctggcgcatctgaccgattatacgattgcttattacgagcgtatccgcgacaaatacggcaagggccgcgagcggcgtaccgagttgcgcgagttcgactcgatcgaagcgacgaaggtggctgtcaccaatgccaaactgtacgtcgatcgtgtggagggcttcttcggaatcggcaagtcgatgaaggattccgagttcgtgtgcgactgttcggatatcgacgacgtgatcgtgttcaccaaagacggccgctatgtgattacgaaggtaagcgacaaagcctttttcgacaagaatatctattatattggggtgttcaagcgcaacgacgagcggacgatctataacgtcctctaccgcgacggcaagaacggcccgatcctgatgaagcgctgcgccatcaagggtatcacgcgcgacaaggagtacaacatcaccaaaggcgatccgaagagtgaaatcctctatatgtctgtcaatccgaacggtgaggccgaagtgttgaagatttacttcaagccgcgtccgcgtttgaagaaggtgatcgtcgatctcgatttctcgaccgtggcgatcaaggggcggcagagccagggcaaccttttctcgcgttacggcatccataagatcgtcctcaaggagcggggtacttcgaccctcggaggacagcagatctggtacgacgaagacgtgcaccggctcaatacggacggccggggcgtattgctcggcgagttccagggggatgacaaactcattgtccgcacggccaagaacgtctattacacgacgaatttcgacattacgcagcactttcccgacgatacggttcacgtgtcgaaatattcgcccgacacggtctatgcggtggcctatttcgaccgctcgcagaattactactatctgaagcgctttacggccgagcagggtgaaaagatgcagtcgttcctggacgaagatgccgatctggtggccgtgacgtcctgcccgggggctgtgctggtgctgaccttccagggggcacaggcttcgcgtccggcggaggagatcgacgtggacggtttcgtcggcgtgaagagccaccgggccaagggcaagcgccttacgacctacgacgtggcgacgctcgctttcgtggagccggagcgacccgagcggccggagccttccggggaggatgctccgaatggttcggagggggatttcgacctgcccgaaacgatgaccgtcgagggtacggacgccgagttcgaaatcgaacgtccgaaaggcgacacggaggaggtgatcgtcgataccgagcagttgaatttattttaggagttaggatatgatcgtttttctggtcggatacatggggtgcggaaaaaccaccatcggccgtcggctcgcccggcggttgggttacgacttcgccgataccgacgaccggatcgagaaacaggagggtgccgacgtgtgcgacatcttccattatgccggtgaggagtatttccgcaaggcggagcgcgggatgctcgaacagctgatcgcttcgggcgacgacctggtggtttccacgggcggcgggcttcccgtctgggcggacaacatggctcgtatgaacggagccggtctgacggtctatatccgccgttcggcggagcagatcgcagcgcgtttgagtcctcacggacgttggaagcgccccaagttgaggggactcgacgaccgggagctggtcgaattcatgtcgcgcaacatggccgagcgggagccgttttacggacaggctgcgctgacgatcgacggcggcgcgatgaacgatgacgaaatcctcgaatttatcactgaaaaactgaaggaacgaaatggataaccggcctgtcggcgtatatgattcggggttgggcggcctgacggtctggcgcgaaattcgccgccagttgccggaggagtcgctcgtctatctgggcgacggtaagaattgtccctatggtgcgcgtccggccgatgagatctgccgtctagcggacgaggcggtcggacggctggtcggtgccggttgcaaaatggtcgtcgtcgcctgcaatacggctacggctgcggccatcgattttctgcgccgcaaataccggcagatgcctatcgtaggtatggaacccgccgtgaagcccgcctgcctgaatacccgcagcggggtggtaggtgtgctggctacggcccggagtttggacggcgacctgttccgccgcacggcagcccgttacggggagaatatccgggtgctgaccgccgtaggcgaagggttcgtcgaactggtcgaggaagaccgcgagcagtcgcccgaagccgtcgagaccgtgcgccgcgtgctggagccgatgatccgcgagggtgccgaccagatcgtgttgggttgtacgcactatccgttcctgctcccggttttccggcaggtgatcggtgaacgcggggttgccgtggtcgatccttcgcctgccgtaggacgcagggtggggcagttgctcgaccagtatgacctgcgggccgaaaaaggcgccaccgcgaattacggatttcttacctttgcggatgaagcgtaccggtcgcggctggaatgcaaggctttcggttagcggctccgcaccggctgcggtccgaaaacggaatcggggggggcggccctttcgaaaccgatcctgcatttgaactttccgaaaaaaatccctaccttcgctcgataaatatacgatatggctaccaagaaaaacagttcggcaaaaagcccgcaggctacctcccgttccaaccgtgacagcatgcgttggatactgggcttgctgctgcttttcgcggggcttttcctgacggcttcggtgctgttttactatttcgactggcgggccgacatgagccttgtgtccggtgtcgaacaggaggatccccgcctggcagacctgtcggatgcgatcgagaatccctgcggttacgccggggcttggttggccgagcgtctggtggggcgttcgttcggcctgttcggtatcattttgcccctgatcgtcacgatggtcggagtgcggatcatccgccagcgtccgctgcttttcaaccattcggtgctcggagctttgttgattctgattctgggttcccttacgttgggcttcgccttcggcgagaagtgggccgttttcggcagcgggtggggcggtgccttcggggtcgaggtcgcccggaggctgacgagcgtgatcggcgtgctgggaaatatcatcctgttgctgggcgcctggattctgacgggcgtgttcatcaaccgcaacttcatcaatacggtcaatacggcaggcaatgcaatggtggacaagggcggcaagatcgtcgatctggtcaaacagtcggtcgtgaatgtcgccgaccatcgttcgaaatccggggaggagaagaccgatcccgagcctgaacccgattctaaacccgaatccgaacggccccagcccgaacccgtgcctgctcccgtcgatgcgtcggcccgcacttccgctgcggatggagcggccgaggtgacgattcagcggcctgcgccggttgcggctcccgttcccgatgagccggacgagagtcccttcctcgaaattccccttacggaagaggttcctgcaacggttgccgagccggctccgtcccgttctgccggaccccgtatcgtggggggcgacgatgtatttaccgaggtcgatctttcgggaggcgaagccgacgctgcctttaccgcaccccgggaacccgagcaaccgcagtatgcgtcggagcccgcgccggtcgtggacggaattacggaatatacgcttacggcggagccggaaattccggccgaaggcgtcgtggtgaccgttgaagcacgcgaggccaaggtcgtggacgagaaaagcatcgagagcagtctctacgacccgttgaaggatctgaacaactaccagcgtccgcccgtgacgctgctcgaggattatacgtccgattcgcaggtgagcgacgaggagatttacgagaacaagtccaagatcgaacagacgctcaaggatttcgggattccgatccagcggatcaaagctacggtgggacctacggtgacgctctatgagatcgtgcaggcccagggcgtcaagatctccaagatacagggattggagaacgatatcgcccagagcctcaaggcgctcggtatccgcatcatcgctccgattccgggcaagggtaccatcggtattgaggtgccgaaccgcgacaagcaggtcgtgtcgatgtattcggccgtgcgttcgctgcggttccaggagtcgaaggccgaacttccggtggtgatcggtcgcacgatccagaacgagaactatgtcttcgacctggcgaagatgcctcacctgctcgtggccggtgctacggggcagggtaagtcggtcggtttgaatgccatcatcacctcgctgctttacaagaaacacccctcgcagctcaagttcgtgatgatcgatcccaagatggtcgagttctcgctctattccaagatcgagaagcacttcctggccaagatggagtccgaggacgaagcgatcgtcaccgacccccgcaaggcggtctatacgctcaactccctctgtacggagatggacaaccggctggaactttgcaagatggcgggagcccgcaacatcgccgaatacaacgataaattcacggcgcggcggctcaatcccgaaaagggacaccgctacctgccctatatcgtagttgtggtcgatgagttcgccgacctgattatgacggcccgcgaggtcgaaggtcccgtgatgcgtctggcgcagaaagcccgtgccatcggtattcacctgattatcgccacgcagcgccccgacgtgaaggtcatcacgggcggtatcaaggccaatttcccggcccgtatcgccttccgcgtgatgcagatgatcgactcgcgcacgatcatcgatcagccgggcgccaaccagcttatcggccggggcgacatgctcttctcgaaggacggggagctgatccgtatccagtgtgcgctggtcgaaacccgcgaagtggagcggatcgtggatttcatcggccgccaacagggatattccgaagcctaccggctgcccgattacgtgccggaatcgagtggcggagaatcctcgtcgctgggcagcgagagcggggctccggtgcgctacgacacgctgttcgccgacattgcccgtgcagccgtgtcgcagggacagatttcgacctcttcgattcagcgcaattacgaggtgggcttcaaccgtgccggtcggatcatgatgcagctcgagcgggccggcatcgtcggccgtcaggagggagccaagccgcgcgatattctcttccacgacctgccttcgctggaggcccgcctgcaggagttgggagtattttgatgcgatgatcgctccggacgaggcttgaatgtgtttgggtattatgaaatagggattgccgttgtcttgtcgtacgaaagcggggtgcggaacactcttcggattggtaattcggaataaaaacgagggagaaaacgatgaattggatcgtattgtttatcgcgggagttttcgaggtggccatgactttctgtttagggaagaccaagggggcccagggtacggagctttatctttggatcggagggttcgtcctggcgacagtgttgagtatgggtttgctggccaaagccgtgcagacgctcccgatcggtaccgcgtacgctatttggaccggcgtgggagctctcggtacggtgttgctggggattttcgtcttcggcgaatcggcgggtttcgcccggattttttttatcgttaccttgttcggttctatcgtcggactaaaattggtttcgcattgaatatattgaataaggatggtcgaaacattcgtgatgtcgattgtcgtttttcggatttttgaattcgaccgttgtcggagcggtttcggagtacatttgcagattcggccgatgtattcgggcgaaaatcgacggaatgacgacggttcggtctatcggagtataatcggaaaaaatatcttatgaaacgatctgttttgttgttggcggcactgtttgccgtgttctctgtccaggccgataaccggccgcaggccgtgttgaagcaactgaccgctgcgctcggagcgctggaggggtacagcgtagtcttcgaggtgcataccgacggggatgtcgtgccgggctattatgaggtgagcggcgacaactactatatgcatgtcaatgggcaggaggtttacggcgatgcggagttccgttacgaaatcgaccccgatcgtaaagaggtggttatcgaccgtgtggatctcacgtcccataatctgctcaataatcccacccgggcgttcgatttcatcgacggcgaatatgccgcctcgcttttgagcgagaagggaagcacggccgtaatccggcttactccgctgcgtatccagtcggccgtcgggcagatcgacgtcgaagtggacacggcccgttcgctgccgacggcagtgatctacgaaatcgacggcgaccgggttcggatcgacatccgttccgtcaccgttcacgaggcgtcgccccgcactttcgatgcggagaattacgccgggtacgagtggatcgatttccggtagtgtatttttcccgatcgtgctggcggtcgtaaatagggcgtgatgtataaaatttgtccgaacggctttgaaattccccgacactttgccgggggatttttttgatgttgtcaaaacggctgaaaagggctgaaaatggtgtgtgcggtgaaaaaacttgcggaaacgggtgattttattgggtccaaagttgcttattcgacgaataaatgctatttttgtgtgtttatagaatgtattttcggatgttttcgataagcgggaaccgacgaatagactcgtcggaccgagcgaagagaacaaagaacgtaagtccgctgttttcgatcgggcgaagaagtagtccgaatgtagaaaataaggggtaaagttcgatgttttcgaccggcgaagggcggcgcgggatgcgttcgggccatgccgggcagagaaaacgaagagagaaactcaaagaataacatgctgacagaagaagaaaagaatgccggattggagggaaaaatcattcccatcaatatcgaagagcagatgaagtccgcttacatcgactattcgatgtccgttatcgtatcgcgtgcgctgccggacgtgcgggacggtttgcagcccgtacaccgtcgtattctttacgatatgagtgcggaactgaacctctactccgacaaacccacgcgtaaatccgcccgtatcgtcggcgacgtgctgggtaagttccacccgcacggcgacaggtcggtctatggagcgatggtgcgtatggcccaggattggtcgatgcgctacccgctggtggacggtcagggtaacttcggttcgatggacggcgattcgcctgcggcgatgcgttataccgaggcccgcatgcagaagatcaccgatgaggtgatggccgatatcgacaaggatacgatcgattggacgctcaacttcgacgatacgatccccgaacctacggtgcttccgacgaagatccccttgttgctggtgaacggcgcgagcggtatcgccgtcggtatggcgaccaatatggcgccgcacaatctgggcgaggtgatcgatgcctgctgtgctttcgtggacaatccggagatagcatgtgaggaactgctcaagtacgtcaagggccccgatttcccgaccggaggaattatttacggctacgaaggggttcgggaagcgttgctgacaggccggggccgtgtggtcatgcgtgcccgcacggagatcgagcatacggccagcggccgcgagtgcatcgtcatcaccgaaattccctatatggtcaacaaggcggagatgatcaagaagatcgccgaccttatcaacgaaaagaagatcgagggcatttcctatatcaacgacgagtccgaccggaacggcatgcgtatcatcgtcatcctgaaacacgatgccgtggcgagcgtggtgctcaatacgctgtataagaatacgccgctgcaaacctcgttcgcggtgaacaacatcgcgctggtgaacggtcgtccgatgatgctcaatctgctggatctggtgcagcatttcgtcgagcaccgccacgacgtgatcgtgcggcgcacgcgcttcgatttggccaaggccgagaagaggctgcatatcgtgttgggtctgctcatcgcgcaggacaacatcgacgagatcatccacatcatccgggcagccaagaaccccgacttggccaagcaggccatgatggagcgcttcagcttgagcgacgcacaggcttcggccattatcgagatgcgtctacgcgctctgacgggactcgaacacgacaagctggttgccgagcgcaacgagctggaggcgcagatcgcttatttcaacgatgtgctgggcagccgcgaattgcagatgaagatcgttaaggacgaattgttggaggtgaaggccaaatacggcgacgaacggcgctcggagatcgtttacgcttccgaagagttcaacccggaggatttctacgccgacgacgagatggtcatcaccatttcgcacctgggctatatcaaacgtacgccgctggccgaataccgtacccagaaccggggcggcgtcggcgccaagggcagcgcgacgcgcgacgaggatttcatcgagcatatctatatggccacgatgcacaatacgatgctcttcttcacggagaaaggccgttgctattggctcaaggtttacgagattcccgaagggacgcgctcctcgaaaggacgggcgattcagaacgtcatccagatcgagccggacgacaaggtgcgtgcctatatcaacgtgaagcgtctggacgatgcggaatacgtgaacaacaactatatcatcatgtgtaccaaggacggcacgatcaagaagaccaaactggaagcgtactcgcgtccccgtcagaacggcgtcaatgccatcgtgatccgcgagggcgaccagttgatcgaggccaaactcaccagcggcagcgccgaggtaatgatcgcggcccgggaaggcaaggcgatccgcttcaacgagaacacggtgcgtccgatcggacgtgtcggggccggtgtgcgcggtatttcgctcgacgaaggcgacgaggtggtcggcatgatctgcatcgaacccaatagctcgcaggacgtgctggtactcagcgagaacggttacggcaagcgtaccgatctggacgaataccgcattaccaaccgcggcggcaagggtgtgaagacgatcaacattacggaaaaaaccggcaagctgatttcgatccaggctgtgaccgacgagaacgacctgatgattattaaccgttcggggctgacgatccgtacggcggtagatcagatccgtgtggcgggacgtgctacgcagggcgtgcgtatcatcaacctgcgtgagggagatgccatcgcttcggtaattgccgttcccgccaacgaagaggaggagccggcggtcctcgatggggcgggcgctccggaatccgagtccgaagagaacgttagtaaagaacaatagaagataatacctataaattaaaaaccccgttcattatgaaaaaacttattttggccctggccgccgttgccttgttgggaactgctgcccaggcacagaaaatcaacaaggaggccttgttgcagaagatcgaaaagaacgaaacggcgagtgccgatgcgaagaagggagcgaaagccgctacctggctcaatttgggtaagagctatgtcgaggccatactcgctcctaccaaagacctctatgtcggagaactcggcctgcagctggatatgacattcggcagcccgaagtcgatcgacgaagtgacgatcaacgggatgtcggtggccgcacagaattacgattatttgaccgtttatgtttccaatggacaggtcatcggctggaaggagatagaacctgtaaaggaaggtgctatcgataaggcgatcgctgctttgaacaaggcttacgaactcgattccaagcagggtccgaaagtcaaggagcagcttatggcgatcagcaactactgttcgcaattgggcgatgcttgcaataatatcggtgaatacaaactcggttcggaggctttcgaaaccgctttccgcgcggagatgagtccggcttgcggtactcccgacgcttcgcgcctttactatgcgggctatctggccgctgctgccggcgagaaggacgctgctgaatatgctcgcggcgtggaattgctgaataaggcgcttgaaatgggatatacggatgacaacggtatgatctattactacctgttccataactattatggccagcgtgaggcggaccgtgccaatgtcctgaaagccaaagacgccctgacgaccggtattactaaattcccgaagaatcaggatattctcaagagtttgattatgttgtattcgatggaagaggggttgggcgattcgtcggagctggttacgatgctcgacgatgcgattgccggtgatccccagaacatcgaactgtggttcagccgtgcccagatcttcgtttcgttggaggattacgatgaggcgattgcctccctggagaaggcgatcgaactgaatcctcagtcttacgaagcgcagttctttacgggttactacatcattatgaaggccgatgcactgaatcaggaggccaatgagaaagaatataccaatgagggcgagtatgaagctgaccagaaggagattctttcgatctattcgcaggctgttccctatctggaagttgcccatgagattatgccgcagaatcccgatcccgtacagctgctcaagactctttgctatcgtctgcgcgacgaacccggcatgatggagaaatacgagaaatacaacgagctttacaaacagatgtaattcgaacgttggtttccaaataaagcccggagcaagacgctccgggctttttgttttttaaccgatcactttgtttacagacacgtttgttccctgtaccgaaatggcggcagcggtgcgaagaggaaagttccgtataatcttttcgttactgttgaaaaatttattgcagtacggtgtatgcagtagttgaagagaaagggatctgccggatgaagaaccccggttatttggatcggcggagaggaagggccgtcctttgcagggcgaagatacgtcgggaaatttatgccgcagcttttcgatagatgagccgcaggcgccgggtcatcagaagttgcagcgtgccgcgcaggaacatatagagcgtgaaggccagccaaagagcgttgttcccgatgacgggatagagcgagtagaagataccgaaataggcgacggtcgagagcagcatcgaattgcgcatcactttggtttcggtcgcacccaccatgataccgtccatgatgaagggcatggcgctggccagcgggatgaggatgatccagacgatgtaattacccgccgtcgaaacgacctgtgctgcgtccggagttccggccttgatgaaaatgcccaacaggtcgcgccaccagatgaggtatatgccgacgaacagcaccgagatcagtgtgccccagcccagacaacgtcccaggcagcgacgcagcgattgttcgtcccgggctccgatgaagcgtcccgtgagggcttcggcggcataggcgaagccgtcgttcatgtaggagaaaagggtgaatatctggagcagaagcgtattgaccgtcagcaggatcgggtcctccatacgggccgatgccgccgtgaagaaggtatatacggctacgatacagagcgtacggacgatgatgtcgcggttgatgaggaaaaatttccgcaccggttcccagtccaccacttcacgccacgtaaaccgtgtgagaattttgcggtatcgcaggataagcagcaggacagccagcagaactcccgtattttgggccacgaccgagccgtaggcgatgcccgtgatgcccatgccgtgtccgaatacgagccacaggctcgtggaaacgtgtacgatattcaccgtgacggcgatacacatcgggatcacggcattctgcatgcctgtgtaccagccgttgaatccgaaaagcatgataccggcgggtaccgcccagatgcgggcgtagaaatagtcgtgtacgatttcgttgccgttcatggcccacagtgccagtcggcccagagggttttggaagcaaataaccagcaggccgagaatcgctgcgaccagaatgccccggacaagcatgttggtgcattcgtggaagtttcctgcaccgaaagcctgcgccgtgagtccgctggtacccatgcgtacgaagctgcagttccagtagatgaagttgaagatggatacgccgatggcgagtgccccgatcgtcgctgcggagttatccaggtgtcccgcgacggcggaactcacgatgcccataagggggaccgtgatgttggagatgatgttcggaacggctaatcggaggatttctcggttcatgtcctggtttttgatgtgcaaatatacggcttttgcggataaggggaaatattttggcacggtatttcgatctgattcccgcagggataatcctctttttccggaaaatagcggttgtcggtgccgttatcccgaaaattcgattacctttgctgcctgcaccggtgttttcggccggtgcgaatgccggggttttccctgttatgcaggggaaatcgagtgaaatcgccgatttgggacctggcgtcgtaaaacgccgtagcgtgagttttgcgggttccatcgacgattgcgatttccgggaatacgacttattaaattcgcaaaactcacagaatcgattatgaaagatttcaaaaacgactcggatacgacgttggcccgcttcgggcgcgataagcgggcgcgtatttcctctgcggagcgtatcgagcgtcgcccgcgtttgcagcgtgatgccgccgattcggagcactcttcggacagccgtccgcgcgcatcctacaaccctaattttacgagcgacaaccgtcctgtgcgggaagaccgtgcgcaccgtgacgattcccgtcgttccgggaaccggtcgttcggttcggacgaccgacgcagggacgatgccgcggatcgggagttcaagcctcgtttttcggagcggaaagacgggtacgcttcccgccggtacgaggataacaaaccgggcggtttcaagaagttcggcaaaccttacggtgagcagaaggaggggcgcgaccggtcattcggcgatcggaaatccggcggttatagccgttcggacaaaccttacggcgaacgtcggtacgacgaccgcaaacaggacggttacaagacattcgataagccttacggtgaacgccgttccgacgatcggaaatccggtgggttccggggcggcgaccgctcgttcggccgccgggacgataagccccgaagttatcccagatacaatcccaataaccagacgggagagatacgcctgaaccgtttcatcgcccagtcggggatctgttcgcgccgcgaagcggacgatttcatccaggcggggctggtgaccgtcaacggggtggtcgtgacgacgctgggaacgaaagtccagcctacggacgaggtgaaattcaacgacagccgtgtcgagggcgagaagaaggtctatctggtgctcaacaagcccaagggttacgtgacttcgctcgacgatccccacgccgacaagacggtcatggagttggtgaaggacgcctgtacggagcgtatctatcctgtgggacgcctcgataagaatagtgtcgggctgttacttttcaccaacgacggcgatctgacccgccaactcacgcacccttcgttccagaagaagaagatttaccaggtgtcgttggacaagcccctcaccaaagcggatatggagcagatcgctcaaggcattacgctggaggacggcgagatctatgccgatgagatcgcctatgtcaaggaggacaagacggaggtggggatcgagatccattcgggccgcaaccgcatcgtgcgccgtattttcgagcatctgggttatgcggtcaagaaacttgaccgtgtttactacgccgggctttcgaagaaaaatctcaagcggggacagtggcgcttcctgacccgcgaggaggtgcagcgcctcaagtcggggcagtatgaataggagtgacgcccaagcgatgtataaagaaagccgaaatccaaagatttcggctttcttgtcggatgttccatcgaggatttccgttctgatccgtcggatcagtgggtcgcccggtaccaggaggtctgtgcccattccggggcgaatcgttcgcacggggcgctggtcgttacgccggaatattttccgtcttcgatcgtatgcatcccgttcggagcgtcgcccaatccatataccgagtagaacgaaggcgtatgcagccggctttccgtcgggaaggcctttcccatttgtgctctgaacttatcgagcagcggatccttttcgtcgcagatcgcctcgatgtatccctgcaagtcgtagaatacatgctcgtcgagcccttcgtaggtttgcagcgatgcccggtcgtacgttttccccggatacttcgtttcgatctccttgacgatagccgccagcggctccagttcgccggtgaccgtcagggcgatgcagcctgatttcgtggtcgcgcggttcatgtaatagtcatagtattcgctgcagacacccggcaggtcgtaacttgtgcctgcatcggcgagcaggtgcggcagaatatcggtgtagttgaaaccggcggccatcacttcacacggtgaagcgatgatgcgatcggcacaaccgcgaagatcgtacaatgcctcgatcgaagacatgaagcaggcgtcgaagagaaggtagtcgaaatgcagccccgtgttgccgaaggccgctgccagttgcggaatttcagcccgcttgccggaatcgcccatccagcgggtcggcagggcattcggcatcgggctccagaaatcctggaatgcggagaaccggatggcattgaccgacgtaccgtccgggacccaacccagcccgtgtccgccgaggatcagaccgtatcgacgtgccggagcctgttcggccatgtaggagataacttcggtgatcgtacctctgtccatcgagttgaagtcggcgtccgcccagcggcgcagggtatcgaccttgcagtgttcgtacgagaactgtgctccgggtacgtaatcgtcgttgcggggcgtatagtagagttccaataccatcgaaaggcctctttgaggctggatgaaaaccagtacgcgactgttgtggagtatgttccggtcgatggcgttcatcgcgtcatcgacatttttcctgaagtaagaccccaggttggttcctgtcagatagaacataatggtctggtccgccgtttcggggaccggcgggcggggagtgaccccttcgtccttgttgcagcccgtgaaaagggtcgctgcgagtgcaaggacaagcactatatgatgtaattttttcatttggatctcgttcggggtgtttcgtgcccgttttgtgaaggttagaaatactcccccccccgcgtagagaggagggtgcctttgcaggatgattcggagaaaagagttgttttcatcttatacttttataataaattaggccgttgaattatgccggggcttcaagagcggttttcgttatttgtattctctcggacgcaggttgttgaattgccaagttcggggccgtttgaatacgtagtcgtcgggtttgttccggtagatgcggctgtaatcgaagtaatatcccttgatccgcccctcttcggtccgtaccggctcgagcagggggacgtattccaccgagcggctgacgacgcgtgctttgccgtagtgacggtcgtgtgcggccagcagatcgagagcatgtccgaacatcaggatatgccaggcgctcccttccttgaggccgttgccggaatcctcgatcgtcgccaggatggagttcatccggttgtagttgatctgttcgttcttcgagtcgccgagcgctccgtaagcgaatgccagcaggttcagcagtttggggctgaacggatcctgcaccaaggcatcgttcaccgctgcgatcagtttctcgaggctttcgtgcgtcggattctcgaaatcgaccgtttgggcgatcagtatggctttgtccatgtccgaattggcattcaaaggcttgtaggcgtcctgataggcatatccgtagtagaggtagtggtagtcctcctcggtcatcgagtcgtcgcccgactgataccgcagcatcaggttcgggtagtagtagggggattcggaatccagcgtctgccggataatatcctcttcgacaggtattttggccgttgccatcagaggcagaaacagcagcaggacaagcaattttctcatagccttttgtgtgcggcggttcagtgtgcgaatacggtgcggaacccgtttcgtgccgcattgttatataaacgtgcgatcaattcaaatcgtatttggcgatcagctctttgaagcgggcctcgagctgcggggttccgggaacgaggggcagccgcagcgtgttgccgatgagtcccaataccgacatggcgcatttcacgcccgtcgggttgccttcggcgaagagggcggtcacggcctcctccagacattcgtaagccttgcgtgctccttcgaagtcgcccttctttgccaggtcgatgcaggtcatcatcttgcgcgggaaggcattgaccgctaccgagatcacgccgtcggcgccccggctcatcaggtcgagcgtcagggcgtcgtcgcccgagagcaccaggaaatccctgctccgccagtcgagtatctcctgaatctggtcgatcttgcccgaagcctccttgatgccgatgacattcgggaagtcgcccgcaatgcggatcgtggtcgctgcggtcatattgacccccgtacggccgggaacgttgtagagaatgatcggcaggggcgaatgttccgatacggttttgaagtgctggtacaacccctcctgcgacggtttgttgtagtagggtgtgacgctcaggatcgcatccgcgccccgcaggtcgaattcgcgcaactggtcgagcacttccgaggtcgagttgccgcctacgccgatcaccagcggcacgcggcctgcgatgtggtttttgatgaacatggcgaccacagcccgttcgtgcaggtagagggtcggggtttcggccgtcgtgccgagtgcgacgatgaaatccacgccgccgtcgatgatgtagtcgatcgtgcgggccaaagccggataatccacccgtccgtcgggagtgaaaggggtggggatggcagcgccggcgccgctgagtttgtgtcgtatcatatcgttgataatgttatatttgacaattatattcttgaatgtttccgaggcttcgtcctgtttttcgaatccgttcgcggccgttcgtggccgctgtctgcgtatttgtatcccgtttcccttgaatttccttttcggaaggagtcggaaactgtccggccggagcctggcgagcgtaggagcgataaaggaggtcgtttgtattattttgttttttacatcattattttcggtgtcagggcataagcccgaaataatattgtgcgttttcctcggctccgggagtgccgtttcccgcctaaaacagcgacccctgttccgtgttgccgccgtcggttttgtcggtagtttcccgagccgaagggggtgttgcagacgtgtccccgtccgaagcgttctctgtcacgggcagtgttccgccggaagcgatcatcgccagcagttcctcttcggagatgaggcgtacgcccagtttggtcgccttttggagtttggccggtccgatcttttctcctgcgaccaaaaaatcgacgttggccgataccgccgcgaggtttttaccgccgtgcgcttcgatcagttccttcagttcgtcgcggctgtgaccggagaatctgcccgtgatgacgaaatttttgcccgccagactttccgattcgagggctttgttcgcggcttcggtttgcagccccgctttgcgcagccgctcgatgatccgcaggttctccgcgtcggcgaagtagtcgatgatggcatcggcgatcttgccgcccacctcgtcggcttcgatcaactcctcgcgtgtagcgtgcatcacggcatctaacgtacggaagtgtgccgcgaggtatttggccgtggtttccccgacgaatcggatgcccagggcgaacaatacccgctgaaaaggaacctcgaccgagccccggatgctccggatgatgttctcggccgatttttcgcccaaccggggcagacaggcgagctgttcggcccgcaggtcgtacaggtcggcgatgtcgtgcagcagtccgttttcgaagagcagttcgacggtctcttcgcccaatccctcgatgtccatcgccttgcggcggatgaagtggatgatgcggcccagtatctgaggccggcagtggctctgattgggacagtagtgcttgctttcgccctcgtatttcaccagtggagtgccgcattccggacagcgggtgatgtattggaagggacggctgtccgccggacgggccgcaagatcgacgcccgtgatcttggggatgatctcgccgcccttttcgacatataccatatcgcctacgcgaatgtccagcagagcgatctgttcggcgttgtgcagcgtggcccgcttgacggtcgttccggccaactgcaccggatcgaggttggcgacgggggtgatggctccggtgcgtcccacctggaaatcgacgctttcgagtcgcgtgagcgcttgttcggccttgaacttgaaagccacggcccatcggggcgccttggccgtgaagcctagctcgcgccgcagggcgtaactattgactttgatgactacgccgtccgtagcgaacggcagtttcctgcgctcttcgtcccagaaggcgatgtagtcgtcgatctccgcttggctgcggcagatccgcatcttgtccgatacgttgaatccccattcgcgggctttccgcatacattcccaatgggtcgtacagggcaggtcgtcgccagccagttggtagagcgtgcagtccagcccccgctgggcgactacggccgaggattgctgcttgagcgtgcccgctgcggcattgcgcggattggccagtagcggttcgccgttctcctcgcgttcgcggttgaggcggtcgaacgaggcatagggcatcagcacttcgccccgtatttcgaaaaaatcggggtagtcgcccccttgcagatgcagcggaatggtgcggatcgtgcggatattggccgtcacatcgtcgcctcgcgtgccgtcgccccgcgtcacggcacggagcagggctccgtgttcgtaggtgagcgagatggccgtgccgtcgaatttgagctcgcagacgaactccgtctgtccgagctctttctcgatgcgtccgatgaattcgtgcagctcgtcgagcgaataggtgttacccagcgaaagcatcggaaagcgatgttcgacgctttggaattcggttgtgagatcgctgccgacgcgggccgtcggggagttcgggtcggcgtattccggatgtgccgcctccagttcctgaagctcacgcatcataatgtcgaattcacggtcggatatttccggactgttttcgacgtagtatttatggttgtggtagtcgagtgtgcgacgtaatttttctattttttcacgtatcatacctctgttattccgtacgtaaaagtacataatttgtgcggaaagaccgcaaaaaataaaaaaaatgcaaaaaaaaattcgaccttgattccgatcgccaaattttgtttatacttgcacaaaaatttcggacgttttccgttcgcggggacggtggtgcccctgttcgagcttcgtcgaacgcgggaaaacgacggatgaaactccacacgatcgaccggcgacggcaggtacggaatcctgccgggcttggatatgacaaagaaaattccgcattttcgacaagtgggaacggagcggagcggaggaacccgctctgccgaacgaaacgactattgaaaacgaacatcgaaatatggcaaactctacaacaccgaaaaaacgccttgtcgccagcttccgtaatctgccttcggaacttcaggaggcaataaagcaaaaatatcccctcggattctccgaggcgatgatgcgcatcgacaaacctaacggagagtttttttacgctgtgcctttcgaaacggacgagatcaattatctggtgaagattgacgtgaagatcgacgaccgtgcggacgatgacgaagataaggactattacgacgacgatatcaaaggcgccgacgatttgcaggacgacgacaattcgggcgacgacgaggaccgggacgacatgtagttttcggaacggaatttgttttcccctttatcataatattactgggtattcggacatttttcggcaggcggccccggaccgaacttattcgaggttcggcgtagtcggagaatgaatggcattcggttcagacggaagcggtttgcacgtcgccggatgcggaagacggcggaaagatcgatctttccgctcctccggccgagccgaatgtttccgaacgatccgatacggaaaacgatcgctaaaaatgaatcctttcatccgaaaaataggttttggagttctgctggcgactctcttcctgccgctgcactcctgcgggctgggagaggattcgcgcgatgaagataaccggtacgtttatcttcggtttgcggatccggctttcgaagcatactgtttggagcattgggatctgaacggcgacggacgtatttcccgctacgaggcccagcgggtctgggatatggactgttcgtcgctcgggatcaagacgctggcgggtatcgaggagttcacggccttgcgtaagctcgattgcagcggtaacgagatcgttgcgctcgatgtgcgcaaatgtattttcctggagcagttgaattgtagtggaaatgcacttatcaatcttgatgtcaaaggattgcgctttctaaaccggctcgattgcagcgacaacgacttaacttatctcaatttggcgactaacgcggctttggagaacctccggtgcggtggcaaccgcttcgcatcgctcgacatcagccgttgtgctacggacatgatccgtgtcgatacggtacccaacgagagcctttcggtgctctataaacgggcggagcagcgtatcctgaacctgaatgtggacggcggtacgaaagtggaggttttgtagctcggaatattctgacggttaaactataagcaagtgtcttcggaggggacacttgtttttttgtgccggaaatttgagatttcgacaaccccgaacgggtttttaacgaaaaattagtacctttgaaggcaaaatcgtttttttgcgattaaatttttcaaaaagatcatgaataaagttgacgtcatactcggcctgcagtggggcgacgagggcaaaggcaaggttgtcgatgtgctgactccccgttatcaggcggttgcgcgttttcaaggcggtcccaatgcgggtcatacgttggaattcaacggcgaaaaatacgtcctgcgctcgattccttcgggtattttccagggcggtaaaaccaacatcatcggcaacggggtggtcctcgacccgattcttttccgcgaggaggctacggcgctggccaagagcggccacgatctgaaggggcgcctgcaaatttccaagaaggcacacctgatcctgccgactcaccggatgctcgacgccgcgcaggaggcggccaaaggcagcgcccgtatcggtacgaccggcaaggggatcggcccgacctatacggacaaggtaagtcgtacgggcatgcgtgtcggcgacgtgctgggtcctgaattccgggccgtttacgaccgggtgaaagctcgtcacgaggcgacgctccgcagtctgggatatgtttacgatatcgcggaactcgagcgccagtggttcgatgcggtcgagtatctcaaggagttccggttgatcgacagcgaatacgaaatcaaccgtctgctcgccgaagggcagcccgtcctggccgaaggggcccagggtacgctgctggacatcgatttcggctcttatcctttcgtcacctcctccaatacggtttgtgccggtgcctgcacgggcctcggcatcgccccgtcgcgtatcggcgaggtgttcggtatcttcaaggcttattgtacccgcgtgggggccgggccgttcccgaccgagctgttcgatgaaacgggcgcccgtctgcgggatctagggcatgaatacggagccgttacggggcgcgaacgccgttgcggctggctggatatggtggcgctcaagtacgccattatgatcgacggggtgacgcagttgattatgatgaagagcgacgtgatgaacgatttcgacacgatccgtgtggctacggcctacgagatcggcggtgagcgtacggaccgtttcccttatgcagtagatgctccgatcgtgcctgtttataaagagttcaaggggtggaaatgcgatcttcgcaaattccgccgctacgaggatttcccggccgaattcaaggcttatgtggagttcatcgagtgggaaacgggcgtgcccgtgcggattatttcggtaggccccgaccgcgatgaaacgatcgtgcggtaaatacagatacgagtaaaatttattcatttaaaatagtacaaatgaaaaaacagttgaaaattgttgtcctggcaaagcaggttcccgatacccgcaacgtgggtaaggatgccatgacccccgaagggacggtcaaccgcgctgcgctgcctgcaatcttcaatcccgaagatttgaatgcactcgaggctgccctgtttctcaaggacgaaacggaaggcagtacggtacatatcctgaccatgggtcctccgcgtgccgccgacatcatccgcgacgccattttccggggggccgacggaggttatctgctgaccgaccgtaaattcgccggctcggatacgctggctacttcatacgctctttcgtgtgcgctgcgcaagattcagcccgacgtgatcgtcgcaggccgccaggccatcgacggcgatacggcccaggtaggtccgcaggtggccgaaaagctcggtttgccgcaggtgacctatgccgaggagattctcgagatcaaagataagtcgctggtcatcaaacgtcgcctggagcacggaaccgaagtggtcgaatgtccgattcccgccgtggtgaccgtaaatgcttcggctgccgagtgccgcccgaagaacgcccgccgcgtgatgaagtttaagaatgccatgacggcctccgagatcgctgcggaaccgacgtcggaagctgccaagatggccgcgtcgaagccctacctgcagattttcgagtggagtgccgccgatgtcgatccggacgataaccagttgggcctgaccggttccccgacgaaggtgaagaagatcgagaatgtggtgttccaggccaaggaagccaagaaactgactgccgacgacaagcagatcgaggaattgatggttgaacttatcgcgagccacacgctcggttaatcagggaggaaacgagatatgaataatgtatttgtatatatagaactcgaaaacggagtacctgcggacgtgagtctggagttgctgaccaaaggccgcgagctggccacgacgctcggcgtgaagctcgaagccgtcgtactgggtcataatctgggcgatatcgccaaggagttggccaaatacggcgccgataccgtgtggacggccgacgacaaggagttcgctccgttccgcacgttgccccatacggctgtgatgtgcggtctgatcgagcaggagaagccccagatcgcccttttcggtgcgacctccatcggccgcgatttcgccccgcgcgtatcgtcggcgctgttcagcggtctgacggccgactgtacgcagctggtgatcggcgaccataaggacgcgaagaccggtacggagtataagaatctgttgtaccagattcgcccggccttcggcggcaacatcattgcgacgatcgtgaaccccgaccatcgtccccagatggcgaccgtccgcgagggcgtgatgcgcaaggagtacgcagccacgccgggtgccggcgaggtgaagccgatcgactggaagaagttcctgaaagagagcgacctggtggtcaagatcctcgaccgccagatcgaagaacgcaagatcaatatcaaaggcgcgagcgtggtggttgccggtggttacggcgtaggctcgaaggagaatttcaagctgattcacgaactggccgaggtgctgggcggcgaagtcggcgcgagccgtgctgcggtggacgcaggtttcacggagcatgcccgccagatcggtcagacgggcgttacgatccgtcccaaactctacatcgcgtgcggtatttcgggccagatccagcatacggccggtatggaccagtcgtcgatgatcatctcgatcaacaccgatcccgatgcgccgatcaacaagatcgccgactttgcgatcacgggcgacctgaacgaggtgattccgaaaatgattaagtattacaaacaaaactcgaagtaatggctaatttctttttagataataaggatttgcagttccaccttcagcatccgctgatgcgcaagatcgtggcgctgaaagagcgtaactatacgctgaaagaccaccacgagcttgctccgcagaattttgaggacgcgatggacaactaccgccgcgtgctggagatcgccggcgaagtgtgcggcgaggtgatcgcccccaatgccgagggcgtcgatcacgaaggtcccagagtcgagaacgaccatgtcgtttacgccgagggtacggcccgcaacatcgacgccattaccaaggccggcttgagcggcatgaccctgccttacgagtacgacggcctgaatttcccgctggtctgcttcgtcgtcgccaacgaaatggtggcacgcggcgatgccggtttcgagaatatctggggtttgcaggactgtgccgaaacgctcaatgaattcgcttcggaagagcttaagcggatgttcctgccccgtgtttctgcgggcgagacctgcgcgatggaccttaccgagccggatgcaggttcggacttgggtgccgtgatgctcaaggccacttacgacgagaagagcggccgttggctgctgaacggcgtgaagcgcttcatcaccaacggcgacggtcatatttcgctggtgctggcccgcaccgaagagggaacttcggacgcacgcggtctttcgatgctcgtgcacgacaagcgtgacggcggcgtcaaggtgcgccgtatcgagaacaaactcggtatcaagggttcgcccacctgcgagctggtcttcaccaacgctccggcccgtctggtcggcgaccgtaagatgggtctgatcaaatacgtgatgtcgctcatgaacgctgcccgtctgggtatcggtgcacagtcggtgggtctttgcgaggccgcttaccgcgaggcgctcaagtatgcgcaggagcgtgcccagttcggcaagccgatcattcagttcgccgccgttgcggagatgctctccaatatgaaggcgaagttgcagggtgcccgcgcgctgctctatgaaacgacccgtttcgtcgagatttacaagcagtacggccacatcgcgcaggagcgttcgctcgaaccggaggagcgccaggagatgaagttctacaatcgtctggccgacggtttcacgccgctggtaaagctcttcgcttcggagtatgccaaccagctcgcttacgatgcggtacagattcacggcggctcgggcttcatgaaggactatccctgcgaacgcctctaccgtgatgcccgtatcatgaatatctacgagggtacttcgcagttgcaggtcgttgcggcgatcaatgccgtgaccaaaggtacgttcctggagcagatcaagacctacgaggctgcggactatgcccccgaaatgtgcgccgtgaagagcaaactgaccgacctgcgcgtgaggttcgaggagatggtcgcccgtgtcgaaactctcgagaaggagtgcagcggctataaggatttccatgcccgccgtctggtggaaactgccggtcatatcatcattacttacctgttggctcgtcaggctggagaatcggccgaatacatcgattccgcgcggatctattgtaaactggcagaaagcaaagtcgccgaagcctacaattacctgatgcattcggatgtcgaggatgtcgatctgttcaaaaaggtcggccaggaggaggcgatcggttaattgccgtcggatgttttgaaagggaagcggtgcgttgtaccggcgaaacttttgaattcgatatatgttgagaagggaagcggtcgttcgcttcccttctcattgattttggcgggaattttgtgccgtgacgaaagggcgggttatttattaaaaaatatttgtattatcctataaatcctgacagagacagttatgttgaaaaaagtacttctgatggcagccgtcgcgttgctcggtctgcccggtctggctcatgcccagttggggcgcggtgaaatttcggtggggtacggtgtcgctcccgtgaccgactggatcgacgcttacagcgataagttgctcgacgtgctcgatatgaaggatgcgtcgatggacagctggggcggtgtgtcggtcaattacaccttccgtatcgtcggcgggttgggtgtaggcgctactttcgtctattcgggtaacaatcagcggttggccggtaagaaaatctcgaccgactattattcgatcatgccgcacctgaagatgcgctggctcaacctgcgtatcctgtcgctctattcccgcgtcggtgtcggactgactttcaccgaatcttcgggcgaggggcagagcgaatcggcccggcagtgggcttttcaggtttcgccgatcggtgtcgaaatcgggggtaaggtcgcggcctatgccgaagcgggaatcggtacgatgggatcgcttgtcgccggtcttcgcttccgcttttaacggatcggtcagtgtagaggggagtcgcaacggaccggatgttcggtcggttcgagaaggagaggtgctgtgtcgcttccgcaaggattttgcgcctggcatgcgatgccggcgatttgcgtgcgagagagcgatcgtattcggatgagtgggagaggaccgatgtgcggttgatgtccgatttaccggaatcttcggaaagaacgaaaaaaacaggatctcgaaattgcattgcttcgaggtcctgttttttcagtgccgatcgcgagggcgattggctgttctttaagccgcattcccggccgcttcgtattcggccttgatttcaaggtaaaaattcgcgaagacagtttggtaataggggactatccacagcatagcgataccgagcgtgagcaggctgagaagcgaccagccgatcatgccgagctgcatgagaaataatcgcatcttgtgtccgcgcatcatcgccatactgcgttcgatcgcctcgtcgcagccgatttccggattgtcggatacgatgtacagcgccattgcatacgacagtcccttgatgatgccggggacgatgagcagcaacgtccaaaggaacgtgtagattccagataacaggcccgttccgatggctttccagtaataggtattgttgaatgcgcagaacagtccttcgatggtcagggggcgcttgtcgcgggcgaatgcgaggaatgttcgcagaagcccgaagttgatgggcagatagacgaagatcaggagcaggaccgcaagacctgcaatggctcctcctctgttgaggatgccgtaagggacatagagtacgcaagatacgacgtagagcaggatcgccgatccccagttccccttcattgctgcgagggacgattgtctgatttgggaatttgtttgcgtagtggggtttttatggtttcttttgcaaaagtacaaaatcccccccccgtgcaagttttcgggcagaaatgttacttcggaatgaaaaaaagcgttttttcggcagcgtacccttgctgttattcgcgcccgtgtagtcgggcgatgacgatcgcttttggcctgtcagcggtctatcccgtcgcgggaaaggacgccctgcgtgtagtaatgtttgatttcccgcatttcggtcaccaggtcggccgcgtcgataagttcctgcggggcgtaacgtcccgtgacgacgacttctaccgcaggatgacggcggttcagggcatccagtacggcgtcgatcgtcagcagtccgaaatgcagggcgatggtcagttcgtcgaggatgactacgtcgtattcgccgctctccagcagggcggcgcagcgggtcagaccgtcgcgtgccatccggatatcgatcgcttcgggatccttgccgataaaacatccccgacccaactgctcgatcttcacttggtcgaagagttgcccgattttcgtttcgttgtatcgcatcgacttgacgaactgtccgatgtaaacgcttttgccggcgcacaaagctcgcacggccagtccgaacgcggccgtcgtcttgcctttgccgtttccggtatagacgtgaatatatcctttcgttgagtccatgcggcaaagatagtgcaggtttgtggcagagccaaataaatttgggcggaaccgagggcgaccgctgtccggaaagacgatataaatccgaatcgaagcggggtatatttgctctcatgagcaaggccggttgcgaggtgacagccggttgtggaaattctttccagcggattttttgcaaaggcggaaaaggtcggagcaaattcgtgccggaaaaaatttgaaaatagaatccctttcgttttttcgggaatacgtcgtttcagaggttgatccggttggcttgcgtgaagatggcatcgagcagccggaataactccgcttccagctcttcgcctcccggatcgccgcagagtgtgaagatttttcccggaggagccccgtagcatatcgtgccggccgcaccgcaggtttcggacccgcagatgatgactgcatcgatcgcatcctcgtgacgcatcaaggcgttgtaaagagccagcaactgccggggtgcggttattttcgggacggggagcaacgctccgcaggttccgatttcttcgatcgaatgaatgagttccaggtcgtaacgtccggcaatcagctcggctgtatcggccggtattccatagagtatgatattcatcgttatcggttaaaaaaaagtgcggcgacatcctaatctcttgaatgttatggcagtaacaatggttatcgccgcactttcgtttgtcgttcattactggaaataccgctgtggcagacgaggaaatctcttgtaccggaacggtacaacgatccctgtgtcgggacggttttcctaaaatttatcaagcgaaacacaaccgaaatcaaacgcctaacccacgagcgcctttgacatcgaatcgatctggcaggtcttctgactcactcctgttccgaagccttcccggtccgtgcggaccagtggcagagatgttcgaaacgtcgcggagcttcacagcagcgggactgtccgggattcacacccgattcccttttcattcctctccttgcataaggagccggaaaccaaatctgccgcaaatataacggtatttttcaggaaacaaaaactctttccgggaatttttcttttcgccggttgtttccgatttggcgggaatacactacttttgtgccgtcatgaaaacaaaacaggaactcaccgacattctcgatttcgttgcggaatacgcttcctatctgttaggatcgggagtgcacacttcgcgtgtgatccgcaacgcacagcgcatcggaacctcgcagggagtggatattcagttgtcgagttttcagaaaagcataatcatcaccgtacacgacgaacggagcggcgaagtcgttacccgtgtggtaaagatccctgcgctgccgatcagcttcgaacggaattcggatctgagcgctttgagttgggatgccgtcgatgaacacctgtcgctgaccgacctgcgcgaccgttacggagagttgatcgccaagccgcgtatggacccgattttcgtcctgctgacggtcggcctggcgaatgcctccttttgtcgtctgttcggcggggactggacggccgtgggcatcgtcttcacctcgacgctcgtcggtttttccgctcggcagcggatgcaggcgcatgccgtgaatcacttcctggtttttatcctttccgcctttctggcttcgctctgcgcctcgtcggcattgggcttcgactgtacggccgaggtggcgatagccaccagcccgctctttcttgttccgggcgttccgctcatcaacggggtgatcgacatcgtcgaagggcatatcctgatcggttgcagccgtctgatcaacgccctgctgctgatcgtctgcattgccgtaggtctttcggcgacgttgatgatcgttaaaaacagtttgctatgattgcagtggatattctgttcgacggggtgttcgcggccgtggccgctatcggattcggggcgatttccgatcctccggtgcgggcatttccctacatcgccctgctggcggccgtcggacacgccttgcgtttctgcctgatgagttatgcggggatcgacatcgctacggcttcgctctgtgctgccgtcgtcatcggtttcggcagcctttggctgggacggggtattcgttgtccgatgaccgtgctttacattccggccctgctgccgatggtcccgggtatctatgcctacaagacggtctttgccctcatcatgtttctgcaatcgctcaacgatcccgggcagggcctggaatatatgcagcagttttttctgaatgccaccgtgtcgttcagcgtgattatcctgttggctgcgggcgccacgctgccgatattcatcttcaaccgccgggctttctcgctcacacggcgcagacggagccgtgaataaactcttttcgtatggatgttttctggaatacgatcgccgcatacaacgccgccacgtggcccgtacagctcctgctggttgcggtcgctgcggtgctgacccttttgctttatctgcgtccgacgcgtgccgtgcgtgtggcgatgaaggtttttatggccgcattgaatttctggatcgcgggtgtatattattttatctattgcgctccgcgcgaacattacgatattctggccctgttctgggcggtcatgggttgtatctggatctatgacctggcggccggacacgattcgctcgggcgcacgggacgacacccccggtttgctttggtgctgttctgtatgccgctcgtttatccgctcttctcgctggccctggggcgtacttttccgatgatgacctcgcccgtgatgccctgctcggtcgcagtcttcaccgtcgcgttgatgctggctttctccgagcgggcgaatatcgtgttggcgacctttctctgccattgggcgctgatcgggttttcgaaggtctatttcttcgggattcccgaggattttctgctggcgtgcagcgtcgtacccgctctcttcctctttttccgacgttatatccggaatcgggcctgcgaatccaccaaaccctccccgcgtgtgctgaatgcactgcttgccgtcctgtgtgccgtcatcggggttttctttacttttacgtttctgcatcaattcgatctctttaccgaaatatgatcccataccgagccgaagatttcagcgtgacgattcccgtcgccgattatatcgcccgtttccgcgatgccgagcgtttcgagggttgctgccgcacctgtccgaactatggacgcagttggggatgtcctcccttcgatttcgatgtcgaggagtacctgacccggtattccagggcattgcttattgcgacgaagatcgttccggaacagggcggtcttcccattgcggaggcaaagcggttgatccaccccgaacggcagcggctcgagaggcgtctgctcgaaatggagcggcggtatggaggacgttcgttcgcctacgtcggcagttgcctctattgtcccgatggtacctgtacacgtcccgaagggaacccgtgccgccatcccgaattggtgcgtccgtcgctcgaagcctgcggcttcgacataggccgcacgacttccgagctgttcggaatcgaactcaagtggggagccgacggaaaaatgcccgagtacctgaccctcgtgtgcggttttttccacgatggggacggtgtcgtgtggtaatcgcaagatacaaaaaggctcgctgtacagcgagcctttttcattccggaacgatcctcctatgcctgttctgccaggatgcttttacgcggatggaagatgttgaggttgagccgtccgacgatgtcgctcaaggcagcctgggccttgaccgagttgccggcgtcatccagcgggggtgcgaaggccgctacgcccatcacgcccggaacgacgcccatgatgccgccgcccacgccggtcttggccggaaggcccgtgttgaagagccagtcgcccgtatgctcgtaaaaaccgacggtggccatcatcgaggcgatgcgcgtacccagatcgggcttgaagaccgtctgtttggttacggggttcacgccgtcgaatgcgatggtcgcagccgcgaccgccagttggcgggccgttacgccgatcgaacactggcgggtgtagaggtcgagcgccatatcgggatcgtcgtagatgcgcgaatagtttttcagcagccacgcgatcgacttgttgttgaagttggtcgcggtttccgatttgtaaagttcgtcgatgacctccacgctcgagccgcagagtccttcgatgaatccctggatcgcctcccatttcgcgtccggcttcccgatgggttttatcatcgagcaggcggcgatcgcaccggcgtttaccagcggtgtcgaagggtgatccttttcgagcaggatcgccatgatcgagttgaaaggcagtcccgtagcgtcggcaccgatcttcgtcagcacctcttcggggctgtattggttcatcgttagaatggccgtcggcactttcgataccgattcgatgccgaacttgtattccgtgtcgcctgcggcgataatctctccgtcgggcagacagacggcgatgccgaacaggtcggacggtacgttggccagatagggtatatagtcggcgtttttacctcctgagaccgctttggtctgttcgaaggcgtgctgtacggcgtcccgaacgtcttgtttcgtgagtttttgtcccatgacgattgcttttattgtttgttttcaggagccgtattacccgtattttgcgggttgttttgcggaatgttctgtgtttccggggctgcttttacttcccaatggaagggtgcgaattccgcagccgcctgcgggtctttccacgagggcttgcgcatggcgtagatgacgaacggagcgcctaccactaccacgcagccgataatgagtacggagaaccatacggtgttgctgccgaccgagatctggctgggcggaacgaagctgaggatgaaggcgagcagtgcgccgcagaagccgaccgtaccgatcgtccacatcagaccgttaccctttttgcccaggcggaacggacgcgcggtgcctttcatcttgtagcgcagcacgatcgccgccgagaacatcagcatgtacatgatcaggtagagcagtacggtgagctgcgagaggatctggtagaacgactgtaccgaaggcattacgacgaacagcagcgccagcagcgttaccacgccgccctgaatgagcaggatattgcgctgtacgccgttcttgttgctcttctgaaagaacggaggcaggtaaccggctctgcccacggcgaaaatacctttcgacggacccgatacccaggtcagtacgcctgccagtacgccgaacatcagggcgacggcgataatcggcgaagcccacgagatgcgcagataatggaagtagttgtcgaagccgatcaacagcgactgggtcaggttgatgtctttggccggaatgatgaagcccagcgagaacgtgcccagcacgaagatcagcacggtcaccagcgagccgatgacgatggctttcggatagttgcgcgaaggattcttcacgtccatcacgtgaatacccatcatctccataccggcatagaagaggaagatgctgctggccaataccaggttgtcgaaattcgtcaggtcggggaagaagccctgcgacatatccatgtagttatggccgccggtcgaaatgtaaatgatgcccagaagaatgagcagacctgccggtatgatcgtaccgatcatacctccccatttgctgattttgccgacccagtccatgcctttcagagaaacgagtgttgcgacccagtaaatagccaatacgactattagcgtgaagaccttgttcgacgcaagtgacatgtcgtacgtttcgttcatgccgataaaggcgatcgatacggcgccgaaggtcagtaccgtcgggtaccagatcgtcgattcgatccactgaagccagatggcgagaaatcccgtgcgtgcgccgtacgcttcgccgacccagcggaatacaccgccctgtttgtcggagaacatggccgccagctccgcagccaccatggccgtcgggatcaggaagacgactgcggcgaacaggtagtagaatgccgacgataagccataaaccgcttctgcgggaagacctcgcagacttactacggcagtgatgttcataattgcaagtgtcatcacactcaatttgaaccctgtgctggttgtagcttttttcacatccataataattgaatttaaaaattgtttgaactttattcttcattttcccggttcggcagcgtccgggagaaatccggcgttgcgcttataccttgaaaatgtcgttttatccgtctgtttgaagctcgttttttcgtgacgatttgtaaaattgcaagtaccgtgcaaatcggtcggatgtttccgatttttgttgtggaccgccgtatcgcttcgtgaaaaatggttatatttgtgctgtatgaaatgttatcccggcaggtcgaagcgcgtgtttgttatcgggcctttccgtttgccgtctatgattaaggtatttcccgatatagcttcatagatttggcactgtctcgggtttccgtatgattgaagttgtgcgttatgttgcgatattttttctgtttgctggcgctcctggtgctgttgtcttgttccggccgcaaatccgcaccggcgacggctccggaaaaggtcccgccgcgtcttttccgggttgaggctccgcccggaccgatggatgacgcccagcggtatgcctatctgcgcgagcatttttgggacgatctggattttgcggataccgtttttatcgtttcgaccgacacgatacatatgttgcgtgcgttcgatacgtatatccggaatttcgttacggaaagcgacccatcgcctgtcgcggagctgatgcgcaaggcttccggatcgaaaaccatgctggagtatttcgctatgctggccgagcgggtgctgcacgaccccaactctccgctgcacagcgacgaactctatattcccgtgttggaggcactcgtggcgagtccatggctcgacgagtgggagaagatcgctccggagcacgacctgcgtatggcgctgcaaaacagggtggggctgcctgccaacgacttccgctatacgctcgcttcgggccgtacggggacgctttacgggatccgggccgactatacgctcgtgtttttcaataaccccgactgcggcatgtgcgaacggatccgggcggaaatcgtcgcctctccgttgttgtcggagatgatccgtgcgggacggctcgaggtactggcgctctatcccgacgaagatctcacggcgtggcgcgctcatgctccgcaggtaccgtcgtcgtggatcaatgcctacgacgcaggagcccgaatcagcaaagaggagctttacgatctgaaagccattccttcgatgtatctgctggaccgagataagcgggtgctggctaaagatgccttcgaggtggggtatatcgaatggctgctcgaccggcagccgcagtgatgggcgtataggtttgttttatcgccctatcagtaaaagtgatcggatttttgcggaacgtgaccccgataattcctatctttgcttcgcaaacgaaataacacacacaatctaacaaaataaagagaagaattatggctaagaaatggcgttgtaccgtttgtggatatatccacgaaggtcccgaggcacccgatcagtgcccgatgtgcaaagtaggcaaggagaagttcgttgaggtcgaggagaaggccggtggtttggatttcgtgacggagcataagctcggcgacggcaaaggcgccagccaggagttatgggaaggtctgaacaaccacttcatgggcgaatgttccgaggtgggacaatacctggcgatggctcgtcaggcggatcgtgagggctaccccgaaatcgccgaggctttcaagcgctatgcctgggaggaggccgagcacgcttcgaagttcgccgaactgatcggcgacatcgtttgggacaccaagaccaacctgttcaaacgtatgaatgccgagtgcggcgcctgcgaggacaagatgcgtctggcgcgtctggccaaggagcagaacctggacgccgtgcacgataccgtacacgagatggccaaggacgaagctcgtcatggatctggtttccagggtctttacaatcgctatttcaaggcgtgatttggaggtagtataaaaggagaaggggtcgctcgattcgagcgaccccttctccttcggattttattcttgcggtactttttgtcagagtttccgcagaagactttcgagaacggagcacaagatgctgttcaacttgtcggtgatccagttgtaacccgagcgtacgatctgtgccatttcggcgatgttgtcgagctggtcgctgatgtattggacggcaggacgcactgaaaccaaatagacgattagggcgatcagggcgaaaacgccgcccagaatcaacgtcgcccagatcatcgagccggtcagttgtgcgagccagatgacaagggcccataacagcatcaccacggcgatcagggcggtgattccgaatacgacgatcggagtgatcagatgcctgcggggttggttctcgttcattgtcgtagaaagttgggcgacccgggcggactattcgtcgcactcgctgcacttgccggttacttcctggtatttgttgcgtgccttgtcgattcctttgttggcgagatcgcggagcgattcgcggacttcctgacccgtgcggggcgttaccaaggcagtgatagcggcacccagtaccagaccgccgatgaatgttgcgatacaagttgtatttttcataatcgtgaaattttagttcattcgaaagagttgcaaatttcggaccgttcttgtgggctgtgaagcgctattattggccgttaggttggaaaatggcggcagattggttacttttgggcgtggaagcagaaagaaatcgttccgtggcctttaccggccatcaggattacgacggcagtgccgacggaatcctgcgtgctgcggtgtatcgattatggtcggagggcttccgcttcttcctgagcgggatggcctgcggtttcgacttagcggccgccgaagcggtcctcgctctgcgcggggagtgtgcgggaatggagctcgtcgccgtcgtcccgttcgccgggcagccggatagtttctccgacgccgataagcggcgttatgcggacgtcctggcagcggccgatcggacggtggtgctggccgacagttacagccggggatgttattaccggcgtaacgattatctggtggatcatgccgtgcgcgtggtcgcgtggtacattcgcagaaacagcggcacgggttataccgtgcgtcgggcccggcatcaggggatcgaagtcctgaatctctacgaggataagatgaacccgacgcttttctgaacggattcgctttccaatgctccgaacgggttgttctctctatccggcggtcggggacgatccttggacctgccgaaatcggggaaaggccgcgacttcggagcgatcttgtttcggcggtattcgccggatctgtgggacgtgtgtaccgtgccatcctgttttgtattgtcttatcttatcttatcttatcccgtgccgtcctatcccgttttgtcttgtactgtgctctcccgtgctttgaggcggatagtcgttcgaaacttttgttttccgaagcgccgggattctctttcttggctgcgtgaaaaataatccctaactttacgcgttttataattcatcgctgcggcagagagccgcgcttttattcgtcgtggaagaaaacaacatcaaaatactcggtgcgcgggtgcataacctgcaaaacgtcgatctggaaattccttgcgggaaactggtcgtcatcacaggactttcgggttccggcaagtcgtccctggctttcgatacgatctatgccgaagggcagcgccgctatatggagacgctttcgacctatgcccggcagttcgtcggaacgatggaacggcccgacgtcgataagatcacgggcctcagccctgtggtggccatcgagcagaagaccaccaacaagaatccccgttcgacggtcggtaccgtaaccgagatcagcgatttcctgcgcctgctctatgcgcgggcttcgcgggcttactctccggtcacgggcgaggagatggtccactatacggacgaacagatcgtcgagctgattctcaaagagttcgacggacgcaagatcgctgtgacggccccgatcgtcaaggggcgcaagggtcactaccgggagttgttcgaaagcctgatcaagaagggttatctctatgcccgtatcgacggcgagatccgggagttcacccccggtatgaagctcgaccggtacaagatccatacgatcgacctggtgatcgaccgtatggccgtcggggattccctgcgcgagcgtctgctcacctcgctgtgcgaagcgatgcggcagggcaaaggaacgatggccgtctatgactacgaaacggggaagatgcgttactattcgcgccatctgatgtgtcctacgacgggtgtggcgttcgaagatccggcgccgcacactttctccttcaactctccgaagggagcctgccctcattgcaacggtctgggggaagaggcggtcttcgaccgggagaagattctgcccgatccggcgttgtccctgcgtgatggcggcgtggagccgctcggcaagtatcgcaacaacatgcttttcgccattctcgaaatgctggggcggcgttacgatttcacgctcgacgatccggtggggacgatttccgaggagggtatgaatgccattctgtacggggattccgagccgctgacgatcaatctcgccgagttctgctcgacgggcggcaacaacctggtctcctgggaaggcgtggccgaatacatcggccgcaccgaggacgaggactccgcccggagccgcaagtggcgcgagcagttcctggtttataagaaatgcagcgtctgcggcggtacgcgcttgcgggacgaggcgcttcatttccgcatcggggggctgaacatcgccgaagtgtccgcgatgtcgatcgcccgtttttcggagtggatcgccgacatcgaaaaatatttctcgcccaaggagcggaagatcgcccaggagatcgtcaaggagatccgcgagcggctccgcttcctcgtcgaagtcggactgggctatctctccctggcccgttcctcgcgttcgctgtcgggcggcgagagccagcgcatccgcctggcgacccagatcggctcgaagttggtgcacgtgctttatattctcgacgagccttccatcggtctgcaccagcgtgacaacgagcggttgatccgcagcctcaaggagctgcgcgatgcgggcaattcggtcatcgtggtcgagcacgacgaggatatgatgcgggcggcggactatatcgtcgatgtgggaccgctggccggacgcaagggcggccggatcgtcgcggccggttcgttcgacgatatcctgcatgcgaattccattacggcggattacctcaccggtcgtcgccggatcgaaattcccgaaaaactgcgtcccggcaacggcaagagtcttattataagaggagcacggggcaataacctgaagaatgtcgatgtcgagttcccgctcggcaagctgatctgcgtgacgggcgtcagcggttcgggcaaatccacgctggtcaatgaaaccctgcgtccgatcctgagcaaactgctgtaccgctcctacgaccagcctctcgattacgattcggtggagggtacggaacacatcgacaagctcgtggtggtcgatcaggctcctatcggtcgctcgccgcggagcaatccggcgacctattcgaacgtcttttccgacatccgcaagctgttcgaatcgacgcccgacgcccagatccgagggttcaaggcggggcgcttctccttcaacgtgaagggcggccgctgcgaggagtgccggggtgccggagtgcagactatcgagatgaatttcctgcccgatgtctatgtcacctgcaaggcctgcggaggccaccgttataatcgggagacgctcgaagtcaaatacaaagggaagaacatcgacgacgtgctgaacatgacggtcaatatggcggtcgagttttttgccaacattccctcgatccatcagaaactcaaggctattcaggacgtgggactgggttatctgacgctcggccagccctgtacgactctgtcgggcggcgagagccagcggatcaaactttcgagcgaactctccaagcgcgatacgggtcgcacgctttatattttggacgaacccacgacgggactccatttcgaggatatccgccagttgctcgacgtattggccaaacttgtcgatcggggcaatacggtgatcgtcatcgagcacaatctcgacgtcatcaaggtcgccgaccatctgatcgacatcggacccgaagggggcgaggagggcggccggatcgtcgctaccggtacaccggccgaagtggcacgctgtccggagagttatacgggcaggtttttacagaaattgggactttaggcaaggattttgcaatttcatgatgcaaaacctctttgcattatgaaaaagattttcgcattggcactcgttgccgttttttgcctcgcaggttacggggtaagcgcacagacacagagtaagaaccagaaattgagtcccaagcaggagaagcgggaggcgcgcgagcagcggcgtgcgcagcgtcaggctgaatacgaacgctatatcgattctctggttacatcgggcaattttcagttcatacccaacagtatgcgtgttatgccggccggatcggagcacctgattaccaatccgaatttcggattgcagtattgggacggagaattcgatattttcctgccttacgtcaagggtgcggtgatgccgtattatctgacggtactcaactacacgatttccaatcccgaggagaccctcaaggagcagagccccaacggttgggaggtcactttcgtcacttcgctcttctctgcgaccaggtatgtctttacgctggatatttatgccaagaccggcggtgcgacgctgaccatcaccaattcctggaacattacggtgcagtattcgggtacgatcacttcgctgtaacggcggttttcggatgagttttccgaaatattcgaaaggaaggctgtggatttcgatccacggcctttttccgttcgtcgaaggtgtctttctttcgaaataggcgaaaaatagtatctttgcagaagatcggatacgcctcggaaaactgtgagcaagctcccgttttcttctcggctttcgctatctttgacttcgtcttagatactccgcctcggcaaaatgcaaatggatttgcttttgcgttcggcttattcgtatctttgtgaatcttaacgcgtgcatgttatgcaggatattataaacggacgctgcggctggtgcggaaccgacgagctgtatgtgaaataccacgacgaggagtggggccggttggtgaccgatgagagaaaacttttcgagtttctcgtcctggagagtgcacaggccggcttgagctggatcacgatcctccgaaaacgggaggggtaccgcaaggccttttgcgatttcgaccccgagcgggtggctcgcatgaccggagaagacgtggagcggctgatgcggttcgacggtatcgtgaaaaaccggctgaagatcgaagcgacgatcactaatgcaaggctgttcctggctgtccgggaggagttcggcagtttttacgactacaccctgtcgttctttcccgacggtaagccgattaccaactctttccggtcgttgagcgaaattccggcttcgtcgcctcagtccgatgccatgagccgggatatgaaaaagcggggattcaagtttttcggaaccacgatttgctatgcccacttgcaggctgcggggtttattgacgatcatctggccgattgcatttgccgaaaaggtaaataacggtataatttgaaaatgaacgacttctgttccgccttccgtgtcgtgcgctggaaattccggaaccgggatatttcgcagaagctgcgaatctgacggagcgagcgggagagaggatattaacttattgaatttacgatgaaatacgcgattatttcgactgaaaaaggcgacatgaaggcggagctctatgagaaagaaacgcctgtcacggtggagaattttgtgaatttggccgggaagcggttttatgacggactgacgttccatcgcgtcattcccgatttcgtcattcagggcggctgccctcggggtgacggtacgggtggaccgggatataccattccctgcgaaacatccgccggacgacaataccacgaccggggtgtgctctctatggcccatcggggcaaggatacgggcggctcgcagttctttatctgcatgaaccgtgaaaatacgcagcatttggacggcgtacatacttgtttcggtcgtgtgatcgaaggggtggacgtgatcgacgacatccgtcccggcgatctgattctctcgattcggatcgtcgaggagtagatttgcgaaccgccccgaggccgtttgtcccgacccgctctgttccggccgcttcattgcaagagcctgctgaaaagtcggtattcgcatcgacggaccgaattcggcgaaggtgttgtgggggcgcaccggaggttcagaaggtagtaacgataatcgccgcagcccaacctgggctgcggcgattatttcggatcggtcggaagtagaaactctgccgccggccggtgcttcggtatcgaggaacgacgcaggtcgggtggttcggcccgcctcccgtagaaatcattttcccgacgacggatttgcaaaagcagtccgggaaagcgtccatgtcggaagcggggtagtcgggggctgcatctattccctgtaaatcagggcgaccgccgcgacggaaacaccctcttcgcgcccttcgaaaccgagccgctcagtcgtggtcgctttgacggaaaccgcgtcggtgtcgattccgatcgtgcgggcgatcgtttcgcgcatccggtcgatatgggggcgcagtttgggccgctgcatcgagatcgtgcaatctacgttgcccacagcgtaacctttctcccggagcagttccacacagcgtgccagcaggagcttggagtcggctcctttgaattcgtccgaggtgtcgggaaagtgcaggccgatgtcacccagggccgcagcacccaacagggcgtcgctgatcgcgtgcagtaccacatccccgtccgaatgggcgatgcagcctttcgcatgctcgatttctaccccgccgaggatcaggggcagcccttcgccgagggcgtgtacgtcgtagccgtagccgattctgaatttcatcattcccgaactcattttgtggtggaacgtcccggatcgcatgagggccttcctgttctattcatccgtacgttccgtattgcattaacggaacgtgcggatttttttacagaccgccgagttgcccggatatgttgcaaaaatagtcataaaaccggatttctcccaagccgaatgcaattcgatccgatatggggccgcgtgccgtttccgaaaggggtgaccccgcttgacggttccggattgttttcgtacttttgcagatgtcgcacagcggacctgtgatgatattttcaccgtcttatgaaggatttcgtcgcgatcgattttgaaacggccaacagagaacgcaccagtatttgcagcgtggggctggtccgggtggagaacggggacatcagggagaagatctatcgcctgatccggccttaccccgactattacagctcctggaatacccgcatacacggtctgacgtatcgggatacggcgcacgcggctccctttccggaggtttgggccgacatctctccggagttggcgggtttgccgttggtagcccataacagtcctttcgatgaaggctgtctgaaagcagccttccggcaatacggcatggcttatcccgattatcgttttttctgcacgtgccgggcgtctcgtcgggttttcggccgggaattaccgaatcatcagcttcaaaccgtcgccgcccgctgcggtttcgatcttcgggatcaccatcatgcgctggccgatgccgaagcctgtgcctggatcgcccgcctgattctgtaaaagggagagagggtagggcattcgctcatatcgccctcgttcggcatgggcgcctgattctttcgatcattttcttcggaaaaaccctccgaaagcggcttcggctcgctgttttttcgtatatttgcaaaaggcgaatttgcgtgcggacgggttacatgccgtaaaacgatgttttgttggcggccggatgtcttttcgccggatattcgaagctgccggtatcggctcgcacccgaatcgcgttcgttcccgacttttgccggcaggaagaacaagaccgataataaaaccttataagaaatgtcagagattacaaaattagaaccgaagctcgtctgggagctgttcgatgccattacgcgggtgccgcgtccctccaagaaagaggaaaagatccgggagttcctcgtggatttcgcaaaaaaacacaacatcgactatcagaccgaccaaacgggtaatgtcgtgatgcgcgtgcccggtacgaaagggtatgagaaccgtccctgcgtcattcttcagtcccatatggatatggtgtgcgagaaaaattcggacacggcgttcgacttcgacaaggatcccatccgcacgaagatcgtcgatggctgggtgaaggccgaaggtacgacgctcggtgccgacgacggtatcggtatggcggcagcccttgccgcgctgctcgatcctgcattggaacacggtcctctggaggcgctgttcacggtggacgaagaaaccggtcttaccggtgctttcggattgggtaaaggaatgcttacgggccgttacctggtgaacctcgattccgaggacgaaggcgaaattttcatcggctgcgccggcggcgttgatacgctggctatgttccgttataagacggaggccgcacctgaaggccacgtctttttccgggttcgggtatccgacctttcgggcggacactccggcgacgatatcgataagggccgtatgaattccaataaactggtcgcacggttgttgtggaacggcgcccagcgtttcggattgcgcctgagccgtttcgacggcggcaacctgcgcaatgccattccgcgcgaggcgtatgcggttttcgccgtgccgagcggttcgaaagccggcttcgaggctttctataaggagtttgccggggaacttgcagccgaagccaagttccgggaaccgaatttcaagatcggaatcgaagaggtgccggccgcatcggtgatcgatgcggcgacccagcgcaacctgctttacgcgctcgtaggactccccaacggagtgatcgagatgtcgctggccatgccgggacttgtcgagacatcgaccaacctcgcttcggtgaaattcgaaggggacgatcggatcgtcgtgaccacttcgcagcgctcctcggtggagagtgccaaggtctatgcgtcgcagatgatcgaatcggtgttcgctttggcgggtgccgaggtgtcgcattcggaggggtatcccggctgggcgcccaatccccagtccaaactgttggaaatcacggttgccagctatgagaaacttttcggtgtgaagcccaaggtgcgtgcgatccatgccggattggagtgcggcttgttcctcgagaaatatccgcatctggagatggtttcgttcggtccgacgctgcgcggcgtccattcgcccgatgagcggctcgaaatcgcaacggttcccaagttctgggatctgttggccgatattctgaaaaaagtcgagtaagtttctgcgtggaatattgatttccgaatcatatcgtctggtcgatcaagtcattcattatcaaatgaatgacttgattttttgattatacggatcgtaggaagatggtttacacgggtaattctcgggatgatattcccgatcttttttattgtcgaagggcggatattctggattttatgacaatgaaaacctattgttcgacaggtttgtacgggtatttgtgctgcgcccgccttccggcgaggtgcaacaaaggcagaagctcggagaacggagccttgcgggatacgcaggacaccggcgatttttcgattatccgaatggaaagcgtataacgtactgaatatacacagcgaaaacgaccgtgatgtcgtgcgatttgagaaagtccgttccgagcctttggattttccgatcaattgtccgccgccgtcgaacgggatagaatggaccggttgcgaaaaaaaattaggaaagataatttcgggggatcggtatccgaaccgatccttaatcacaaaatgaatcaatatcggtattatgttaaattatatgagaattttattgcatcggccaatatgtcggtatttacgccgatgattatataatgatttataaaacaggtattatccgtgatttctttgtgttttgccggagacaaatatgctcgatgcaggaaagttttgtaatgttgcagaccgatcgatctttgatatggatgtggacaattcgtgcggatgtcgttaattttagtaaatttgcaggtaaatatatttgtctatgtttcgaaaaatcgccatattttcgctgataataccgtggttgcttttcagcggctgtgcgtcccgacccgccgacgagcggccgacgatcttcgtatcgattcttcctttgcgcgggatcgtttccgaaatcgtcggcgatgactttcgggtcgaagtgctcgttccgcccggtatgaacccggaaagtttcgagccgacaccccggcagatgatcgatctgaatcgttcgcagttgatattcaatatcggttggatcgatttcgagcagaatatgctgtccaagatcgaggaccgtcgaaaagtaatcgacctgcatcgtggtatagagccgattgcgggcagttgctcccatgcggacgcggagaaagagcaccggcacggcgtcgatccccacatttggacctctccgcgcgaattgcgcactatggccgataatgcttatcgggcgattcacgagttgtatcctgattctaccgtatatgcggttaattatcagtgtcttgccgataaattgcaggctctcgatgattctgttgccgaacggctgaagcagagcggagtaccctatttcatgatttaccatccggccctgacctactatgcccgtgcctatggaatcgagcaggttgccatcgagcaggatggcaaggagccttcggccaaacggctggcccggcttatcgagcaggctcgccgggacagtattcgtgtcgtattctaccagagccagttcccggcttccaccgtcgaagtgatcgccgaagatatcggggcgcagagcgtccggatcgatccgctggccgaagatgtcgtcggcaatatttcctatattacggatctcataactgccgaacgtctatgaaaactccgctcgtttcgcttcgccgcgtcagcgtgtcgtacgatggtcacgacgcgctcaaagaggtcgatttggatatttatcccgatgattttctcggtatcataggccctaacggcggaggtaaaactacgcttgtcaaggccatcgtgggaacgatcccctatcgcggtacgatctcctattcgccgcagttgtttcggggaaaggagcggttgatcggctatatgccccagcaatcgatcttcgaccggagttttccgatttcggtgctcgaagtggtgatgtcggggcttcaggggcaaaggggtttccatgcccgctatgcgtccggggatcgagcgaaggcacaggagctgctgcggacggccggtatcgacgggatcgcccgcaaacctatcggcgagatttccggcggtcagatgcagcgggcgttattgtgtcgggcggtgatttcggatcctaaattgttgattctggacgagccggccaattttgtggacaatcgtttcgaaaacgagctctatcggatgctcgccgagctgcacggacgaatggcgatcgtaatgatttcgcacgatctggggacgattacgagtgtcgtgcggaatatcgtttgtgtgaatcgttatgttcaccggcacgattcgaacatcattaccgaggagcagcttcgtaattacgactgccctattcagcttatttcccacggcaaggtgccgcatacggtgcttgcattgcacccgcacgactgttgtccacatacccgtacggaggaatagcccggcttttccggtatctatcttcaccgatgaagattacgaccgggccaaagccatgtacgacgaacgcatggccaactacggaagcggtgaaaagtaactcccggattctctgaacgaatagagccgcaatagctattgcggctctattcgcttcctcccctctcgctgtccggcagacagagtacctcgttccggaaaaagtgttgcgccggatcaacaaaatgtattccggcatatatgcgtccgttggcttgccgccattgtttgttgtcgtacctgttgcctgcacattgggcggcgatgccggccgcaggatcccgatcgtttgtggacataaaaaatacttacggagttgcccccgtaagtattcgagtatgattcgggataattctctatttgttgatctcgctcaacttttcgaacaatttgccgaacgaagcctcgatttcgcggcgcagcgctgcaaagtgcttgcgcaccagcgaaggattatgtgcatcggccggattgttggccttgacgaaaagcgcgttgcgaagagccacaccctcctgcatcacttcgaaaatctctttctctttggtcggctggaagcagatcgccatgtcgcagtcgaacacgagttcctccagacggtagtcgatctcttttttcagcattcttaaatttgccatatctctattcggttttaatataattattcctgtaaaaaatcatacacggatccacgtacctctccccgacttgtcggaagcgttcgccgcactctgtccgatgcaaaaattaaaagagtgcgagcagtcgccaaccctgtgatttttgtttccctttgccggacagatccgcacccgaatacctcctattcgtttttcagtcgtcggctgtccaaatcaatccgagccggcttacctgccgcaaagaagaactgcatcctatcctctgcaaagatagtgaaagccgagaagaaaacgggagctcgttcacagttttccgaggcatatcctatcttcttgcaaagataaaaaaatcttccggaaatcgagtgcagtcagatcacaaaattcaattacatccgctccggtacgtcgattccgagcagcgccatggccagacggatcgtgcgggccacctgttcggccaggcgcagccgcatgtcgcgggtcgtcgtacactcctctttgaggatcgaatggtcgtggtagtagccgttgaacgatttggccagttcgtaggcgtaagcgccgacgatcgacggagcgaaattcgcggcggcggcctgtacggtcgccggatattcggtcagcgccttgatcagttcgatctcttcgggcaggagcgccgcagcttcgtcctgggtgcggaaatcgatccccgcctcctctgctttgcgcaggaccgagcggatgcgtgcatgcgtgtactggatgaaaggacctgtattgccgttgaagtcgatcgattcgcgggggtcgaacagcatcgtcttcttgggatcgaccttcaggatgaaatacttgagggctcctaacccgaccatcgatgcgatggcgtcggcttcctgcgcggtgcagccgtccagtttgcccaattcgtccgacatctcgcgggcggtcgataccatgtcggcgatcagatcgtctgcatcgacgaccgttccctcgcgggatttcatcttgccttcgggcagctcgaccatgccgtaggaaaggtggtagatgtggtcgctccattcgtcgtatcccaacttcttgaggatcagcttgagcacctggaaatggtagttctgttcgttgcccactacgtagatcatttcgtccagccggttctcctcgaaccggcggaacgccgtgccgagatcctgcgtcatatagaccgatgtgccgtcgccgcgcagcaataacttctggtcgagtccgtcggccgtgaggtcgatccagacagaaccgtcctccttgcggaagaagataccccgggcgagtccctcttccaccaggctcttgcccagcaggtaggtttgcgattcgtaatagaccttgtcgaaatcgacgcccaatgccttgtacgtcacgtcgaagccttcatagacccacccgttcatggtttcccacagcgaatatatttccggatctttggcctcccagcggcgcagccactcctgcgcctgtcgcatgatcggagcgtttttcttggcctcctcctcgctttgcccggcggcgacgagctccttgatctgggctttgtagtgcttgtcgaattcgacgtaatatttaccgaccaggtggtcgcctttcatccccgacgaggcgggcgtttcgccgccgccgtagagtttccaggccagcatcgacttgcagatgtgaataccgcggtcgttcacgaggtttaccttgatgaccttgttgccgttggctttcaggatctgcgcgacggagtatcccagcaggttgttgcggatgtgtcccaggtgaaggggcttgttggtgttgggcgaggagtattcgatcattacggtacggcccgtcggtgcggcctgcccgaaggtgtcgtttgccgcgacctcccggaagcgtgcggcccagaatgcactgtcgagcgagagattcaggaatcccttgattacgttgaacgccttgatttccggcgtattggccaccaggtattcgccgatctccgtcgccgtggcttcgggcgacttgcggctggctttgagcagggggaacaccacgagcgtatagtcgccctcgaactctttgcgggttttctgaatctgcaacggagctccggcattcccgtagagggtgcttaccgccgctgcgactttatccgtaagaaactgttcaatattcatcgtatgtcgaatttgggtgcgaatttacgctttttatccgaataatccgcgtcgtcgcctctcaataatgcgtcggatagcgaattgcatccgtcgattttcggaaaattgcaaactattgttatatttgcaaaccgtataggctgtccccgcagcgtccgaatggttcggcgttgttgcgtcgtgcgattccctgtccgaaaacaatccgggccggattcgtccgccggggtcgaaggccggagccatccggcccggctttcggtatggaccgcctttcgtttttttattttttcatagcatggaaatattcataatcctcctgctgatcctgctcaacggtctgttcgccatgtcggagatcgccctgatctcggctcgcaaatcgaacctcacggcgcaggccaagcagggcaacaaacgggctcgccaggccctcaagctggcggaagatcccaacaaatttctttcgaccgtccagatcggtattactctgatcggtattttgaccggtatttattcgggggcggccatcgccgacgacctgcgggaagtcttcgtccgctggggagttccctatgcggctcccgtagcgcagacgctcatcgtgatcgtggtgacctatctgactatcgtgttcggagagttgattcccaagcgtatcggtatgacggccgccgagccggtcgccaaactcgtggccggccctatgaaggtgctgtcggtcgtcgcctcccctttcgtatggctcctttcgaagagcatcgagggcatttcccgtctgttcgggctgcgcgataccgacagtcccgtaacggaggccgagatcaagtcgatcgtgcaggaaggcgccgaggacggagctgtgcaggctgtcgagcagaagatcgtcggccgtgtcttctcgttgggtgaccgcagcgtggagtcgatcatgacccaccgcagcgacatcgcatggctcgatgtgaatatgtctgtggatgagatccgcgacctcgttcgtcgggagcctcacggacgctatcccgtcggtgaaggatcgctcgaccggctggtcggcgtcgtctatctgaaggatcttttctcgcatatcggggaccctggattctcgctgcggcagattctctctcctgtcaagctgttccacgagggagcggaggtgtatatggcgctggaacagttgcggaccgagcaactgggttatggcatcgtttgcgacgagttcggcgttacgcagggtatcgtgactctgaaagatattttcgaagcccttgtgggcgagctgctcgaagatcgtgaagagccggatatcgtcgtgcgcgaggacggcagcgtgctggtggacggacagtgttcgttttacgattttctggcccatttcggattggaggatgtctattcttcggccgaatacaatacgatcagcggtttgattctggatgagttggaacatattccgcacagcggggaataccttcaatgggagtgtttccggctcgaagtcgtggatatggacggagcacgtatagacaaggtactggcgacgatgatcgacacgtccgataataaaattaaataaggtctttccgtgcggagtttgtttttgatgccatgaagattgccgacatagaattgggtgaccgcccgctgttcctggctccgatggaggatgtgaccgatccttcgttccgctatatgtgcaagcggttcggtgccgacgtggtatataccgagtttatctcttcggacgggttgatccgcgatgcgggcaagtcgcttgccaaattgcgcatcgccgaatccgaacggcccgtgggtatccagctttacggtcatctggtggaaccgatggtcgaggcggctcggatcgccgaggcggccgatcccgatatcatcgatatcaacttcggttgtccggtgaagaagatcgccggtcggggcgccggatcgggtatgatgcgcgatgtccccctgatggtcgagatgacccgccgcatcgtcgaagccgtgaagaaacccgtgacggtcaaaacccgtctgggatgggatgaagagtcgaagaacatcgaagagatcgctctgcgcctgcaggacgtgggtatcgccgcactgacgatccacggccgcacgcgggcccaaatgtatcgcggcgaagcggattggacgctcatcggcaaggtgaagaacaatccggcgatccggattccgatcatcggtaacggagatatcgactccggtcccaaggcccgcgaaatgttcgaccgctacggagtggacggggtgatgatcgggcgggcgacctacgggcggccctggatcttccgcgaagtgaaacactttcttgaaaccggcgaggtgatgccgcagccgtcggtggcggagcgggtcgaaatcgctaaagaacatctggccaaatccttggagatcaaaggtgaccgggttggaatcctggagatgcgccgccacctgtcgaactatttcaaggggcttcccaatttcaaggaaacccgcctgaagctggtgactctgttcgatccgaacgaactgtatgccacgctcgattcgatcgccgatcgttggggcgatttcgacgtgagcggggtcatccctgctccgctttcgcatgatgtgtagcttagttccgcacgagaatcgcttgcctgtcgattcctaagcgtatattttcaacaagggcgaccaaatctttctgcccgcccgaaaagtcccggcagcgtaccggtgccgaatttcgtggagccggaaaattgtcgcttcgtgcgtaaggatctccttttattcgttattcgattccccgtcatttgtttattcgataactctgtaaaaacgaagcgccgcgagagaagtcgcggcactttttattatcaacgtccggggttatttcaggctgcgttggatatagtcggtgtaatccttgactacgggcgtgtaatcttcctcttcgaacagcggggaggagatcaggaagtcggccgttgagcggtttacagccgtgggtacgttgtaaagcgttgccaggcgcaacagcgctttcacatccacgtcgtgcggttgcgccgacatggggtcccagaagaaaatcagggcactgatccgttcgtccgcgatcagggcgcccagttgctggtcgccgcccagaggacccgatttcagccgcgtgatgtcgagtgccggttgctcgtagtggtgggatgccgagtgattgagcagggtttcttcgacgatcttgcctgtcgtacccgtacagacgatccggtgtttgctcaatttttcacagttccagtccacccattccgccaggtcgtgtttcatgttgtcgtgcgcgacgagcgccatcattttctgtctgttcatttctttcatccgtttttttgaaagccgcgtttcggctttcggttgttttatactcgatttacggccccaagatgcgaataagccgagtacaaaagcaaatttatttgcattttgccgaggcgaagtatttaagacgaagtcaaagatacgaaaaggagggagcaatcgtgcgggtttgtacgcaagaattgccgaaccgcttcctattttctgcaaagataatatgcagcggcatcttccgaccactcccggcgcaggtttcatcgaattgtaatgtcgggaaagttcggtattccgcccggaaaccgttacccgttgttgcttgccttgagccctcggatcaccgccgaagtgaatccggcgtgttccatttcgttcagccctttgatcgtgattcctccggctgtggttaccctatccacctcctgttcggggtgcgagccgttggattcgagcaaggcgatcgccccgcgcagggtttgcagaacgccttcttgagccttttgcgggtaaaggcccagctctaccccgccctccatcgctgcccggatataacggaaggcgaaggcgataccgcaggagcagagcgtcgtggccggaccgagtagccgctcttccaccaattccgctttgcccaatgcaccgaaaatattcaaaaccagtctgttctgatcttcggtcgcattcagccccgtgatgaacgtcatgctttgctttacttcgatggccgtattgggaattgcgcaataaagggctctgtcttttccggcccatgtttgcagctgttccagggaaatgcccgccgctaccgaaatgacgatctgtctatcgggccgcttccctgtcagatgctcttttatcagtgcctccaccatccagggtttcacggcgattaccacgatgtcggccgtagccagagagctgtagtcgcccgtaacggcctgcaattccggattgaacccctgtatttcggcggttttgctcgcgcggcggttgatgaccgtaatgtcctgtggtcggaacaggtcgcaggtggatagtccgcgagcgattgctccgcccatattgcctcctccgacaatcgatattttcatgggtcgcatggttttttatttataaaaatgctccgtccgtcaggtgcggaatcggagctgtattgtctattcgggcaaaggtttggcagcggtgcatacctgtcgaaaggggggagcaccggcgaatctttatgcttcctgctctgcgggcagtttgaattcggtgaacccggcacccacgagggtattgaaccaggagaaaaccttcttcatgtccgatacgtggacccggtcgcggtcgtattcgggcaatacttctgcgaaatatgctttgagtttttccggagcctccttgtggctgatggctggctgtccctgcgtatgttcgtaaattttggtgaaaacctctgcgagcgggatgtcctcgccctcggtgaagatggatatttcggtcagtgcgctcactttggagttgcttgcggcattcatgcgtttgccgtccgacaacgactcgacgatgacgccgcgcgacgattgtgcgacgtatttgtacaaaccgggttggccggaaatggccagaatctctttcaattccataattttttctgttcgataatatgtttgagtttggttcttcactgtccgtgcgggccgtgcggggtgaatccgctccggctcgtaccgttcgaaaatgcggtttcagatggcatatacgctgtattgctgggcttcggttacggaagaaaggccgttctcgttggtcacgacgatcagccaatataccgtactgccggctttctgtgcaggaatgattgcttcgtaaaagaccgtgtcggaagtcgccttgaaatagtaggcattggtcgatttctgctccgtgtgctctactccgttcttatcggtccatttgacgtcgtatttcacctgagcgtagaatgcaccgtactggttcgatatattggcctgcacataaactttctgaaccgaagatacccggcctccgtcttcgatggtggctccttcgtccgtgatgaccgggaacgtcgtttgttcgggtcctacttctttcagttcgcacgaaggaatcgcgcaggcgatgaaaatcagaaataaaaaccactttttcataatggatgcggattggctgtgtgtggttactctttggtcaggtgaacgtccatctgcgggaacgggaagttgattcccttttcaggtaatgttttgtaatacagctcgttcattgcgaagaaaacgtcccagtaatcttcgtttttcgtccaggcccgaacggtcagattgaccgaattatcggccagggcagcgatatataccgcaggcgccggatcctgaagcacccgtgcgtctttggacagcagttccaggatagcctcccgtgccgttgcgaaatcgtcgccgtaagagatgccgatcacccactccacgcgacgtgtttcggaggtggaatagttgttgatgatcgcggtagcgatcgagctgttcgggatatagatggtctgcttgtcggctgtggtgatcttggtcgagaagagcatgatctcctgcacggtacccgactgtccctgggccgagatgtaatcgcctatgcggtagggcttgagcagcaggatcatcacgccaccggcgaaattctgcaatgtgccgctcagggccataccgatagccagaccggccgaagcgagcagcgcgacgatcgaagtggtgttgatacccatgacttgaatgatcaggagaatcagcacgatgtaggagatggtcttgatcaggttgcgcaggaagatttgcagcgaacgatccaccttgcgcttttcgaaagccgtcgaaagcagttttatgaggcggccgataagccaacgccccgccatgtatatcgccagggcgaggacgattttcaggccgacccagatactttccgaaaccagattcgtcaggactttttccaaatccatattagcgattttttcgaccgtttccgcgaatttggctttttgtatgctgtccggaacgatgagtttttcggtttgctgtgctgtgatgaaaagaaatcccatgaaagaattaaatttgataggttgagttgcaaatttaatcaaaaaaaccggaaataatagtaactttgctctataatgtgtttaacggattttgctatggaaagtaagatagagataatccaaatcaatatttcgggcgaagacaagcccggcatgacctcttcgctgaccgatattctggcccggtacgacgcgttcatcctcgatatcggccaggcgaatatccaccagtcgctgactttgggcatcctgttcatgaccacctccgacaaatcgggcgccatcctcaaggagttgcttttcaaggcctcggaactgggcgtgatgatccgcttcacccccatcaccgaggaacattaccaggcctgggtcggtcgtcagggcaagaaccgctatattatcactcttttgggacgtcaggttacggcgcgccatatcgcaggggtcaccaaagcggtcgccgaacagggactcaacatcgacgcgatcaagcgacttacgggccgtatgccgctcgaggaggagaaccgtgccacccgcgcctgcatcgagctttcggtgcgcggtacgctcggcgataaggccgtattgcagaaacgcttcatggagctgtccaacgagggggtcgatatttcgttccagaaggacgacatcttccgccgcagccgacgcctgatctgtttcgatatggattccacgctgatcgaaaccgaggtgatcgacgagttggccgaccgtgccggcgtgggtcccgaagtgcgggccgttaccgagagcgccatgcggggcgagatcgactttaccgagagtttcacgcgccgcatcgccctgcttcggggactcgacgtttcggtgatggaggagatcgcccgcaacctgccgatcaccgaggggttggagcgcctgatgaccattctcaagcgtgtgggatacaagacggccattctgtccggaggtttcacttatttcggcaactacctgaaacagaaatacggcttcgattacgtctatgccaatgagctggaggtcgaggagggccgtttgacgggccgtcacgtcggcgagatcgtggacggccgccgcaaggccgagctgctgcgtctgctgtgtcaggttgaaaacatcaacatcgctcagtcgatcgccgtcggcgacggagccaacgaccttccgatgctcgacctggcgggattggggatcgcattccacgccaagcccaaggtgaaagctacggccagccagtcgatatcgacgatcggtctggacggcgtactctatttcctcggtctgaaagattcctggatcgaataaaccgcgatgctgcgcctttcccttcttctcttcgccctgctcgccgccggatgttacgacgatgccggggttccggctccgaagaacgatccgctcccggaggcgaacctctccctgccggacctctccgcacggtgcggggatacgcccgtgcgtatcgtccaggacatcgtagtcgcggggcgggtcaccacgtccgatgaagcggggaacttcttccgctcggtcgtgttgcaggaagacggaacgggcgtggagctgatggccggcttggacgacctgtttcgggtttatcctccgggatgccgcatcgcggtacgtcttcaggggctggctatgtgccgtcgcttcggagtggtacagatcggtacgatgcctgcggcgggagattatgccgtagaagccatcggtgtccgtgccctgctcgaccggtatgtcgcttgcgaaaccgtcgatgttctccgtcccgttccccgaatcgtcgctttcgacgaacttgcgcccgatatgtgcggctgcctggtgcagatcgaggatctgacgccgcttccgtcggaagaggatccgacggattggaaatgggaaggttatcggctgttcgaggaccgggccggaaacaggatcgccacctatacgagcacctatgcccggtatgcggcttcggagattccgaaggggccggttacgctggtcggcgttttgcagtacggcaatgccgggtcgatcggaaaatcctatatgattaaaatgcgcgatgagaacgattgttttcggtagcctgctgctcttcgtgctgcaagcctgcggcaatgcttcgtcaccggagtacgaatccggggacgggactgcgcggcgtgtttctattgcgtatctgaaatcgctgtgccggggcgttctgcatcccgttaccgaggatctgtggatcgaaggctgtgtcgtgggcaacgatctgtacggcgaatttcccgatgcgctcgtcgtggaggatgaaagcggcggaatcgaagtattgatcgacgcgaagcggctctatcggactttcgatgccggaagtacggtgcgcgtttattgcaacgggctggctctgggtgattacgggggcaaggtacagttgggatttccgcccaccgcagaatatattctggaccgtatttcggcggagtcgctcgggcgtcacgtgcgtcgcatcggggacgggtcggtcgatttcgtgcctcgggaactcaccttcggggaggtggctgcaagccgtatcgccacttacgtacgattccgcagggtccggttcgcgcacgaagaggtcggtctgcccttctgcctgcgggattcggaaaccggccgattgctggctaccgaccgccatttggtcgatgagcggaacgatacgctgatcgtccgattcgcagcttcctgcacgtatgccgaggagccggccccggctggaacgggaacggtcagcggtgtgctcgactatttcaacggcaattatatgttgcgaattaccaatcgtctgatggaattcccttgatttccgcgtttcgatgcgagggtttgcgacgcacccgatagagtttatgcctaaattgttgctcatactccgtttttatcgctcggcgatgctgtttttctgcggggccgtgagcgtggcgttggcctggctcgtgaccggatacggtccgtcggtcgtgccgttgtgccttgcggggaaaatggtcatctatccggtctatctgtatgtttggatcataccgcgttataacgatgagttcgactattaccgcaatctgggggttcgacgacgtatgctgttgggtgcgagttgcggcatagacttgctggcgtgttatatgctgctgatattcgtatcccttgtactgtatgaacccctctgaaaaacatattcttgaaatagattcggtcgagttgtcgttcggtgatcgggtgattctttcgagtgtatatcttgccgtcgaaaccggcggagcaacggcattgctgggacgcaatggcagtggaaaaagctgcctgatgaagatactctgcggagcgttgcgccccggattccgatcgatgcgcatcgacggcaaatggtacgatcgtttcggaagcagccaggtgcgttatcttccgcagcaggggtttacccccgggtggctgactgtggaggcggttttgcgggacttcggtctggagtgggatgacctgacggtctggtttccgatattcgggaagttgcggaaggcgaaaatccgaaccctttccggcggggagcggcgtattttggagtgtttcgttattctgcgcagccggagccttttcgcagtgctcgacgaacctttttcacaagtcgcgccattgcatgttgtaactttgaaagctttgattcgggcggaaaaacaaaataaaggcatcctgcttaccgatcacatgtatcgccatgtgaccgacgtagcggaccggctctatgtgttggcaaacggacagacctatctgacacaaggtgacgaagaccttgtgcgttacggttatttgaaccatttgtagtattgacgggaaggctttctgctgccggagttttcgataaaccggccttgttctcggtttccgaccgtattttgaccggattctgttgcgggcgtgtccaaataaatttggcactcctcccggcttgcactatctttgcagcaataaattccagttcggagaaggtcgtgtcgcgtatcgccgccggccgaaaatttccgcaccttaaataacaagacttatggcaggatcgaactttgtagattacgtgaaaatattcgcccgttccggacatggcggcagcgggtcggcgcatttccgccgcgagaaattcgtcgaattcggcggaccggacggcggtgacggcggtcgcggaggacatattatcctgcgcggcgacagccagtattggacgctgatccacctcaagtaccagcgtcaccagttcgcggaggacggcgaaggcggttccggagcccgctcctcgggtaagaacggtaaggacatcgtcattcccgtaccgttgggaacggtcgccagacgggtgcttgaggacggtacgacggaatatgccggagaggtgaccgccgacggcgaagagctcgtcctgctcaagggcggccggggcggactgggaaactggcatttcaagacctcgaccaaccaggctccgcgttacgcgcagcctggcgaggatcgtcaggagggaactttcattctcgaactgaaggtgttggctgacgtgggattggtggggttcccgaacgcgggcaaaagcacgctcctttcggtcgtttccgctgcaaagcccaagatcgccaactatgccttcacgacgctcgaacccaacctgggtatcgtcgagtgccgcgatcaccattcgttcgtcatggccgatataccgggcatcatcgaaggagctcacgaaggcaagggattgggaacccgtttcctgcgccatatcgaacgcaattcggtgctcctctttatgattcctgccgacagcgacgacatccgcaaggattacgcggtcctgttgggcgaattgacccagtataatccggaattgctcgacaaggagcgcctgctggccatcaccaaatgcgatatgctcgacgaggacctgatcgaagagatgaaaagccatctgcccgagggggttccttcggtcttcatttcctcgatatcgggtatgaacattccccggctcaaggatatgctctgggaggcgttgcaaaaataagataaagtataaaagcccgcttgggggacatataattatacaaaagcctcgtattccgaaaagaatacgaggctttgtctttcggtccgaaacgacggggaccagagtgtcggaagcgcggctatcgccggattttccgactgtatcgtttgcggggtcggctttacagggccagcggttcgtatttcagtccccaggcatccgctacttgtttgtaaacgacctttccttcgacgacgttcaatcctaactccagttcgtgattctccttgcaggcgcgacgccaacccttgtccgccagttggatggcgtacggcagcgttgcgttcgtaagtccgagcgtcgaggtgtagggcaccgcaccggggatgttggcgacacagtagtgcagaatgccatcgacgaagtaggtcggctcctcatgggtcgtcggccgcgaggtttcgaagcagccgccctgatcgatggccacatcgaccagaaccgatccaggctccatatccttaagcatgtcgcgcgtcacgagtttcggggctttcgcaccgggaatcagcaccgagccgatcaccaggtcggcggtcttgagctcttcgcggatgttgtattccgacgacataagcgtttttacgttttggggcatcacgtccgtcaggtaggccagacgcttgagggagatgtcgcagatcgtcacgtcggcacccaggccggccgccatacgtgccgccgccgtgcctacgacaccggctccgatcacgaataccttggcgggcttcacgcccggcatgccgcccagcagcttcccttttccgccgtgcggtttttcgaggaagtaacaaccctcctgcgtcgccatacgccctgcgacttccgacatgggaatcagcagaggcagcgaacggtcggatgcttcgacggtttcgtaagcgcagcagatcgcaccactttcgaccattgcccgggtcagcggttcgctgctggcgaagtgaaaataggtgaataccagttgtccttggcggatgagtttgtattcaggctctatcggctccttgaccttgatgatcatttcggctttggcatagacctcttcgatggtaggcagcagttcggcgcctgcggcgacgtagtctttgtccgggaatccgctgtttgcaccggcagtcgcctgcacatacactttatgcccacgtttggtaagctctttggctccggacggggtgagcgaaacccggttttcgttgtttttaatctcttttggaataccgataatcataagtcgagtcgtttttaaatttttcggactcaatttatggaaaatccgttgaattgccaaattattcccgaaaaaatcgaaccgatattaaaatttgtaagatatggaggcgtaaaaggtccggggatacgcatacagataacgggtgtccagcggtcggtaaacatacgtgtctgcggtccggatacggcgtacgcggggagattcgtagccgctgaagagttggtccctgtcgttgagaaggttgcgtaccgagagcatcagagtcagacgcgaggcgttgaaataaaacgatttgaaaagcgtgacattcaacgtaaacgcatccccgagccgttcctggcgggtaaacagttcgaaggcttccggcgattcggccagttgccgggcgatgcgcgacgtgcgtcgtaccagcgacggttcgacgaaccgattcccggtccatgcggcctccgcctgtacgccccagcctttcggaccgtaatagttgagtcccgcgaaacccgtcagttggggcgtgttgccgaccgaacagtcgcccatgtagctcgcggcgttgcggtccagcacctcgttgttcgcgtcggcatagaccgtgacgacgggattgtccgcatagcggtaacgtccggcgctggctgccagcgtgaggttccagcggtatgccagccggatcagggcggtcgcttccgcgccgtagcgaagcgttccgatgccggcggccgccatgtcgctgtatgttgcgtagaaatcgtcgtagtagtgccgcacctgcatgccgtccgcagtgcggacgacgaagagcgtcgcccgaaagcgcacattgcgcccggaccaggtgtagttcagttcagctccgtaccgtttctcctcggtcggatcctccaccggtcggttgttgtattcgaggttcaggaaaaggtcgtctccgtcgggtgtccgcgatgaggcgtaaaccgtcatttccagatgatgccgtaccgagaaggagtagcctgccgaggcgcggaacaggtagggcgcgaaatgcagcgcccgcgattttccgaaggatttattgccggcgaaaagctctttttcgtagtgtccccggcggaatacggagctggttccgacctcggctgcgataaaagcccgcaggcggtcggcacggtattcgagtgaacctccggcgccgatttcattacgccgcaagtcgtagtcgtagccgaagcgatcgccctcgcggatgatccggtcgggatgacgcaggtcgttctggagcttgttgccatagacgccgtcgtcgatcaggtaatagtcgcgatcgacgaaataattgcgtcccatcaaatccctcatctgtttatagaaccgggagtccatccgggccgctcggatgccgtagcgtaccgtcagtcgttcgttgattcgggtaacgccttccgcgaggagttggatattggcgatgcgctctacacggtcctccatgagataggtcgcgctgccgtccttgctgtttctgttttgccggtaaaattcgtcccagtcgatttgggtgtagcggacatcgttcgcccgccagatattttccatttcgagccgggttacggggtccgtctggtagccgggcatccagcggtagtagtccggcatcgggctcggagcgtcgtaccatgccagcgaactgtaacgcctgatgcccgtttccgccgtgaaggtcgctgcgagcgaagtcgcatccgtcaggcggacccggtatgcggctgcggccagaggaaccgcttcgcgtcggatgcgcccgctgcgcacttttccgtcctgatagccccacgaagggttgtagaggggatttcccgtcaggtcgaaggcttcccgtgtcgatgaggtgcgcagacttcgcatcgaaaccggtacgacggtcagcaacgagaagaggtgcctgtccccgaatcttttggatagaagtatcgctgcattcagcgaattgctgaatacgccgtcggcataaaggtcccgtcccgtacggccctgtacggtcgctgcaaggtcccagttccggccgaggttttcggcgacggtcaggcggagccccatcaggtagttgcggccggagaattggagtgccgcattgcgctccgggagcagcggctcttcggaggttcggtattcggcgtccagagtcgtcggtaaatgccatccgttcatcggctcttcgtactttttggggtacaaggcattcatcgacggaatgtagcgcgacggcagccggatgccgttcagcgacatccggtcgggccggtacggttctccgcggcggttgtaggccacgaatgagaatttgaagtccgtggcgtcccggaacaggtcgcccgtactttgaatcgcccggtaaaagagcgacgaatcggtgtcgatcatcgggctgtaaggctcttcgtaaccgttctgaaagggataatactcttcgtcccgcagattgtcttccggggtttgggcccggagcgggaaacaaccgatcaggccgatgacaacgaagagtaaatatctcatttgggtcatggtatgatacaaatatacccaaataataaaaaaatcggacgcttgggtccgatttatcttcaattccgtccgagatatggctcccgttttgattccgatcccccctgtatccctgacgaaatggcggattccggcgagcgcccctgcgatatggcacgccgcgacctgacgttccataaagaggatgatacgaaggctctaccttcatttcgcatcatagcgatcgagcgaaggccgctttatccggggtgattatacattcggagtgcatcgctgcattcccggcaagacgtttctgtattttggtttatgcttaattctgcagacttcattccatggggtgcaatgcagcagaaatgccgtcgtaggccctggagcggcctgaaacggagtttgataaaagagcgccgacttgttggaaaataacgacgccgtctttcaatgattgcgcagatgggatcctccttcttggccgttcgcttgaaacgaaatatggaaattttttcgaagtccgcttttggaccgatttatataatagactgccgggttacggcttatgcagtgtcagggcctcaaacgagtgatcggcatagaccaaaataacgcgcacgacgggattccggtcattgccggcgagggtttgaagaaccgtatcggtttgcttcgacagctcgttgtcgttctcggccgtttgtgtcgatggagcgaccgaaccggcggtgttcgatctctgttccggctccgtcccgaacagtccggtgtcagtccgaccatttccagcgtctgttccgttcgttgaagaggaacttttcggattgccggttcgatacatctgttcggagtcgagcagcaaccagtccggattgacgcgcggaaacctccggagaatcttctgcagcaaatcgaatcccggtttgttccgtccggcgagaatgtgggagattcccgaaggctggattccgaggatctcggccatccggctggaggttaaaccttcgcttttcatcaattgttgcaatttctccttcatttccggtattttttacaaaaataaatatttttcttttgtaaaacaactattttgtacgattgtaaaatgttaattgttgtcgataatgtttacaaatgtaattattcgaatatggttaaatatcttcgaatcttgtgtgtgaattatttgtatatataattttatgtaatttattgattataagtatataatg

SEQ ID NO: 10480 - DNA, 515 bp, Unknown
  gut microbiota DNA sequence
atggagtagccaatcgcacagaagcaatccagcaccgtattaacactgccgggctgcgccgcaaagtcagcaagaaccagacaaaggcaatacgcataatgctgaccggaacacatgagcagatgatgaaaattgccaatgacggcaaactgggcagttggattgatgtcaatctcaaatggctaaaggagacctttggtgatgagaatcttgtgtcctgcgtgctgcatatggacgagaagaccccgcatctgcacgccacagtcgtgcccattgtaaccggagagcgtatccgcaggaagcgggagggcgaaaagaaatatgaaacgaagtccggaccccgtttgtcggcggacgatgtgatgcgtcgttccaaattacatgaataccagaacaactatgccaaggccatgaaaccgtttgggttacagcgtggaattgtcggctctaccgccaagcatcaggcgaactcggaatactacaagcaacagatgaataggtatgaggaagacatt

SEQ ID NO: 10481 - DNA, 6319 bp, Unknown
  gut microbiota DNA sequence
catccgtaaagctcatatacctcgttgtcggaatacttcattttcttgcaccaatggagaaaggtacagaagaggttcatcgtgttgatgatggtcgtgttcgacaatggtcttggagcatgattgataagcagccgggacgcatagaagtcggggtactgctgacgtaacaagtattcgttggtcacataatcccggaaaccgttcatctgctccaatgtgacggtttcaacaaagagggtgaaatcggtattacctaatatctcacgttgatattcatggtaacgtatcatcttgcgctcgaagcggatgatgtgttctttggttctgttcgctccgtcaaatttttccagatactcatgaatacggcatatcagattcggatggtttcgttcgaaagcccgtgcagggtacagcacatcctcgatggtctgcttcagccatgcgctgtttgccttgtccgaaaatgtcttctccactttctcaatgatggaggcaatctgttcgggcagcagtttctgttcaacggcaggtacggctgtcgtgcgcttgtaactgagagtatcggaatcccagtacttgtcatgaactacaagaggcgaaacaacctttatatccacgttcttctcacggacacggaaacagatgctcgaagtcgaggaactgctctttttcagatagacggaaactttcatcggcaatacgttttttattcacattgcaaaggtaaataaattcccgtatatgttcccatatatcccgaaaaaacttgtagcggattaagacaaattaaagagcgtgtcccgaaagtgatatcacataaaacactgtatattagtgattatattttctcttgttatgcttttcttttcattttcgactttcccaatccgttatcaaaacatatattgcagttccacgctttttttgttcaaaccaccgcagcaggagccgatacggtaagtagcaggaatgatcaaatttctacttattaaataatcttattatgaaaaaactctttttattcgcaatcgccgtactgcttgtctgcggctgtaccgacagcggtatcgatgaaacgccctacggaggatcggataacaccgagaaccccggcgacggtaacgactcggaggatgaaaaaccggacattccggaatattcgatcaacggaagcgtgcagaaagggcagttcatccaaggctctgtcgtcactatccaggagctgaacgaacgactgcaaccgaccggtaaaagttaccaaacgcagattctcgacgacatgggctcgttcgaacttacatcggatattgacagccgctacgtagagatcatcgccgagggtttctatttcaacgaagtgacaggcaatctttccgatgccccgctgaccctgcggtctctgtccgaccttgcaatggaaggaaagtcgaacgtcaatttgctcacttcgctggaaacgccccgcatcaagtaccttgttttgaacgagggccggaccattccggatgcacgccggacggccgagcaggaagtgctccgatcgttctgcatcccgcaagacgaacttccctcgccggaaggcttcgacaagatggacatcgcccgtccgggtgtcggcaacgccatcctgctggctatttccgccacgctgcaacacggacgaacggttgcccaactctcggaaatcgtttccaaaatcgcgacagacatcgaggtgaacggacagatcaaagacgaagccctgctcgcagccgtacggagcaacggtatggggattaaacctgcgagagttacgagaaatttggaacgacgttatgaagaactctccattacggattatgcaattccaccgttcgacgagtacttggatattgacggcaacggagtgatcgacaaactggatgattggttcgaccatccgtttgaagaaaggtttgaactgattttcgaaccgtacgatatcgaaatgcgcagcttcaacgtgcaagtcaccccaaatttcaatgatacatggtattatgtgggaatcaccactgcctcgtatttcgattcttacgacgactggcgccaatttatccaagatatgaccccagagaactcatactcgccgagcttatatatggatagagaaatattgcaaataaattgtattccgggaacagaatatgtaatttatggattcctcgacaccaatgattttccaaataatatattcattgctcgcgtgacgagcaaacccctgccgcgcaatatgaacgctaccgtgcaggcggaatggcaactctatgacgggacggctctggaaacactctacccagatatttacaaaggggcaagcgaccatcgggtatttatcttccaggttaccccgacaagccctgaaacaatccatacatggggccttctgcatgtcgcacgatcaacacaactgaatctttcagatatgcagatcctcgactatctcgaaaccggcacattgttcggctggaaaaatgtcgaaaatggttattatttcctccccgccgaaatggaaacattcggattctactattgcggacaggatgaaagcggcgcctggggcgaattatactacgaagaattaaccttcaccgaagacgatctgtgcgatccgaagagtgctccaaactcgggatttatcaacggcaaatcggcggttacgccaaaccgtaccgccctgatcgcaaccgccttcactgcacctgtccgcttctgcaaagcagccgaatacggccggacaccccatcttttaccaaattgatccattttgtttcccggcagatttggcaattcggttttttgtttctacctttgctcccctgaaagccccgaaaagtgggtagcgtttattattttacttaaaaaattttatagcaaatggctgttaaaattcgtctggcacgccacggtaagaaaggtttcgctttctaccacatcgttgccgcagatagcagagcgccacgtgatggtaaattcatcgagaaattgggtacctacaatcccaatacgaatcctgctacgatcgatctgaacttcgagaaagctctggattggttactcaaaggcgcacaacccaccgacacctgtcgggcgatcctctcctacaaaggcgtaatgtacaagaagcacctgctgggcggtgtcgctaaaggtgcattctccgagtcggacgccgaggccaaattcaacaaatggctgagcgagaagcagaccaagatcgagaacaagaccaacaaactggcgtcggacgccaaatcggccgagaagagccgtctggccgccgagaccaaaatcaaggaagagcgcgcagccgctctcgccgagaagaaagccgctgccgaagctgccgcacgtgaggccgccgaagctgccgctgccgaatcggctgaagcagcagctcccgcagagggagaagctcctgccgaggcatagttacaaccgttatgttgttgtcggttgcgcgcgtgagtaaactcttcggagttgaaggtggggttttactgaatctctacacgacgtttcccgatgacttctcaacagaggaaccgctgttcgtgaagatcgattcactggcggttcctcttttttgcgaccgcttcgaacggaggggcaagaccaacgcattggcgacattcgcggatatcgactccgctcgtcgggcggaagagtttatcgggcgggagttgtacctcgagcacgaggacgacgaaaacgatgaattctacctggaagatttgatcggattccgggtacggatcggtacgttgaaaggcgaaatcacggattattacgacagcgaggccaatcctctcttcgaggtggagatcggcggcaaacggatcctggttccggcggtcgaggagttcatcgcaggcatcgatttcgagggccgtacggtgaagatggtactgcccgagggactgatcgaactgtaacgagaatcggtggaaaaccggtgcttccgtgaccggatatttccggcaaaacgcgcctttcggtgcggtcgaaaagtaaaatttgcgcaaaaagtatggcacgtgtggttatcggactctccggcggcgtcgattcgtcggtagcggcctacctgctccaacaggccgggcatgaggttatcggactcttcatgatcaactggcacgacactacgggcacgctcgaaggcgactgcccctggcacgacgaccggctcttcgccgaacttgtcgcccgacggctcgacattccgttccatacggtcgatctctcggaccagtaccgtcgccgggtggtggactatatgttctccgaatacgcgaaagggcgcacacccaatcccgacgtgctctgcaaccgcgaaatcaagttcgacgtttttctgaaggaagccctcaagctgggagccgatttcgtggctacgggacactactgtcgcaaggccgaagagacggcgcccgacggccggacgatctacaaattgcttgcgggtagcgatcccaacaaggaccagagctactttctctgccaactttcacaggaacagctttcccgggcgctgtttccggtcggccacctgctcaaacccgaagtgcgacgcatcgccgagcaaatgaagctcgctacggccaaacgcaaggattcgcaaggcatctgtttcgtcggcaaggtcgatctgccggtctttcttcaacagaagctcgaagcaaaaaccggcaacgtccacgaaatcaaagccgattggcccaaatacggacaagccgtcccactcgtcggcaaaacggaggatgcagggatgggcacggcggaacgaacggcttcggataaaagtgccaccctacgcggtataaatccggcgaatacggactcgacagaatgtccgaacccggcgacagctccgacggcaaccgctgcgaagcgttcctccatgccgacggatgcggagctggccgcacttgctgctccttaccgttataccgtgcgcgacggtaaaaaaatcggacagcacaacggagctcacttttataccatcggccaacgcaaagggttggggatcggcggccgcaaggagtcgcttttcgtactggcaaccgacgtggagcagaacgtgatctacgtcggcgagggggacgaccatccgggactttaccgccgggccttgcggatcgctcccggcgagctgcactggatcgacccgctccgggaattgaaaacgggcgaaagccgtcgtttcgatgtccgtatccgttatcgccagccgctgcaaggagcggaactcttcatccgttcggacgcggcctacctgcttttcgacgaacctcagcgtggaatcacgccgggacagttcgcagcctggtacgatggcgatgagctggtcggatcgggcgtcatcgccgaataaccggactttccccgatagcgtccaagcgaccgccgcagaagaagaagctcataaacacgggccattttaccgaaaccccggcaaaacaggcgacaaacagtcttcacaaccctccgctccacgctcaaaatacaggcagccatcacgtaccgtaccggccgatttccgacaagcatttccctcccaagcccctttccacaaggaggcaaaagaaagggacagcccagaacacgcccccggcgaacgatgacaaacagcctcgggaaacaagtctgaaacccgaacccaatataatcgccatacttgttgcggcaatcggaattatcccgcccgcttcctcgatcgtccgcaaaaagggagcgggaaacgaagaaatgccatccgacaaaaaacccccctcggctattgagccgaggagtgtcaatacagaccgatttcggacttaagtcgaaaatattgaaaattcaaccttcgaaaagtcgccgcattccgtacgaccagtcgaaacggcccgcaccctattgcatctccacgatcagcgaactataatccgaccagttcttctgatattcggctttcgtccctttcggtacatatattttataggaaaccagatcccaaccgccgggtttcgggaagacgcctctcgaaccgctctccaacaccgggaaagagccggacgcaatatcgtcgaacaaaacggtaatcttctccagggtcatctgatcccaggaactcctcgtattgaaggcctgatcgccgatacgctgaatactctttccgataacgaccgttttcaatgcggtgcattccgcaaacgctttcgcggcaatctcggtaactccatcgccgatataagcctcctgcaaacccgtacaaactctgaaagcccaatctcccatacttgtcacactttccgga

SEQ ID NO: 10482 - DNA, 4598 bp, Unknown
  gut microbiota DNA sequence
ataacataaatgcataatctccgatgcgggtcacaccttcgccaatcgtcaaggaggaaatcctgttcacatgcggataccaaggcggagtttccgaagtacctccatctctataatcgggcataggtccctccccggtaatcgtcaggacaccatcctccgtcaaagtccatgtaagcttcccggtcgttcccccaaaaatcaccgccgccgaatcgctgccatcgcaagaagataaccctacaggaaacaacaggcaaaaacacaaagaccaaaataaaaatcttctcataagctgaaaatcattaaatccccctaaaaacagttcgtccaataaaacaattcgacataaatatataaaaaattattcaaagagcgcctattcggcaatatttgccatggtgattgattatacgatttagtgtatcccccaggatttatcaggatttagttcgtcatcgcctcatttttttacagcgacaatcacgccccaagctccataatatcgtcctactaatctctttatcaacgatgtacttcgtcatagcatacaataaccacaaaatacatccgtagcaaacatgctcgatcatcatcggtggtcgctgctctatgccctgctcctccttatcctttatatgaaaatcgatttttacaaagacttttaacccaaagcgttatgtgacaaaggcaatgacgggccgacggtcgccggcacaattcgtatgtttttcaacttcccaaaacaccttccctaccgggaccgaaagagatttcagaccagaactgatcaacacgtccacgacacaccaacggattctctctcccgcaccacacaaacctcaatcgcgaatacacacgaaccgcgatctatcgcctacataaatttaacgcttttaatacgggtgtcccgcccggcgatttcacgttcgacgaggcccgtcaccacatctgcggcatcgtgccagcggttagcacggaatttccagcggtaagtggtcagatgggcatacaattcgggccagcgcagcgcccagtcgcagggaaaacgtaccgtatgaaccaccgtcgctgcgttcgagaggatgcgggcttccttgttagcggactggtgaaaccactccacacgaacctgcggcgctaaagcctgcaccgcgcgggcaaatccccggcctccgttgttactctcgatcagtgccgcacgcgtacccgactcgcggagcatcgttcccaccagtccttcggtcatctccatcggttcgcgcgaataaaccgcatcggtaacgtagatcaccccgtccggatcgacgacataacagagcgaacagaggtaatcgtcgcccgtatcggccgtatcggtatagttcgcccggcgcacgatgtcgcggggcagctcctcgtaagtcaggaaattatccccgtagagcagcccttcgcgcaccgaaggacgcccctgatacatacactcgaaccgcacgggatcgagccgccgcttaccacgcagcaattccgcgccgtgaagctcctcccagagcgcttcgcccggttcacggggatcgaccggcgacggaggacgcgttttgagagcttcgaagttcaaatagagccaggtatcgggcggcagcgtatcgagctgcgcccagtcggtgaactcgacgaaaggctcccggcggcagagcgtgccgatcaaatcctcctcgtgccagcgcgtgaagacgatcaactcgccggagaagttgtgcatacgggtcttcacgaccgaggtgtaccactcccaacagttctcccgcacgacgggcgaattggcctccatcgcatctttgtacatatagtaatcaattttgtcgcagattaacaaaaaaaacgttaaatttgcgctaaagattgattgacagcgttatggaaaaatcgaaaagagtagtcggttacgcccgtgtttcgacggaggcacaagacattacccgtcaaattgaacttattacggcctattgtagcgaccgaaattatcatctaatcaaaatcattcaagagaaaatttcgggagccagaaaggacaggaaaagtctaaatgaacttttagatgtggacgatgcggtcgccgatatgattatcgtgtcggaactctcccgtttatcgcgtgaagatgatattttatccgttctttcaacgataaacgaacttttgaaacaaggtgtcgatattctgtttttggataagcaagaccgcatttataaggctggaactattttatccctttacgacatcattacgctgtcagtagaagccaaagcaagtgccgacgaacgctacaagattgcaggtcggatgcagacgggtttacgctccaaactggccgagtttagcaatatgtttgcaggcggtacggttcctttcggctacaaagtcattcacaatcccgattacaaactgaaccaaacgcctaaaaacctgcttgtcgtcgatgccaaagaagccgaagcggtaaaatacctttttcagcagctaatcgacggcaatacgatacggcagactgtaagggtttacaataaattatacccttacaaactctcttattcgggcatctgccgcattatccgcaatcccaaatacaaaggggagatataccgacggggaaaattgtacggccaaattcccgaactgcaaatcatcacgcccgaagatttcgacaaggccaacaaacagatgcgtgaaaacagcctgtttcaaagcaatgctccgaaatactataatccgctgaaaggtttgctgttttgcccgtgtggatgcggtctttacatgaaacccaaccacaacagctatctaatctatcgttgttcaagtgcttataacgacaaacagaaatgcgaaaattacggcgtcaaatgcgcttatatcctatcgtccgtttggacttgtgtaaaggaaaccttgcacaccgaggaatacaagcgtttcaatacccagcgggcaaatgaattgcaggggataaacaagcagattcgggaaacaatcacccgaaaagtcaatagcgtcgatgaactgaaaacgcaatcggcatcgttgattgccaaaatcaagaaactgaataatgatgaccttattaatgaattggaaaccgattataatgtgctttgcaaacaaatcaagcaaaccgagcaggaaatttccgaactgaacggacagatagccgaaaacgatgccgaaataaaacggaacgtggagcagaaagattttagcaagatggagcagtcggccttatacaaggaaaaattgcaaaaggccgtctatcattccctctctgccatgcgtggcattttggaaatagtctttaagaacggcatgacacgttacgtgctgattaaaaagcaccgaaacggcggaacctaccttttgcccgatacgttcaaaggcgacatggagcgtaaacaaattatcgttccgtccttacgaaccgacaaggataatccctattcagcccagccgatgaatttgcgctacacgttcgacgaatttttcaaagctatgcccgtcgaagaatacgagatcccgataacggaatgaaaaaagagggcgattgctataatggcaatcgtccccttttcggttcggctaaacgaccgaacaattaaagatgttcccgtaacagatcaaggattacttgttcttgtgtctgcgtagaggttttgcgggcattttggattttatccgcctgccattgggcaagtttttttaatttctcctctatttcaagcgtgtaggccgcagcatcttcggctacattgtaaccgtcttggatgaatgaaatcaaatactttttagcgaggaatttagccgtgaatttttcacttgccgcttcaaaccatttgcggctcttggcacaccacccgtcagcctcttgcagacattggggcatttcacgggttttaagacttgccaccaaatctttggctttgagtttgttgttgccacacgcccaaagcgagattgtcgaaagcgggaaattgcgtcgttgcaattccatagcaaaatcaaaggccgcatttgtttccttaatggccattgcgggggctgccatgtagtcggaacctttccacgttttcgtgcaaatgttcatttcggcaatgagtaatgcaatggcaatctttttattcagcggttcaatgactactaaatcttcaagcggcaagcctaattcaaggtaggctttcagacggtgctgaccgtccaaaacagcgtaataatcctttgcatgttcatcggcaatatcgttgccgtccaaatcggtcagatgaccgtttgattttatgacctcttcaccgttcaccgccgtaatgggacacaatatcccatgctcggaaatagaatccttttttactttaattgctttttcgtcggtaggacgattacctttaataaacgcgaatttattcgcatccgaaacgttcagaacattcaacttattcatcgtgttttgtactccttttacagaggggcttaaattagggacagtcgcgaaataggcttaaaattataacaaattgattgtcaatgtgataaaaatttcatatcttagctacaggaattaaaaattcctccga

SEQ ID NO: 10483 - DNA, 476 bp, Unknown
  gut microbiota DNA sequence
gcggttttgaaacaaaggaacaaatcacagggttgaaagtctgtgactctccgccttccgaaaacacgcagacattcattgatgcggcagaccaatggtggaacagccgggactacgaacataaacgggaaatttacaacaggtataattctaaaaacgaataatatgcagattaacatcattgaacagattagcaactcatgcagttgcagccatatggaagcgcaggaatacttggattctgaaatccggtacctgcgcgagttgcaggaggcggacgacctgagggaagatgacatcgaaatggcgtgcagcaacctcggacttgaccttgacaaccaggaatattttatcaaccgcctcgcaggggcataaatacctatagctatggcttattttcataacatacattcattggcggacctgaagaaggaataccgccgtctggcattgcagcaccacccggacaagggtgg

SEQ ID NO: 10484 - DNA, 751 bp, Unknown
  gut microbiota DNA sequence
gcccgggaatcgctggaggctctgcgcgaggcgacgcccaaacccatcgctttcgacgacctggacttcaacctgggcgaacggtggattccaaaaggtgtttacgagcgtttcgcctcctcgctcttcgatacggaggtgaagatcaccttcgcctccaacctggacgagtacggcgtgaaggcggaagcgacgaacgtgaagatcacggagcagtatgccgtcagcgcgcagacccgtaagtacaacggcctgcaccttttgaaacacgccctgcaaaacacttcgcccgacatcaccaagaccgtcctcaaatgggtggacggcgaacggcgggaggtcaaagtgcgtgacggggaggccatacagctcgccaacagcaagatagacgagatccggggtgctttccccgaatggctgcgcgagcagtcgtccgacttcaaagaccgcctgacagacctctataaccgtactttcaactgttacgtacgcccgaagtacgacgggacgcaccaggaattccccgacctcgacctcaaggggctggggatagacaatctgtatgacagccagaaggacgcgatatggatggacaaactgctcggcggcgggataatcgaccacgaggtgggcggcggaaagacccttatcatgtgctgcggggcctacgagaagaaacgcctcgggctggccaacaaacccatgattatcgggctgaaagccaacatccatgaaatagcccggacgttct

SEQ ID NO: 10485 - DNA, 312 bp, Unknown
  gut microbiota DNA sequence
gaagcggaaaccatgatagtccttgacttccaatttcagctttacgtcccgtttcagttccatttcaagcaggcttccaccaccatacgtcgaactgaaaagtccgcaacagttgcctttggggataatgacctctttcaatgaaaagtcggcttcatacagctctttcaggcttaccctgccgatgtaagtcagcaggttcgccccgcagcaggaattgataagttcctcgtagaattgttcgtaggaaacctgctccttgccgttccggttcttacggttcgggaaacgcccgtaagccctgtagccgtg

SEQ ID NO: 10486 - DNA, 1123 bp, Unknown
  gut microbiota DNA sequence
ggctgtaaatctcgtcacggatttcatcttcgtattcatcgaagaagtcatcgaccgcttccccgtcaaagtcatggaatacggcacattcctctttcagtttcgcaataatctcacggacagcttcccattcggcatcgctgtaccactcgtctgccttttcccacaaatgttcgcggctcttgctgtcaaggcatttttgaatcagtccgcaatgattgtcaaggttgtcattgtagtccgtccatattagtgtataggccggttccatcagggatttgatgaaatccaatgtcaatgttttctgttcatccatttctgttacctgtgtacggcaggattccttttcccgtacataccgttataaatgacggaagcggccttcaagccgcctccgtgttgtttcctaaccatacagttccttcacgatcttgtcatatatttcctttgccatttccgtattccggttgaagtggaaataagccgtgtatctgtatcctgttcttggcactcctccgcactgctgtattgccctgtctatctcccagtcgatatcacctatgccaagagatatgcttgtgccatgcagcatacaccgtgcgagtttcaatgcggaatctgtcttgtcttccttgcgcaaccggtcgaaagccatcagcgcgatttgtctgtttgaaatctttatctcttccatatattttgcatctgtttgggtcagacaatcccggtaagttgcctgaatcgcgcaactatttcattgcatttgctttgggcaagttcctcatattttttgcaaatggcacagtatgccttccaaggttggcctctaagctcgtgctcgtatgaggacctgaccaattccggatattcttcaaaaagtgtcttgaatgctttacgccatttgcgcccttgccacaatccgtttgctatcaatgttatgaattcaaacatctgttcgtctgttttcacatccaatgcataaaaatggtctgttgtcggccacacgttgttggaatgctgccaagtttctatctgcttggttttggcattgtatgccattcttgtaattacctggtgactcatattgatatgtttttagttcattaccgtattgtctcttttc

SEQ ID NO: 10487 - DNA, 942 bp, Unknown
  gut microbiota DNA sequence
gccgtaacctgggccttcggccacctggtcgggctggcaatgccccaacagtacggcatcgcgggtttccgccgggaaaacctgcctatcctgccatcatcgttcatcctcctgccccggcaggttcgggagggtaaagagtataaggccgacccgggtgtcgtgaagcagctcggtattctccgggaattgttcggcatggccgagcgcatcatcgtcgcgaccgacgcggggcgtgaaggggagctgatcttccgctacatctactcttacctggaatgccgcacccctttcgtgcggttatggatcagcagcctgaccgaccgggccatccgcgaggggttacaacacctccgccccggcaacgaatacgacaacctttacctctcggccaaagcccgcagcgaagccgactggatcgtcggtatcaacgcctcgcaagcgcttgccgtggctgccgggcggggcgtctggtcgctcggacgggtgcagacccccacgctggcgatcatctgctcccgttacctggagaacaaggcgttcaagcccgccacctatttccggctgaagctctccacggcaaagaagggcacggagttcaccgtcctctccacggagaaattcgacggcagggagaaggcggaagcagcccgcgccgaggttatcggcgcccgaacggtacgcgtcgtgaacgtggagcgcaaggaggccagggaacagccgcctctcttgtacgacctgacgacactccagaaagaggccaacagccggtatggtttttcggcagaaaaaacgctcgacatcgcccagtcgctttacgagaagaagttcatcacttatccccgtaccggctcacgctatatatcggaagatgtggccgaggagattccggcactcatcgggaacatgacacgctatccccgtttcgcggaatacgcgggc

SEQ ID NO: 10488 - DNA, 597 bp, Unknown
  gut microbiota DNA sequence
aacaagcccccaaaaacagggaacagatcgacatctacaaatacggtttcatctcgcacggccgaatcctgacacaaaacgacatagccagtttctgcaagaaggaactcggtgagctattggtgcggacagaaatccggaacggagtggagatcagcccgatgccccatgaagggctggtgcggaccaaagaggtccatctgattcttggaacgaaactggatgagccttcgcaggaaaaacagataaaagacaacctgcgtaccaaactctcggcctgttcgccggacacattcaactaccggatattcatagaatacaataaagcataaatatcatacttatgaacccagttacccaacatctcatttcatcgtacctgctgatgccgctgctaaccgtgattttcggaatcgcggcctattttatcgcacgcaagaacaaactgctcaacaatagaaaactgatcgtgtatctgctgttgtgcggcatgattcttgccctgcccgccctgtgcgggttcatggactatagcttcatgccctatgtctatatcctgctggttgtcctgtactggactgccggacattataaccg

SEQ ID NO: 10489 - DNA, 1025 bp, Unknown
  gut microbiota DNA sequence
cacaggaggcattccggcgaaatgatactcggagaagaccattacggctcacacggagagcattatttctggccgaaggattattcaagcgcgaaactggctcagaaacggatcgacaaattggagaaagccggtattcggtgcaagcttaccggatataacggcggttacattcgttttatcggctacactcccgaagcagaagcgttactggagaaggaacgccaggaatacatcaccgcccatcggcaatggcaaaccaaacagacagtaatcaattaaacttatcaatatggaaccgaacaatttgaacgaatggtggggcggacagcccgacggactgaaacaggcattctctctttttcccgatggacggtggaaagaggcggacctgtatttgcgaatcaatatccgtaactactgccttctgaaaaaaggagggctgcttcccgaagacaaggaccgctcgatgctcagcgagattgtctgtgagctggccgatacggagctgtgccgtgcaaatggaaagacactcgaagacatgtgcgatacggacggggcttttctggaagagtaccaggaactgttcaaccggatatacgatgaactggaaatgagaattacggattatatgaacggacaatcaaaaaaaatgtaacaatgaaagcaaaagtgttcaagtacaagtctgacgggaataccgtcgtggcttcttatatggaactggagccgtatgcgaagaatgtatatctctccctgtcaagaaagaacgaagacgggaatgaagacgatgactgtttccatgtggtctgccggattgaaaacgtttatttttccagcgggcagtattcacgccggtttctcaagggagaaggttgcagagaggaagccgccacctattgcaggaactggattgcggatacgcttcaaagtgcggaaagaggagccttcgtcaatttgatctccgtccgcgtgttcgaggctctcggacttgacaccacttccctggtgcaagcccgtgagga

SEQ ID NO: 10490 - DNA, 579 bp, Unknown
  gut microbiota DNA sequence
ggtggatttccccggacagtggcaggcacggaaaagcacatgccccctgaaagcggggaacggctcaccatagtgcggattgttatcttcctctatctccttgtccctgttctcgtggtacacccgactgctccaacagaccatgtttatggaattgttatacaacagctcaaactggctgtacagttcggcgatgttgttgcgtgtggtcgtaccggtgtcgagtatcttgtatttgaggcggcggaagagaccgaggatatgccttgtacgttgtgacgacgggttggttatctcgtccgactcgtcgaaaacaaggcacagttttcttgaactgcgtttgacgaaccttgccatgccccgtttcagcttgccgagcatggaggtggataggacgatgaacacgccttccggcacagtttccaggtcggcattgttccttgccacccggaactgttccctgttgatcgagaggaagggtatccatgtcatattggtggcgatggcaggagccagtatgatgacattccgtactttgcggaatttgagcaggtatttggcacgatggtacacggcggc

SEQ ID NO: 10491 - DNA, 312 bp, Unknown
  gut microbiota DNA sequence
ggttttgacatccatatcagaaccaaagggacattcaacaggcatgtgaggggcattgacaggaacggcaccgtcagtttccggaaaatcaagggctgccggactccggactttaccggatgccataaggccgtgtccgcctatctggcgttcattacagaaaaagaaggcaaataattaaatccggggcggtaaaggtctgctccatgcagctgttaccgctaccggcttccggcctcacaattcacggttcagcgccattgccagcggaaacatcaaccggttataggctttaagcttttgcaaattcag

SEQ ID NO: 10492 - DNA, 306 bp, Unknown
  gut microbiota DNA sequence
tgaacgatagtatgaaagcaaaagtattcaagtacaggtctgacgggaataccgtcgtggctccttatatggaactggagccgtacgccgagaatgtatatctctccctgtctagaaagaacgaatatgggaatgaggacgatgactgtttccatgtggtctgccggattgaaaacgtttatttctccagcgggcagtattcacgccggttcctcaacggagaaaaccgcagggacgaaactgccgcctattgcaggaactggatcgcggatacgcttcagggcgcggaaagaggagcctttgtca

SEQ ID NO: 10493 - DNA, 385 bp, Unknown
  gut microbiota DNA sequence
tccgcgtgttcgaggctctcggacttgacaccacccccctggtgcaagcccgtgaggcatacaaaaggaggcaggagcagaaacgcagggaacaggaggagaaagaggcggaagagcgcagagcgcgggaagagcaacaccagcggctgctcgatgagcagaaacagaaatttctggacggggaacgaatcacgggaggaatgttccttgaaatcaccggaagggacggttttgacatccatatcagaaccaaagggacattcaacaggcatgtaagaggcattgacagaaacggcaccgtcagtttccggaaaatcaaaggctgccggacaccggactttaccggatgccataaggctgcgggcgattatcttgcatttatagc

SEQ ID NO: 10494 - DNA, 340 bp, Unknown
  gut microbiota DNA sequence
attataggctttcagtttttgcaaattcagcgcatatccggcatagggattggtcagattggtatagaagaatacatcggtaaatcccgcatgttcctccacaatttcaccatccaacggaatctcctccacattgaaccgctccagaggcagttcttccagacgggcatgctccgcattacccaatacgttcaggttacggttaaacagcacgaaccctttcttcctgtaatccacacgcataccatacggacgctccacaaggaaagcatccgccgctttctttatatagttttccatgatcctgaaattagaaactgcaaagatacaccatttgtcc

SEQ ID NO: 10495 - DNA, 380 bp, Unknown
  gut microbiota DNA sequence
gacgtggcgttcaagaaacggcaaagcatcgtgacggagttcgattccaccatcaacggcatactggtatgcacgcagcagagcctgagcagttcggtgaacatacccacctgcaacgacgtgatacttgaatccctgcaatggaacatcccgaagatggagcagttctacttccgtttcatccgtctcgactccaaagagctgaaggacgtgcattatgtcacctacaaggactccgtggagcagaacctgatggcgctggtgcttaccaaagagcggctgaacgagttcatcaagacgggcgaagtaaaggaacagtcggaaatcttcgaggagttcgacgtcaccatgtccgtcatcgagagcctgctggtcaggga

SEQ ID NO: 10496 - DNA, 480 bp, Unknown
  gut microbiota DNA sequence
ggagcctgtggaatgaaatccccggttccgaatcataaactataatgaagaatatcatggacttgaatcaggcagaagtggcagtgaccacgcagcatctcatagacatggggcaggaaaaagacaacctgctgcaaatgtccgacttcggcgacatgggggaattcctgtgcacctgctccgaactgtttcccgaagaggaaactccggaatacaggtacacgagatgggaggaaatcccggacctgctcatcaaccgggaatggctgtgttccaacttcttcgagataagggaggcgatggaacagctggaggaacccgacaaggattgcttcttcgactggtgtgaccgttacgggtatgacatcagtacggaagacccgcacctgctggtggcgcactatatcgaactttatggaaatgcggcctatatcgacgatgagccttgcccggacagcggggatgacagcctgctgtact

SEQ ID NO: 10497 - DNA, 335 bp, Unknown
  gut microbiota DNA sequence
ccatgtcggtgttcggagacaggatcgaagaactgcgaaaagacatcatcgaagcgatacggcagttgctccatgaccatgccatgaacgcgatacggtttccggaagaggattatgacccggtctgggtgatatggtttggcaagaacggagacccctacgaatgcagggtgacaggactccgggtaacggacagcagcctgaccgtccttgccgaagagaaagaaagcggtgatgaagtggaatgttacagcccgttcgaactcggagccagcaacatcgactggctttccggaatgtatgaggctgtatggcagcaactggaagagagcaaa

SEQ ID NO: 10498 - DNA, 543 bp, Unknown
  gut microbiota DNA sequence
attatttaattgtttggatagtctgaccaactttttcaaaaggtctattataagaccctctgataaagtcggtcctaaattattttttctgtaaaatcagaaaccagctaatcttttcatttgtcgggtctggtagttgtaaagcaatgcctacatccttttgattgataagtgcccgatgccagtaaacatctgccgaatgttcgcccgcatgatatagccccatgacatgatgccgccatgcaaaccacgtgcgttgaacatagagtagttgccattctaaatcagctaactgttgcaggactggtaatgatgattcagtcgttaagcggaaatctccattatcgttcgtttgtagggttaagcgttcgccacgctggagaacatcatgcaccgtaagagaatccgcatgaatagccgatttcgggcgaatctgccaatcgactaattcgtattctccattgagcaattccaaccgctcttttttcgatatggagttagcccaaagatatatgccacataggacgataataattccacctg

SEQ ID NO: 10499 - DNA, 199 bp, Unknown
  gut microbiota DNA sequence
tcgtaccctgcgtcgtctcgacgcatttaccgtcgccggacggtagcaaggtgtacctttgtccgacaaaccggtgtttgtccgacaaaggtccttgctctgcgaggccgggtgccgctcccgagtcgcgcccccttaaaccttgacatatggaagaacagcacaaagagagaaaagccagttacaagtactcgttccg

SEQ ID NO: 10500 - DNA, 2249 bp, Unknown
  gut microbiota DNA sequence
gaggcacccggggttcgaatccctgtctctccgcaacaaacgctgaaaatcagcagattgcaaaacaaacacccagttttgcacccaagaatgtaaagtcgggtgtttttgttttatttaagataatacaaccactacataataaaagagtagcgatattaaaagaatccgatgagaaaagactaatatttatctatccattcactttgatttttcaggactttacatcgtcctgaaagtatttgttattgtattccaacgtcaggagtggattataatacaagttttttgtgtggatagaatttcgttttgcttaatgtacgaaagtacttatctataaacgcatgaaatattagcacaatgaatcattggaaatcaactttggccgtgataggaataggccaactcatatctattttaacaagtacgattgttggcttctccattattttttggattagcaacgaatttaaatccccgacagctttatctctggctattttagctggatttttaccacaatttgtattaggcttgtttgccggggtctatgttgacagatggaatcgaaagaaaacgatgttttattcggacttgttcatcgcgttctgtaccctatgtctttttattgtgataaccaagggttataaagacctttcttttttttatctattgactgcttgtcgttcaataggcagtacgtttcatgcacctgctttacaggcaagcatccctctactggttcccaagcaccatcttgtcagggtatcaggtttgtaccattccattcaatccttcagtgaggtgatagctcccgttgtaggggcaagcctcgttgtttggcttcccatacagtatattctgctcatagatgtgatcggagctgttgctgcttgtctgaccttactttgtgtccagattccttctcttcaaaaaacgaaagttcttccagatttcaaaaaagaactgacggaatgttggcataccttgcggcgtacaatgggcattttgcctttattcgtatgctttacgctggtgacttttgtccttatgcctgtttttacgttatttccttttatgacgcttctgcatttcaacggaaacattttgcaaatgggagttgtggaaatgggttggggctcaggggcattgttgggcggtttagtacttgcctgtaaggctttgaaaagcaagcaaacattagtgatgcatacggcttatgtgatattgggattgtatctgattagcgccagttatttaccatcaagcgcatttataggttttgtttgcctaacatttacaggaggcatagcctattccatttaccatgcgcttttcatcgctattattcagcagaacttggcttcggacatgcttggacggactttttctctcatctttagtttgagtacctttccatcaatgctgggtatcgtagcttcaggatattgggtggaagcatggggtatcacatccgtctttatgatcagcggatgggttatctttctgattggagtgggtgcaaattttatttcttcaatcaagcagttggataattacgcatagtattatttattaaagaattattatatgacaaagaaagaacacactacgattacagagttatttcaagttttggacttgttggaaagcctggacatgcagttttggttggatggaggctggggagtggatgtcttgtacggacagcaaacccgcttgcatagagatattgacattgattttgatgccaattatacagaccaactccttgatcttttgcaggagagaggatatcaaattgaaacaaattggttgcccacccgtgtggaactgtatagcaaagaattaggctatattgatatccatccttttgtcttgaatgcggacggcacttccaaacaagccgacttggatggaggctggtatgaatttcaaccggactattttggaacagcagtctttgaaggcagaagcatcccttgcatttctgcaaaagggcaacaagtattccattcgggctacgatttaagagagaaggatattcacgatttatctataattaaacaatgtataacaacaatgagcctaacaattagataagaacaagaaaatgacagaaaaacaaattgtctggtatatcttacttacagaagtaaagatagacagtgacacccagtctgtcacatccctgagtgtagctccattggcagtcttgccggaattccagcgtaagggaattggggggg

SEQ ID NO: 10501 - DNA, 1473 bp, Unknown
  gut microbiota DNA sequence
gctatcgcaaggctatcgatttaggaattgaatttcctttcgaagtctctcatgaatattgcatggtggctgaattaatacctggagctactgagaatgtgaaaggtatggtttgttatccaactgactttaaatagtttaacaagtaaaattcattatataactcggactgggtatttcaatttcccagtccgtattctgatagtacttattcaattggaagattgtgttgcttcaagaatgaaagtttatcccaataccctctttgaaagacgattttgttatcttttacatgaaaaaatccgcatccacgaagtccaagagagtctttccattccatgatagcccattcgccatcttcaaaaatattttccaccatacaaaccattttagcagtggcaaattcattcacaaacattttgtagattgattctttacctattattggttcgtttgcgacttgatgatttactgcattagtagcatacagctctgctatatgataagcatctgctttgttaaagcaatctatccatttttccaaaacttctttaggcttcattttttataaattcttaggattttgattctgtaataaaaacaatctgtttggatgcatagatacttgattttattaataataggctattctatattctaaatcctctggatttttgctctctctgcaccgagttacgtagattctgctgtaacttttcccattgttccttaaaccattgtactatgggttgtcggtttatggtcagcataagcttaccactatccatcggatgtttctcaaccctaaaaatatcattcttgatgtcaaatttccacctgtgttcttcggaataaattttgccactacattgtatggattctttctttgtcaagaggttttctatcatgtctttggtaaacccgataacagcgcataatttttccattctcaacatctctttgaacatgggaaaccatttgtgggctttttcaagcaaggtgctcaatcgtgatatttccttgtctttggcttcaagttcttgattatgtattctttgaagattacgaatttgtctgctatgctgttcctgtatttgttgtatctgaatttttaattcatcagtagctttgtcccgtttggtaatttcctgatgtagctgctcgatgtgatgttccagttctttcagcttaccgcttccgaaaagagaacctacaccgcttgctatggcggtagcagcattggtggctgttttctttagtttgtccgtgcgtatctctgcttttacctgtttgagttcctgttcggcaaggcttacttgttgttccttgtgtcgcttggtttcctctatacgttgcagttcggctttctgcttctcaatgatgaaatcatttcgttccagatgctctttacctgtgacagcttttgcctgtccacgttccatcaggagaatatcggaagcaagggtctgcatg

SEQ ID NO: 10502 - DNA, 938 bp, Unknown
  gut microbiota DNA sequence
ggttattctaatctttgattaattccggtacagaaacaaaacgtaccgaaaggtggaaaccggatttatttcggtacgcttccccgatcggcacaaaaaacacgcaaaaaacgaaaaatactacttttagtattttagtatattagtttttgactatatttgcggacatgacaaccatttaaaaaactgaatttatgagcaaagcaaaagtaatctccgtattgaatcacaaagggggagtaggaaagactacaaccacgatcaacctgggcggcgcgttacgtcaaaaagggtacaaggttcttttgatcgaccttgacggacaagccaacctgactgaatcgctgggcttctctgcggagcttccccaaacgatctacggtgcgatgaaaggcgaatacgacctgccgatctacgagcataaggacggtcttagcgtcgttccctcctgcctggatctctcggccgttgaaacggagttaatcaacgaggccgggcgggaacttatcttagcccaccttatcaagggccaaaaggagaaattcgattatatcctgatcgactgtcccccctcgctgtcgctgctcacgcttaacgcactgacggcctcggatcggctgattatcccggttcaggctcaattcctggcaatgcgtggaatggccaaacttatgcaggtcgtccacaaggtgcagcaacgtttgaactcggatctttcgatcgccggggtcctgataacccagtacgacggaagaaagaacctgaacaagagcgtttcggaactggtacaggaaacattccagggcaaagtgttcagcacccatatacgcaactccattgcgctggccgaagccccgacacaagggcaggatatttttcactatgcccccaaatctgccggggcagaggactacgaaaaggtatgtaacgaactgcta

SEQ ID NO: 10503 - DNA, 14148 bp, Unknown
  gut microbiota DNA sequence
aagctcttgaagtcgtgctcgccgatgaggtgcgtggcgccccgttccatggcggcgatgtccaagttcggacccacataccaggcggtgcgatcggtgaacaccggcggcgtatcccccgtggcgaggaagtacttgtactcgcgccattgggcgtcgaagcgggccgagaagccccgcggccgctcctctaccgtgcgcaccacgatgccctcgcaggtcagcgcgttcagcgagcggcgcaggttgtaaggcgtgcgcccgcgcagctcgcactcgtcgatgtcgaaggagaccacctgcccgcgggcgtgcacgccggcatcggtgcgcccggcgcagaccacgtccaccggccggcggaacaacaacgacagcgcccgctccaactccccttgcacggtgagctgccccggctgcttcgcgaaccccgcaaacggcgccccgtcataagccaccgtcgccgagaacgtgagctcccgcgcgcactcggccgcccgctcttccaagctcggtcgcgagatttccattaggcaatcatcgcttctggcccgaagaggtcgcggatctcggccttcagcaccgtggactgggcatctaccgacaccggcagctcggcgcggaaacggcggccgtcggcctgctgcacgaagagcaccacgccgtcgcgacccgggtacgagttcaggatgcgactcaggtgcgccgagcggttctggtcgaaggagcgcgagggcacccgcagctccaagtggctcggccgcgcatcttcctcgttaagctccagcgcctccagctcgaaggccatgatctggttaccgcggtcaccgctctcgaacttgcccttgatcttcgcgatgacgtcctcctggatgacctcggcaaagtcgtcgtacttgaagcagatgcactcgatggagccggtggtgtcctccagggtgaacgtggccatcttcgtgccgcgcttcgtgagcttcgtcgccacattcgagatcatgcccacgaacacgccgttcttgatctccttggtctgttcggagagcatgcccatgtcgtagcgggacatacggcgcagcgtgccctcgaagggagccagcgggtgctcgctcacgtagatcttcatgatctccttctcgtaggcgagcttggtgcgcttgtcccattccacgccgtcgggggcgggcacgtcctcctggaagccggagtcggcgtcgtcggcgaacatgtcgaacatggacacctgaccggcatcgcggtctttctgacgcttggccgcaccttccagaagcggcgtttcttccacgaaatgcatgagctgcttgcgggtgtagccggtggagtcgaaggcaccgcccttgatgagggcttcgagcgtcttgcggttgtagcacttcgcatcgagtcggttcacgaaatcgtgcagcgaggtgaacggaccgttggcctcgcgctcggcgatgatctcgtcggcgacgttcttgcccacgccgcgcacgcccaccaaaccgaagcggatgccgccctcgaccggggtgaactcggcgcgggaggcgttgatgtccggcggcagcaccggcgtgccgttcttgttgcagctggcgatgtagcggatgaggcggtcggtgttgcccatgtagctggtgagcacggcggccatgaagtcgttcgggtagtgcgccttcaggtaggccgtgcgcatcacgaggatagcgtaggccgccgaatgcgacttgttgaaggcgtacttcgcgaacttctcggcatcctcccatatctgttgggcgacttccagggcgtagccgttctcgaccgcacctgcatcccagtcggcctgcagctggcgcatgatatcgagtttcttcttgcccatggccttgcgtaacttgtcggacttgccagcggagaaaccggacatgaccatggatatctgcatgatctgctcttggtagaccatggtgccgtgggtctcttccaggatggggcgcagacggtcgtcgtagtagtgcacggcggtcgggttctttgcggcggccacgtattcgtccaccatgccggactccaacgggcccgggcggttcagggcgatggaggcgacgacgtcggagaactgcttggggggtaggcgcttgaacaggctcacgtacagcgagccctccacctggaacaggccgtccatgttgccggactgcatgaggcggaaggccttctcgtcgtcggtgggaatctcctccggaacgatcttcacgccggtgcgctcctcgatgttgcggcaggcgatggaaagcacgtccaaggtgcgcagacccagaaagtccatcttcaacaggcccaggtccggcgtgtaatggccgtcgtactgcgtgatgatgccgccgcccttggtgtcgcgtttcatgggcacgtgatcgctcatggggtcgcggcagatgatggtggcgcaggcgtgcacgccctcgccgcgcacgtggccctcgatggacttcgcggcgtcgatgatgcgcttgacgtcctcttcggtgtcgtaggccttcttcaggtcggggttcgtgtccagcgccttgtcgatggtgatgcccagctcgtcgccgatcatcttgcagatacggtcgcccacgccgtaggggtagtccagcacgcgggccgagtcgcgcacagcgtttttggcctgcagcgtgccgaaggtgatcacctgggagacatgatcctcgccatagacgtccttgatgtgattgatgacctcttcgcggcgcccctgctcgaagtcgacgtcgatatcgggcatctccacgcgctcgggcgagaggaatcgctcgaacatgaggccgttgggcatggggtcaaggtcggtgatgcccatggcgtaggccacgatggcgccggcggccgagccgcggcccgggcccacgccgatgccctggctgcgcgcccattcgatgtactcctgcacgatgaggaaataggccgggaagccctgctggatgatgatgcccatctcgtagtcggcctgcttctgctcgcgctcgggcaccggggtgccgtagcgcttctccaggccctcctgcacgcgcttgcggaaccacgactcctcggtctcgccctcgggcaggggaaacttcggcaggatgggctcgcgctctaacgtgacgtcgcacttcgccgccacttccacggtgttgtcgcaggcctcggggaagtccttcatggcctcgcgcatttcctcttcggtcttcatgtagaactggtcgttctcgaacttcatgcggttcgtctggttgaccgtggaaccggtgccgatgcacagcatgatgtcctgggcctcggcgtcttccttcagcaggtagtggaagtcgttggtggcgatggtctttaagcccgcggccttcgccacgcgggtgagctcgtggttcagctcggtctgggtgaagccggcgtcggtgcggatgccctggttctgcagctcgatgtagaagtcgccctcatcgaagcagctggcgaacttacgggcccattccacggcgtcgtcgaagcggcgctcgtcgagcagcttcggaataacgccggcgatgcaggccgatgagccgatgatgccgtggccgtacttctgcagcatggagaaggtggtgcgcggcttgtagtagaagttgtccacgtgggactcgctgacgagcttcagcaggttgtggtagccctcgttgttctttgccagaagcagcagatggtacagcttcggcttcacgtccttgcgcagcgactcgtcgggagtgaagtacacctcgcagccgaagatgggcttcacgcgcttgcccgtctccttctcgacggcatcgcaggcgtcggagagttccaccatgccggacatgacgccgtggtcggtgacagccaccgccggcatgtccagctcggcggcgcggcgcaccatgtccttgatatgggtgagcccgtcgagcagcgagtactcggtgtgattgtgcaggtggacaaatgccatagggtgtcagccccttcgataaggtcggcggcgcacgggtttcagttgtggtgtggttatgcgcgctgtgtcgtgtcatgcttggtcgaaagcgcgcggcagacgcgagcccagctcgccgcgccgcttcccttccgaccgctcttccgttccgtcattttctcggctgccatgataccagcccctcgccccacggtgtgcgaacaaacagtgagttttgcatggaatgccctccgcgcggagagtgcggagggccgaagcagttttttaggcgtaactcgcacgacgcaagatcctccgatctatgaagaccatttgccctcgaagaatttggcagaaattgcgattgttagctctgcgaggatgcagaacctccttccagacgatccgcagccatcgcacatctctccagatattcgttaggcgttaactccagagagacctcccttgtcttgagcggcctatttcgccctttaactccgcccaacatgctaacaaacgcaattttcgctgaaaaagacgacatcgattgcgccagagaaacctacagcaattgctcccaggtcttcagggtctgaatacggcagaagtcgatgaaggggacgagctcgccctcctggtggaaggcgtccagggcgccgaaataggccaggcggtcgtcggcgctgatggtgcagggagcgccgttcagcttcaggaggacgtagttcatgagcagcctcgccgtgcgtccgttgccgtcggcgaagggtggccgcaataggttaggcctcctcgaggtaatcggcgagacggggacgctcgccggggcgcgtacgcgagagctgtggagactcgctcacgaggcgaatgtcgccatatgcaagcgccgcccccaacgagccgtaatgagcgatatggcgcagcagctgctcgtcggtatagaggcgcccctccccgtcttcccaaaatcgcacactcgtcactcgcctttcacgctcggccttttccacttgcctgattctagcacgaagtattacggacgatgaggcccagcactaatcttgcagttctaaaggaatcagtgaagaaagccatcgctttcctcagcaaatcagaactcgatctcgccgtagtcgaggccgtgcgtacctcgcatccattggaagaactcgtcgcagttcatgacgggaacgaggccttggggaaagtcgggctggtttcgcgtgatgagggcgtcggccctaagcgccaaggcgatctcgtagaggaggtagttctctgggtcgtgccacgaggcggcaagcatcaggtcgacttccctctcgctcgctgcgaacacgttgacgaaggtacgcaagccccgcagttgccccatggcggcatccatctcgctcgttcgtcctccgttggaaaggatgtacacgaggtcggtcacctgagacgaagagatccacagctcgaactcccccacccgaccgccaatcatcagcagccgagccttctcgtagaacggctcgcgttcattcaggtagtccacaaccacgttggtgtcgagaagtagcttggcttgggccatgtcacaccagccccttggcggcgagacggtcaagcttgatctcggccttcgtcatatcgtcgaaccgtgttgagcgcttgcgcgagaggctgtcgacaaagcgcgccgccgatgcccaccgctcgtccgcagacgtatcgccatcttgcaaaaggaagtcggcgctcccctcctcgatcagccggtcgaacaagaggttcaccgcctgagaggcgttcattccatctcgcttgagcacacgaagcccctgctgcttcttccgctccggcatccgccccgtcaccatcgcatcggtcacagtgacctcctttccgatgtacaacatttatagtacaacctttgagaaagtcaagactactgcttatcgctcgttcggtcgacgaaccgtcccgaaattgcatgaaatctcgagttgttagcgtctcgggggtgtacctgaacggtgagctcggagctatctcttgggagcaagatcttgacctggtgttttgcgagagcgcatttggcgcgcatcttcccgatcttttcgcgcagcggccctagacgctaacaactcgagatttcatgcaaaaacgggggtgttcgttgactgagaggggcggccgttgggaaggctccgaaaatttccgactcgctcgagcgcagggaaaagccgttgagcatgaagcgaaatcggtttcgtacgctggtcatgaagcgaagtcggtttcgtagttaaacgacgagaggcgcccgggtgggcgcctctcgaaacaggctcaaaatttggggctgcgcgtgtcgcggctccctttcttggctcggctgggccttatgcggcctggcctacgtgcgcaagctgggcctcgcaccactcgagcttcttctgatgggtcatcagcgtcgcctgatcctggggatcgttcttctgctccagctcggcgatggcgctcttgcactcggcggcctcggcgcgcacggcctcggcgtcgatgtcctcaacggccgtaccgaagcgggccagcaccgtcaccttgtcgtcgagcacggaggtggcgccgcccatcacgaggaactcgcgcttctcgttctcgccgatggtcagcgtcacaacgccgccctcgcggttcagcgacaccgtcagctcatgcccaggcagcacgccgaagtagccatcggtgcccgggatgttggcataggtgatctcgccctggaacagggccttgtcgggaagagccacaatgcagcccatggaggccattagttaccttccttctgcatggcatcgtaggcctcgtagacctgctcgatggcgcccttgttcacgaagcactgctccgggatgtggtcgcacttgccatcgaggatctccttgaaggagcgcacggtgtcctcgaccttgacgtatacgccgggcaggcccgtgaagacctcggccacgtggaacggctggcccaggaacttctgcaccttacgggcgcggttcacggtcagcttctggtcctcggacagctcgtccatgcccagaatggcgatgatgtcctgcagatccttgtactgctgcaggatctgctgcacgcccatggccacgtcgtagtgctcctggccgacaatctcgggatccagcgcgcgggaggtggactccagcggatccacggccgggtagatgcccagctcggcgatggaacgggacagaacggtcttcgcgtccaggtgggtgaacgtggtggccggggccgggtcggtcaggtcgtcggcgggcacgtacacggcctgcacggaggtgatggaaccggtctgcgtggagcagatgcgctcctgcagatcgcccatctcggtggccagcgtcggctggtagcccacagcggagggcatacggccgagcagtgcggacacctcggaaccggcctgggtgaagcggaagatgttgtcgatgaacaacagcacgtcctggccctggtcacggaagtactcggcttcggtcagacccgcgaggcccacgcgcagacgggctcccggaggctcgttcatctgaccgtagaccaggcaggtcttctcgataacgccggagtcggtcatctcgaggtagaggtcggtaccctcgcgggtacgctcgcccacgccggtgaacacggaggtgccgccatgctcctgagccaggttgttgatgagctcctgaatgcagacggtcttgcccacgccagcgccgccgaacagaccggtcttaccgcccttgacgtagggctcgatgaggtcgacgaccttgatgccggtctcgaaagtctcggtggtagtcaccagggtgtcgaacggcggggccggatggtgaatcgggcgccactcgacgtcttcgggcatgggcttgccgtcaacgggctcgcccagcacgttccaaatacggcccagggtcgccttgcccacgggcatcatgatgggggaaccggtgtcggttgcctccaagccgcgcaccatgccgtcggtggacgtcatagcgacggtacggacgatgtcaccgggcaggtgcgtctgcacctcgagcacggtggacacttcacccgttggggtttgtgccttcacggtaagggcgttgtagatggccggcatggcgtctgccgggaactccacatccacaacggcgccgacgattcggacgatgcgtccgatggcgcctcccttggccgcttcagtagaagtgttatcagccatttaatcctccaaagctgcggcaccgccgacgatctcggtgatctccgtggtaatggcgccctggcgcaccgtgttgtaaatgcgctccagggtggagaccatctcgttcgcgttgtcggtagccgatttcatcgcgttgcggcgagcgccttgttcgcccgctgcggaatcgagcatcgcgtagtagaacgcgttgttcaggtaggcgttcatcatgtaggacatgaccgactccgtgctcggctcgaagtcgatgtcgcccgggatggcggaatcgtcccgctcgcggaaggacttgaaaatgtcctcctccttggccttaagacccagaagatccgcgtaggactcctccttcaccggcagcacctgctgctcgaccaaggtctgctcggcggcgttcttcgcgtggttgtacacgatgagcacctcgtcgagcttgccctcggcgtaagcctgcatcacatagccggacagctcggccgcctgagcgaactcggggtcggccgaatatcccgcgaaggagaacaccggctcgatgcctcggtaggtgaagtacccgatggccttcttgccacaggcagccacctccacctcggcaccttcccgctgcttttccttcgagagcttctccacatagcgaagcacgttggtgttgaagccgccggcgagaccccggtcggaggtgacggctacgatgagcacccgcttcacctcgtcgtggacctgcagcagcggctcgttatccaagtgagcgtactttgccgtgctgatgagcatgtctgagatggcgaccgcccaagggagcgcgctctccacgcgctcggaagcacggcgaatcttggcagccgcgaccatttccatggtgcgcgtgatctgcttcgtcgaggtgacggatttgattcgccgttcgatgtcgtgtaggttgggcatggtctacctaccttacgctgcggcgtcgaaggactgcttgaaggcggcgatggcctccttcagagcgaccttggtctcgtcgctgagcttcttctccgtgttgatcgtctgcaggatctccggcttggaagcgcgcagcgacgcgagcagctcggtgcggaagcgaaccacggacgtgagcggcagatcgtcgaggaagccctcgttgccggcgaagatagcaatgacctgctcggccacgggcatcggcatgtaacgaccctgcttcagaagctcggtcatgtgcgaaccgcgggtcagctgatcctgggtagccttgtccagatcgctgccgaactgggtgaaggcctgcagctcgcggtagctggcgaggtccagacgcagggagccggccacctgtttcatggccttgatctgcgcggagccgcccacgcgggacaccgagatgcccacgtcgactgccgggcgctggccctggaagaacaggtcggtctgcaggaagatctgaccgtcggtaatggagatcacgttggtcggaatgtaggcggacacgtcgccggcctgggtctcgatgatcggcagggcggtcatcgagccgccgccgttctcgtcggacatcttgaccgcgcgctccagcaggcgggagtgcaggtagaacacgtcgcccggataggcctcgcgtcccggcgggcggcgcagggtcagcgacatctggcgataggccacggcctgcttggacaggtcgtcgtagacgatgagcacggcgcggcccttgttctcgggacccgcgggcttgccgtcctcgccgttgtagacgaagtactcgcccatggcggcgccggccatcggcgcgatgtactgcagcggagcggaatcggaggcggtggcggccacgatgatggtgttcttcatggcgccgtggcgctcgagggtctccaccacgccggccaccgtggaggccttctggccgatggcgacgtagatgcagatcatgtcctgatctttttggttgatgatggcgtcgatcgcgatagcggtcttgccggtctggcggtcgccaatgatgagctcgcgctggccgcggccgatcggcaccatggagtcgatggccaggataccggtctgcatcggctcgttcacgggctggcgggagataacgccgggagccttgaactccaccgggcgcgtgccctcggccttgatggggcccttgccgtcgatgggctggcccagcgggttcaccacgcggccgagcatggccttgccggcgggaacctccacgatacgaccggtcgtgcggacctggtcgttctccttgattgcggtgacgtcacccagaagcacggcgccgacctcgtcctcttcgaggttctgggccagaccgtacacggtcttgccgccctctccgatgaactcgagcagctcgccggccatggcatcgcgcaggccgtcgacgcgcgcaatgccgtcgccgacctggatgaccgtgcccacttcgcgagactcgacgctgacgttcagctgctcgagctgcttcttcagcgcctcgtcgatggactgtgcggtgatttcagtcactagcattcacctccatctgttgtgtccttgaggacgttgcgggcgcgattgagctgcgagatcatgctcgcgtcaatgtagttgccgtcaacatccatgatgatgccgcccaggatggacgcatcgatgcgctcgcgcagcaccgcgcgccgtcccaaatcggcctcggctttttccgtaatgagttggcgcagtccgtcgtcgagcggcacggcggtggtcacgtcgaccacgcaaatgcccagcttgtcgcccagcagctcgcggtacgcgtcgaagacccgcggcagcaggtccgcctggccgcgctcggccatgaccgcgagcacctcgcgcagcgccagatggcagtcggcaaaggtgccttccaccagctccttgcgctgggcgggggtgaagtccgggttcgacaggctctgagtcagctccagatcggcgcgcatgagacggatgatctcgcccatctgctcgcgcacctcaagcactgcctcctggccgccggcggtatgggcggcatcgaagagcaccgatgcgtaaaccgcgacttcctctttcacgacgagacgattagttgccattgaaactacccgcctctttgacgtagcgctcgatgatggcgcggtgctcaccctcggtgagatcctcgccgatcaggcgcgcggccacatcgaccgaggtgtcggccacggtggcctgcagctcggaaatggcctgcttcttctcggcctcgatggcggccttggccttcgcgatcatgtcggcggcctcggtttgggcctgggcggtgatgtccgccttgacggcctcgcccaccgagcgagcgtcggcgatgatctgcgcggactgggccttggcgtcggccagttgcttgttgtactcagccagcacgcgctcgctctcgatctgagcttcctcagacttcttcagggcctcgcggatggtgttctcgcgcttctccagcatgccggcaaacatcggccagccgaacttcgcgagaatgatccagaggatgatgaaggcgatgagcatggggatgaactccgccatgtccgggaggatggcggagataccgccctcctgctccgcctcagcagcgaacgcgagcgccgggaaagcagcgttgagagccaaggcgccgaaggcgaccttcgcaactgctttgttcgctcttgtcttcacgtgcaattcctccttccagccttataacggctatgacaaccggttaaagactagaactagaggatgaaggcgagaacgaagccgatgagggccagggcctcggccagagcggcaccgatgatgaagttcgtgaacagacggccacccacctcgggctggcgggcggtgcccacgcagcagccgtagcaggcgatgccgatgccgaggccggggccgatggtggccaggccatagccgacgagcttcagcgcagcaatgacgaatacagtttccacagtttcctcctttaggtcgtttttgagcctgtttcccaaaaacacttacggattatggtttccggctttggaggagccggcttaacccagatggggggggtggggccttggcggccccgggtgcgcgggcgcggggtgcggcgcgcgggagcggttcctagtgggcgctcgtggcgatctggacgtagaccgcggagagcaccgtgaacacgtaggcctgaaggaacgccaccagcgtctccagggcgtacatggcgatgagcagcaggaaccagggcagcgacagcacgccgctgatgggatcgagcgcctggatgccgcaggtgaggaacacgctggaggccagcgcgaagatgccgagcaccatgtggccggcgaacatgttgccgtaaagtcggacggcgagcgtgagccagcggatgcaggtggagatgagctccaagaaccagatgatcggcaccatgaccttcgggagccccgccggagcgaaggacttcaggtaggtcaggccacccttggccttgatgccccagacgttgaagtagacaaacgagatggtagcgagcgcccaggtcaccgagatggtgcccgtcggcgtcttgcagccggggataagacccacgaagttcgagatgaggatgaagaagaacagcgtggcgaggaagggcacgtgcttcttgaagccgtgaccgatgatgccctcgcccatgtcgttgcgcacgaactggtaaccgtactcgacggtgttgacgaacttgttcgtcgggatgagcgtgagcttgcggcccacgacgaggatcagcaccagcgtgatgacccagcagatgaccatccacacaatgtactgggtgactccgccgaaaaccacggtgggatcgaaggatgcctgaagatgaggcacttcttcagagagcattgaaagagcgtccacgtatcaacctttcctagcttttccgagccagcctcgtcacgccgaacgcgatggcggtgacggagagagccccggcttccgacaggacaaagggcagcgcagcatcccggttgacgttgatgcagaggatggcgaaggcgaacatgaggacaaatgagaagagcaggcagagcatgagcacgcccatgtgccccagattgcccgaatccgtcatgtgcttcacccggtgcaagccgaacacgaggggcaaaaaccccgcgatgcccgccaagatgccgagtgcgattgccagtaccataacctacttccgtcggggcgcttgcgcgctgttacacccaatgtaaaccgttgcctatgataacgtcttgttcacaaaagctgaccaactcaaccaatttctggggtgagcggtgaaatgatcgcggcggcggcttgcgcccctgatctgggaaaatttgtgcaggtgcactaaaacgaagcccatcagcgcgtccgtcgcttcgatcaccgacttttccctgatctactcccccgtgtactcccggacgaggatgccggactcggccaaaagctcctgggacagctcgtcggggtacgggttttggtagacgatctcggtgatgccggcgttgatgagcatcttggcgcacacgacgcagggctgcgtgttcacgtagatggtggcgccggcgatgttgatgccgtagcgggccgcttggatgatggcgttctgctcggcgtgcaaaccgcggcagatctcgtgacgctggccgctcgggacgcccagctgctcgcgaaggcatccggtctcgctgcagtgggtcaggccggtgggcacgccgttgtagcccgtggccaggatacggcggtccttcacgatgacggcgccgacgccgcggcgcaggcaggtggtgcgggtggccacatcgttggccatcttcatgaagtactcgtcccagctgggacggttatctgctgccatggttgttcctttcgtccggcgcggggaatggcgggggcctcc

SEQ ID NO: 10504 - DNA, 21773 bp, Unknown
  gut microbiota DNA sequence
ctatgtcaatggtggtttaacagcgggcgcagctggattcaggcgggaattttgagttgttagacatcggcagagggggaattcggcctgcgccgggtctgcggctctcgcgacctggggtttcgcctcccgtggttcccaaatgccctcgctgtgcgatggcgaatgtctaacaactcgagattttcgccccgggaggccgcgttgctgctcgacttccgtcgaaaggagaggttctcaatgccgaagaagcttctcgccgtcctcgcattgctggcggctatagccgtggtgatagcggtcggcttcgcattggctcccggctcggccatccggcctatcgccgccgactcgccgtgtccggtggtcggatgcgcctcgggaagttgccacgggttcgatgacgtgcccgatccggacggcgtccatgagatgacctgcccggaagcctcgtgcgcgtcggtggagtgccacgggtgggaaaccctcggctcgcgctaccaccaggcgtccgatgcgagcttgaacctctgggtacttatgccggtggttcttgtggtggcacttgttggcatcgcgcgaaaggtgggacgctcatgagggtgctcgtcgttgatgcgctggcgctggtcctgtacgtcgtggtgtcgctgcctgcactgacaggcgttggcgtgcacgaatggctgggacttggcgttggggtggttctgctcgtgcacggagtccaacatatcgatttcgttggtcgtcttctggcggctcgatgctccttgcgcgcgacggggcggatgctgctcgatgttgcgctggtgctctccgtggtggtcgttgccttatcgggcctcatggaatcgggagcggtgctgccgaccttcggcctttatgccgaagggtactacttctgggggcctttgcatgccgcctccgccaaggtacttctcgcgcttctcattgtgcatggggcgctcaacatcggttcggtgtggcgcttgatgcggcataggtgcgcgaaggagaccgcatgagcgagcggttgctattcggcggccgcctttgatcctgcaaaagagcggcccgggcgagtgcccgggccgctcggtgtttttgatgcggatagccgtctactccacatccacgacgtcgtcggtggtgagggcgtcggccatgaggtcgcggtactcggcgggggaggcggcgttggtggccgcgcccagctcggtatcgcttgcctggggctcggggatttccacggaggtgtcggtcggatcaagccccgcgtctacgcggcgcatcatgtcctgccactcggcgtactgggtgcccacgtagctgatgccgtcctggttcagcgtgtagctggggcaggcggcggagtacatggtgagccccttgtccttgaacgtgagcgcgagggacaccagatcggtcacggagtagtcggtggtcacgcagcgggcgagggactccacggtacccgggatctcggtgatggacttcgagagcaccttctccacgatggcctcgatgatcatgcgctgggcctgggcgcgggagaagtcgccggcgcgggtggcgtggcgctcgcgggcgaaggcgagggcctggtcgccgtcgagggtctgctcgccggcctcaagggagatgccgctcgtgtcggaatagaagctctcgggcacgttcacctgaatgccgccgagctcgttcacgacgtccttcagctcttcgaagtgcacctccacgtagtgggtgatgggcacgccggcgaaggtggagagcgttttcacggcttcggaggggccgccgaaggcataggcggcgttgatcttctgggtgccgtggccctcgatgtcgatcatggtgtcgcggggcaccgagatgaggtcgaccacgcccttgtcgggatcgatgcgggcgagcatggtcacgtccgatcggctggccgtctcgcccttgcgggcgtcgctgccgaagatgcccacgtaataggagccgtcggccttggcgggggccagctgctcgccgagctccttgaactcagcgtcgtcgagaccgccttggatggtggcgttgatgccgttcaggtagagcgcgagcgccgtgccggcaccggcgagaacgacgacgagggccgcggcgatgccgagggcgatcttcttgccgcgcgacttcttgcgggccgccttggcccgggcgaggctgtcggtggcggcgaagctttgggagccgcccgcggcggaaacggggctcgcggtcggcgcgaagccggtgccctcgaaggaggagcgggcgcgggaggcgcggggcgtgcgcgaaacgtccgcctgggcgctgcgagaacgggcggcctgggcgctccgagtgctgcggccggcgctcgttatgggggcggagtgggaaccgcggcgttcctgcgcggagccgaggggcgccgagtgggcgccccggcgcgaggtgccggagttgagcggagcggaatgcttgccaggtctgtttgccatagggttcggcgcgcaggcgcctgcctcctcgataagcacggtggtacgaatgcgaaatcccaagataccaggaaaagggcggccgtgggccgccttcgacaagaaaacaggcttttggaagggtggtggaaggggaaggaaggggttgccgaaaagggcggcgctctctataatgcgagctattgaacagcgtgtccatttttggccgttctgtcgaaacgcgaccgctgcatcgtaaccgaacgaaggagaccgtcatagccacggcaacctgcgcgccggccgctccctgcgaggatcggcgcatcgcgaaatcgaggcgcgccctgcgcggcgcccttgtcgagctcatggaggagcgcggctacgatgcgctcaccgtgaacgacttatgcgagcgggccgatacgtcccgcggcactttctacaaccacttccgcgacaaggacgggctgctcgccgtgctggaggacgaggtcatggccgacctcgatgccctgcaggagcgcatgcagtccattaccctggcggacatgctggccttccgcgcgacgggccgcccgctgccgttcctcgtggagctgttcgactacctgcgcgagcagagcgactttctgcacgcggtgcttggccccgggggcgatgtgcgcttcgggccgcggctgcgcgaggcggtctgcgagaacctggtgcagaacatcctgcatgagaaataccgcgacaaccctacggtcttcgtggaatactacgtcgccttctacgccgccgcctacttagggatcatcgcccactggatcgagcgcggctgccccgaatcctccgagactatggcgcgcatcgccacgcgccttctgttcatcaagcccggcgagtccatcgagctgtgagttgggagtaaaccaatgaagaagaacgccaagaacggcaagtacaccgagatcatcaccgaggcgtccacgtccgtgaaggagccggcgcccgcggcgtgcgcctcctgcgcgccgcgcatcacgacggtggaggaggctcgcgccgacgccgccgagatcgccgccgcctcccgtgccgccgcggcggcctgccccctccacatcggcatcgacgtggggtctaccacggtgaagctggcggtgctcgacaacgacaacgagattctgtgggcggtgtaccgccgccatcatgccgacgtgcgcgccaccatcgtggaggtgctgcgcgaggcggccgcggcctatccgaacgagaccatgaccatcgccatcaccggatcgggcggcctgcttctgtcccagtggctcgatgtggccttcgtgcaggaggtcatcgcgtcgaagacggcggtggagacgttcatccccgccaccgacgtggctatcgagctgggcggcgaggacgcgaagatcatctacttcgacaacggcatcgagcagcgcatgaacggcacctgcgccggcggcacgggcgccttcatcgaccagatggcggcccttctggacaccgacgccggcggcctgaacgagctggcggccgatcatgaaaccatctaccccattgcgagccgctgcggcgtgttcgccaagaccgacgtgcagccgcttctgaacgagggcgcgcgcaaggaggatatcgccgcctccatcttccagtcggtggtgacccagaccatctccggcctcgcctgcggccggcccatccgggggcacgtggccttcctcggcggtcctctgcagtacctgcccgaactgcgcaagcgcttctacgagacgctggaattgaccgacgaggccatcatcgtgcccgagaacgcgcacttgttcgtggccgccggctgcgctatcgccggtgtggcggagggcgcgcggcccgagaagctcgcggatgtgctcgcgcgcctggagagtttgggcgacctgcaaggctcggaagtggtgcgcctggcgccgctctttgccgacgaggcggagctggcggagttccacgagcgccacgacgccgagcgcgtgcgccgcgcgtcgcttgaggactaccggggtgtggccttcctcggcatcgatgccggttccactacttttaaggccgcgctcatcggcgaggacggggcgcttttgtggtccacctacgcctcgaacaagggcgacgtgctgggctgcgccaaggcggccgtggccgagctgtaccaggcgctgccccgcgacccggaaacggccgagccgctcgtgaagatcggacactctaccgtgaccggttacggcgaggggctgctgcttgaggccctgcgggtcgactccggcgagattgagacggtggcccatctgcgcggcgcccaggagatgctgcccggcgtggagttcatcctggacatcggcggccaggacatgaagtgcttgcgcgtgaaggacggcgtcatcgaccatatcatgctgaacgaggcctgctcgtcgggctgcggcagcttcatcgagtccttcgcgagtggtctgaacctggacgtggccgagttcgccgccacggccatctccgccgagaacccggtggatctgggcagccgctgcaccgtgttcatgaacagccgcgtaaagcaggcccagaaggagggcgccaccgtgggcgacatcgccgcgggcctggcgatctccgtcatcaagaacgccctgttcaaggtcatcaagattcgcgacccgcacgatgtgggcacgaaggtcatcgtgcagggcggcaccttcttgaacgacgcggtgctgcgcgccttcgagcagctctccgaagtgaacgccatccgccccgatatcgccggcaacatgggcgccttcggcgcggcgcttctggcccgcgaccgcttcgaggagacgcgccggcgcaccgagaacgtgccgctgtcgccggatctgggcccgaaggtgcccctaagcggacttctgtcgcttgaggaaatcgaggcgctcgcgccgacgcatcgcaccgtgcgctgcaagggctgctcgaacgcctgcctgctcacggtgaacgatttcggcatcgatgcggcgacgggcaagcaccgccgcttcatcaccggcaaccgctgcgagaagggcgagagtttgggcaccggcgccgagaagtcggccgttccgaacttgttcgagtacaaagccgagcgcaccttcggctacgagcccttggcccccgaagacgcgccccgcggcaccgtgggcatcccgcgcgcgctcaacatgtacgagaactacccgttctggttcaccttcttcacgaagctgggctaccgcgtggtgctgtcggatccctccacgaagaagacctacgaggccggcatcgagtcgatgccctccgagagcgtgtgctatccggcgaagctctcgcacggccacatcgtgaacctgctcgcgaagcacccggacttcatctggatgccctgttccaagtgggagcgccaggaggacgagaccgccggcaaccacttcaactgccccattgtggcgagctatcccgaggcgctgcgcctgaacatcgacgagctgcgcgagaccgatgtggccttcgtgtcgccgtgggtgccctaccacgacaaggacaagctggccgagcgcctggtggtggagctgacggagaacttcgcgaaggagacgaacgggtgcggtcccgcgctcacggctgacgagatccgggcggcggtggaggcggcctgggccgaggacgaggcgttcaaacgcgatatccgcacgaagggcgtggaaaccctcgcgtggatggagaagaccggcacgcgcggcatcgtgctggccgggcgcccctaccatcaggatcccgagatcaaccacgccatccccgagctgctcacgagcttcggtttggccgtgctcaccgaggattccgtggcgcacttgggtcagctggagcgtcccatccgtgtggtggaccaatggatgtaccacacgcgcctgtacgcggcggccaaggtggtcacgcaaaggcgcgacctcgacctcatccagctgaattccttcggctgcggcctggacgcgctgaccaccgatcaggtgcaggaggtgctcgaggcggccggcaaggtgtacacggtgctgaagatcgacgaggtgtcgaacttgggcgcggcgcgcatccgcgtgcgcagcctgctggcggccttgaaggaccaggccgaccgcgaggccgaggcggaagccgacgcagccgccgagaagaggggctgcccggctgcgtgcatcgacttggacaacctggacaaactggtgcccgccagcttcaccgagaaggccgacggcgtggtgaccgcagccgaggtcgagcagcgcgagggcgcctccaccgagttcgcgcgtcctcagttcaccgagcagatgcgcgatgagggctggacgatcctggcgccccagatggccccgtaccatttcgagcttctggtgcccatcttcaagcgcgccggctacaacgtggcgctgctgccctcggtggaccacggcgcggtggacgcgggcctgaagtacgtgaacaacgacatctgctacccgtccatcctggtcacgggccagatcatggaagcggtgctgtcgggcaagtacgacactgacaagctggccgtgctcatcacccagaccggcggcggctgccgcgccaccaactacatctcgctcatccgcaaggcgctgaagtccgtggggctcgggcacatcccggtcatcgcgctgtcgttcaaggatttgggcgaggaaaaccccggcttcaaggtgacgccgaagatgctctatcaggccatctacgcgctgcagtacggcgacttgctcatgatgtgcctgtaccgcacacgcccctacgaggtggagccgggcagtgcgaaccgcctgttccagtactggatggacgcttgcaagcaccagctggagcgcggcgtgcgccagtcggaattccgccgcacagtgcgtcgcatcgtggaggacttcgacgcgttgcccctggccggcgagggtaccaagccgcgcgtgggcgtggtgggcgagatcctcgtgaagttccatccgacggccaacaaccagatcgtggacgtcatcgagcgcgagggctgcgaggccgtggtgcccgggctcatcgagttcttcctgttcggcatcgccggcggcatcttccagcagcccatcggcaagtcgaagaagagcgcgctcggcagcaagatcggcctggccgccatcaagaagctgcgcaagcccgtgaacgacgcgcttgagaaggcgagccgcttccacccgccggcggacatctacgagctggccgactacgcgagcgagattctgtcgctgtgcaactccatgggcgaggggtggctgctcaccgccgagatggtggagctcatccgctccggctgcccgaacgtggtgtgcacccaacccttcgcgtgcctgccgaaccacgtggtgggtaaggcgaccatcaaggagctgcgccgccgctacccggagagcaacatcgtggccgtggactacgatccgggtgcgagcgaggtgaaccagctcaaccgcatcaagctcatgatcgccgtggccaaggcgaatttggccgagaaggaggccgaggcccgcgccgcccgggcggtcgcccgcgacggcgccccagaggagcccgaggccatggccgcctccgtggaagtggagacgaccgaggtcgtggagtagtggaatctgccaacgcttcgggaaaactcgtcatcgtgccgacgcccattgggaacttgggcgatatgacgctgcgctcgcttgaggcgctgcgcgaggccgatgtggtgtgtgcggaggacacccgggtgacggggaagctgctcgcgcatttcgggattgagaagcggctcgtgcggctggacgaggcgatgatcggctcgcgggctgcgggtgtggtggaacgagtggccgccggcgaggtggtagcttattgctcggacgccggcatgcccggcgtatccgatccggggctgcgacttgtggccgcggcgcgcgaggccggcgtggccgtggaggtgctgcccggcgcctcggcggcggcctgcgcctacgtggcctcgggaacggtgtgcccgcgcttctacttcggcggcttcttcccgcgcaaggcggccgaacagcgctcggtgctggaagagctgcgcggcctggatgcagcgctcgtgttctacgaaagcccgaatcggctcgtggcggcactttcggccatcgccgaggtgctgccgtggcgcgcggtggcggtctgccgcgagctgacgaagctgcacgaggaggtggcccggggaacggcggccgagctacgtgagctttttgcggcccgtgctaaggagcccggcggcgttcgcggcgagatcgcgctcgtgatagacgcgccgggtgaggcggaggcggccgccggcgccgagattgcgacggcatcggccaccgcgcgcgctgccgagctcgtggcggagggcttgcgcaccaaagaggtcgccaagcgccttaccgtcgagttcggcatcccccgcaacgacgcctacaacctggccatgcaggccgctcgctaatccccgtgtcatcctgagcgagcgaagcgagtcgaagaatcccatggcagcaacgagaaagcgtccggcaaaaacgatgccccccgagctcgtctttatcgacggcttggaggtttggctcacccgcaaggccatcaagaacatgcacctgagggtgaagccgcccgacgggcgcatcgaggtgtcggcgcccctgcacctgccgctcgccaccatccggaagttcgtgggggagaaacgcgactggatagagcgccaacagcgggagatcgcgcaatcgccccgtgtcgaggccgctgcggccacgcctgcggaagtagcgcagtggaaggcggtcgtcgcggcctgcgtgcccgcgctcatcgaggcctgggagcctatcatgggcgtgaaggcgggcaggatcgcctaccgcaacatgacgagccgctggggcagctgccagccttcgacgggccgcatttgcatcaacgtgcgcctggccctgtacccgccggagtgcttggaatacgtggtcgtccacgagctgtgccatctgctggaacgcggccacggcccccgcttccacgccctcatggacaccttcatgcccgactggaaagaacgccgcgccaagctgcggtagggggattgccctctgcgtttggtggaaacagcgcccgacggggaattagctggtgccgggcgctcttcggactagtccgcctcttcgcttaaatcgacgatgtcgtaggtgatttggtattcgctttcaatgtagttgaagaagtcgcccgggctcatcacgggtacgtgagcctgggcgaatcccttttcgtcgcgcgtgagcagaaagtcggcctttaccttctcggcgcacacgtcaaccaggcagtcttcgaaatcagcccatcgccggctcgtcgctcggtgaatgtcagcgctgtcgacggagcagatttccaaccattggtagctttcttcgaaggcgctctgcacataatcgctgctataggtcttatggagtacgtagaacacgtcggtgaacgatttcgctgagacccacagttcgacatcgccgaattccttcatcaccagcagtttctgggcgatgtcgccctcgggagattgctgtgtgtaaaggtctatgagcacgttggtgtcaagcaaaacgcgcatagcgctcatcccttgcggcattgagttgacgtgagaatggctcgtctgtggcggacggcccgacgtacatggccttgagggagcggcgcaccttctctttctgctcgtcggtcagctcgcgcttcgcgccccgcatcccctcgagaggatcatggggcttgggcagctcgtgctccgcgagaacgaactggtaggcggcgttgataagctgggttggtgttgagccgatgtcatgcaaaatgccattgccccgctctttcaaggcgatgggcacacgggccgagacgatagcgtccataacggcctccttcctttccgtcactatagtgtaatactgtcgaacaagcaagtggcagattggataggcgaaatcttcgttgaaaaccaaataacgaacttttgtgctaaaagggcttttcattgggcttgtattacattacaatgcgaacaaatattcggttttgagagcgaaaggcctggtgagagcatgggagaggttgttggacgcaaaaagaaggctgtggtggcaggagcgctggcgcttaccttgggtgccggcctggggcttggcgccgtagcttgggggagcgagggatccgtgcccgaagggggcgtacagtctggggatgtctgggggccgctggtgggcaagaagttggaagagaaagcgggggccttggcccgttcccatcgcgccgaagtgcagcgggcgctcgcggcctatagggcttcggaagcggtagagcgggaagctgccacggaagcaggggagcaaacgccggccgaagccgccggggcgcaggacgctcatctttctgccgagggcccaggtgcctcatcgggcgaggctgcgggtgcgtgttcggaagaggcggatcgggcggacgagcagcgcggcggccaggaggcgtcgaaggggtccggaagtgcggcggaaggcgggggactcgcctctcagccgagtgcacctgggtccgagccctcggaaggggcatcggcagaaggcggctctgctgcttccggggaggtgccatccgacgagggttcgggcgctgccgactcgatcgcccccggcacgctggtggtgggcggtaccgccattccctaccgcgatgtgcgcggcggcgcgacgccgagttccggaggcggcctttggctggggtcggatgcggtggacgacggcagctggggctatttcgtcgggcacaatcccggctcgttcgcgccggtgcgctcactgtcctcgggcgatgctgtcgttgtgtgcgaccggtcgggggcgcagcgtgcctatacggtaagggaggtgtttcaagtggaggagacggccacgtggaagaccatcgcctcgcgggtgaccggctacggcgagtcggtggtgctgcaaacctgcgcgggcgacggcatgaacgtcatcgccgttgcggcctagagtcgagcgacttcccggcacgtgccggtctggaaagaaaggctcggaagctcttgggcctccgagccggatccatactttgtggaaaggcggtgatggcttattcgtcgtcctcgtcgtcgtggccgtggtcgtgctcggagatgtcgctcacgggcttctccaggccctcgatgacgatgccgttcttctcggcgtagtcccacagcgccgcgtggatggcctcctcggccagaagcgagcagtgcaccttcaccgggggcagcccgtccagggcctccatgacggccttgttcgtgaccttaagggcctcctgcaccgtcttgcccttcacgagcacggtcgccatagagctcgtggcgatggcggcaccgcagccgaaggtcttgaacttcgcgtcctgaatgacattgttctcgtcgatgtcgaggtacacgcgcatgatgtcgccgcacaccgcgttgcccacggtgccgcagccgctcgcattctcgatctcgccgacgttctgggggttggtgaagtgctccatcactttgtcggagtagttcatagccatgggggattctctctttcttttggtggggaggatgctgaaggaggtgacgggtggtgctagtttgcgtaggggaagccgtcggccttgaagcgctcgataaccgattccaccttgccctgctggaaatcctcgtacagggggctcatcatgcgcaggttctgcagcgtcgccttaagcgagtccacggcgaagtcgacgtcttccagggtggtgtcgcggccgagcgtcaggcgcagcgatccgtgggcgatctcgtggggaaggccgatggccagaagcacatggctcggatccagcgagccggaggtgcaggcgctcccggaggacacgcagatgccccgggcggccagctgcaacaacatgccctcgccctcgatgaactcgaaggagaaattcacgttgttggccaggcggctctcccagctgccgttgagcttggccgaggggatctccgcgaggatgcgccggatggcatggtcgcgcagggcgagctggcggttatgctcgggggcaagctcgtcgaccgccaattcggcggcccgggcgaagccgacgatgccgggcacgttctcggtggagccgcggcgcccgcgctcctgctgtccgccatcgaggaggttttcaagcttcacgccacggcgcacgtacaaaagcccgacgcccttggggccgtagatcttgtgggaagaggccgacagcatatcgatgcccagctcgttcacgtcgatgggctcgtggccgaaggcctgcaccgcgtcggtgtggaagacgacgttcgcttcgtgggcagccgccgccagctggcgaacaggctcgatggtgccgatctcgttgttggcgaacatgatggaggccaggatggtgtccgggcggatggccgccttgaaatcctccacgctcacgaggccgtgctcgtccacgggcaggtaggtcacctcgaagccctcgcgctccaacgcctggcaggtgtgcagcacggcgtggtgctcaatggcgctcgtgatgatgtggcgccctttggcggcgttggcccgggcgaagcccttgatagcccagttgtccgattcggtgcccccgctcgtgaagaagatctcgcgcggggcggcgccaatgaggccggccaggctctcgcgggctgcggccacggcgtcggaggcctcctggcccaaggggtaaatagaggagggattgccgaaatgctcggtgaagtagggggtcatggcctccaccacttcgggacggacgggcgtcgtggacgcatggtcaaggtagatctgcctcatggtgctcctgcttccgcgtctgggatgggaacgcccggcggggctcggaaccgccgccgtgcgcctccatctaagtctagtaatttgctagagtttaatataagccgcttgcggagattgtcaagaacctcttatgattgttaccatattcacgacgatttcccagaaaggcgacccggtgaagatttcgacgaagacccgctacggcatgcgtttcatgatcgatctggcccaaagtcagggggagggccgggtggccctgaaggatatcgccgaccgccagggcctttccaagaagtatctcgagcaggtcgtcgcgcctctcgccagcgcgggtttgctcgacgtgacgcgcgggaaccagggcggctaccgtctttcccgcgatgcaagtgccatcacgctggccgacatcgtcgccgcctccgaggacggcttggagttgctcgactgcatggggtcgctctctgcctgcgagcgcgccgaggactgcccgtctcgtcgcgtgtggggcggccttcaagcggcgatcggcgattatctctccgggctcaccctcgccgacgtcgcctcttccgccgccgctgccaacttgtaatctaccaccagacctctttcgcgtatcatgtgtaattacctgtgccgcgacgagagaggacgctgtggaagacgaggggaaaagtactggctctccatagctgctttcgtcctcgtgttcatcgcggtcgtcgtcacgctgtccaccttcatgcagcagacgagcaaccgcatcgtcgcccaggcgaaccagtacgtctccgatgccacggcccaatcctgcgtgctggtctccaccctcatggagaacacgcagaaagacatcgagactatcgccgcccttgcctcggagtcggcggatgtgaccgacatcgtcaccagcgaggaatggctcatcagcgtggaggagacctcgcctttcgacaccatcgacttcgttgatgtcgacggcatgcagcactcgccccagcacgagccggtgaacgtgtcggatcgctcttacttcaagcgggccatggcgggcgaatctggcatcgaggccgtattcaacacccgcatgacccatgagaacctcgtgtacttcttcgcaccggttcgcgagggtgcggacggtccggtcgtgggcttacttctggcccactacagcgagaaccggctcgccgatcttctgtcgggcgatttcttcggctacgcgtcccaggtgatgctgtgcttgcctaccggggaggtggtggccgccacggattcctcctatgttggcaggaaccttatccaagaggcgcaggccgacccctctgccacctccggcgcccgcgatctggagcgcgcttttgccaatcacgagacggtcacgtacagctacaaggctgagcgcggcacgggctcggtgtgcatccgcgaggtgccgggtctcggctggatgatgctggagacgttcccggccgccgctaccgaacagatgatcaacgaggccaatgaaggcggttggaacgccctgttcgtcatcgtggtggtattcgtcctggtcattgccggcattatcttctacaacaaccgccgccaccgctcgctcacccgctcgatgcgcgatcgggaggacgtgcagcgtggggtggccaagctgaccgagcggctggtgctcatggatttggatgccgatcggttccgctacatgagcggcccggtcacgccgagcgacccctacgagttggaaggctcctacaccgccatgatagagcgcctgcagggcctggtcgtgggcgacgaggccaaggcggaggtggccaagctctacgacaagcacacgatcatcgatctcatgccgcccggctccgacgagatccgcttcgagtaccagatgaatcgcgggggagacgtcaaatgggaggacatcaacctcatctgcgtgcagcgcgacgcggcggggatgccgacgcggcttctctacacgacccaggacgtcacggcgctcaagcagcgcgagaagcagctccagctggccatggaggactcctatcgcgcggcggttgccgccaacaacgccaagagcgacttcctctcgcgcatgagccacgatatccgcacgccgatgaacgccatcatcggcatgacggagctcgcgcgcatgaacgaggggcatccggagaaagtggacgactgcctggcgaagatcacgctgtcgagcaaccatttgctcgcgctgatcaacgaggtactcgatctctccatgatcgagaacgggcgcctggtgctgaccgtgggagaggtggatctgcgagcgttggctctcgagatggagacgatgttctcgcagcgctgcgaagaatcgggcatcgccttcgcgattgaattcgaagggctcgcccatccgctggtagagggcgacgggcttcgcttgcagcaggtgttcatgaacatgctcggcaatgcggtgaagttcacgccggcgggcggctcggtgtcgctgcgggttgtcgagcacgcctctcgcgtcgaggggacgagcgactacgagttcgtcttcgccgacaccggctgcggcatggcgccggagtttctggcgcacgtcttcgagcccttcgcgcgcgagcacgactcgcgcaccgagtccgtggagggcacggggctggggctttccatcgcccagtccgtcgtctcgctgatgggcggcacgattgatgtgaaaagcgagccgggtcgcggcacggtgttcacggtgcgggtgagcatgcgctatgtggaaagggatgcgaaaggcgtccttggggaaagcgacgacgccgacgatgcgcgcgatgcttcgcagggggatgcgcccgcgccgaggggcgccgacttgagcggcgtgcgcgtgctgcttgtggaggacaacgagcttaacagcgagatcgccgtggcgctgctggagtccctcggcgcagcggccgagacggcggccaacggccaggaggccctcgatgcgctggatgcgagcgagccggggcatttcgacgtggtgctcatggatatccagatgcctgtcatgaacggtctggaggccacgcaccgcatccgcgagagcgcgcgggatgatttgcgcgcattgcccattgtcgtgctctcggccaatgcgttcaccgaagatgttcaggaatcgaagcgcgctggagccgacgaccatctctccaagcccatcagcataaaggacctggcggccacgctgggcggaatcctcggacgcgcctgatccttgcggcgcttgcgtcccccgccacctttgctgccctggcgttccttacggccccgcgtcatcacgcgcctacggcgcagcgcggagtcgaaggatcgtgcggcccttccctgtgttaagatagcctgcacgcaacaaccctaaaggggagcggcggtgtcatcggccgcctgcgcccggaaaaggagtcttacccgctatgcctaagggaaccttcggcgtcaccacgcccatctactacatcaacgccgcgccgcatctgggcaccgcctacaccacggtggccgccgacaccatcgcgcgctacgagcgcatgaacggctacgacgtgtcgttcgtcaccggcaccgacgagcacggccagaagatcgccgaaaccgccgagaagaacggcatgaccccgcaagcctggtgcgactcgctggccccggccttcaccgatgcgtggaagacgctggatatcgactacaccaacttcgtgcgcaccaccgaggatcgccagacccgtgccgtgcagaagttctggggcgatttgtacgagaagggctggctgtacaagagcgcctacgagggctggtactgcgtgcacgaggagacctactacgccgagagcgatctggagaggaacgaggacggcgaattcgtgtgccccgactgcaagcgcccggtgcgctacgagtcctcgggcgaggagaactggttcttcaagctctccgagttccaggacaagctcctcgccttctacgacgagcaccgcgacttcatccgaccggtcagccgtcgcaacgagatcgtctccttcgtgaagggcggcttgcaggatctgtccatctcccgctccagcttcgactggggcatccccgtgccgtgggatgagggccacgtgttctacgtgtgggccgacgcgctcatcgcgtacctcacgggcatcggctacggcgaccccgagcgcacatccgagttcgatcgccgctggcccattcagtatcatttcgtgggcaaggacatcacccgcttccactgcgtcatctggccggccatgctcatggccgccggcatgcccatcacgcacacggtgttcggccacggttttctgctcaccaagggcgagaagatgtcgaagtcgaagggcaatggtcttatgccggccgatctggtgcgcgtgttcggcgtggacgcctaccgctactacttcatgagcgacgtgcagttcggccacgacggctccatctccatggagcgcatggtacaggtgtacaacgctgacttggccaatacctggggcaacctcgtctctcgcgtgacgaacatgaccacgaagtacttcgagggccgcgtgcccgaggcgcccgccggttccgaggacaacccgctgcgcgagatcgccgatgggctgtacgcggaatacgacgcctgcatggccgaggtggacttcaccggggccgcggcggccgtgcaaaagctggcgagccgcgtgaacctgtacgtggaggagagcgccccctggacgttggcgaaggatcccgcgcgtgccgatgagctggccggggtcatctacaactgcctggaggccatccgcatcatcgccctgtacatggcaccgttcatgccgaacacctcggccgaggtgttccgtcgcctgggtctgggagagatcgccggcgtcaccgacatccaggaggccacggcctggggccagttgcccgccagcgtcgccgtggaggtgggcgaccccctcttcccgcgcctggacgtggataaccttcctgaactatagtgaaattgaaacggtaatacgtgtatttgtttgctataatggagatgcactagcaaagtccaactgcgggcggcgcttcgagagattggagagtcgcctatgtttgagaacgttcttttcgccgccgccgcggtcgctaccatagcgggcttcattttggaggtctggagggaaatgaaatcgagcaagcaggaggatggcgaggggagaaacagaaaagaccagcggtaactggtcttttctgaatcaaaacaacccgcgccgcccgccagagtttacagcttcgggctttgctggtgcttccattatagcagccctgtttaggagatgctagaaggaatcatgagagagcaagatcctgcgttttacgatgcgctgttccgtcagaagcgcaagggcgggaagtggcgcgtgatgccctcgccggtgctggaagggcccgtggccgatacccatgcgcacttgcagatgctcgctgacccggcctgcgagctggcccgcgccggcgcccacggcgtcgccttcgtggagaccatcgtcgatccggccgaggacggcttcgccaccttcgagatgctgcccctctggctcatggaagccgcgcgcgatctgaaggtcatggaagaagaggacgacggggcggctggcattgtcgctgccccggcggtgccccatgtgcgcatcgcggccggcgtgcacccgcacaacgccaaggactggacgccggagcttaaggccgccctgcgcgagcgtctgcgcgaccgccgcgtgagcgcggtgggggagatcgggctcgactaccactacgacttgtcgccgcacgatgtgcagcaagacgtcttccgcgcccagatccgtttggccaaggaagcggggctgcccatcgcgctgcatatgcgcgaggcccacgacgacggcttcgccattctggaagaggagggcttccccgaggcggggactcttctgcactgcttcaacctggacgcagcggaggtggcgcgttgggtggaggccggctgctacatcgccttcggggggccgctcaccttcaagaaggctgatgaggtgcgcgaggccgccgcactggtgccggctgaccgcctgctcaccgagacggactcgccctatatgacccccgagcctgtgcgcggtaccgactgcggcccggcccacaccatctataccgctgataagctctgcgaagtccgcggcgccaccacgcccgaggcccgcgccgagctgctcgcccaactctacgaaaacgcccagcaccttcttaaccgcaagcccacctgttggcagaggataggcgcttaatcgagaggcttggctgatcccgctcaatagttcggcgcgccgcgctcagcatcccaaatgggaagattctgagagaaactgagaaatcttcccatttggtactataataccctttgtcgctgaaatagtacgaaatgggaagattatgcattcggatgcgcagataacgtttggccagggaaagcctcgcaacccacgagggaaaatccgcgatgccgaagatttgggccaggctattcggaagcgccgcaagaaactgggcctgacgcaggtgcaacttgccgatgcctgccagtgctcccctcgcttcatcggtgagctggagcgcggagtggcgggcggtaacatcaagcaagtgctctacgtgtgccagtccataggacttgatttgtacgccagagggaggggagaagattgaggctcgaagtctatcgcgacagccgggagggcatggaactggttggggcatttgcttcgaccgatttcggaatccgcttcttctacgacgttcgatacgtgcagcggggagaagaaaagggcgagtttggcatctcggagagcatgccgctcgatttcgggtgctacgagccccaggaatatgctccctttttccaagggcttttgcccgaaggcgttgtgctcgccaatttggccgagcgttaccaagtgccccgcaatgattttcttgccttcttcgagaagctcggatgcgagagcattggcgccctcacgttcgttgccgagggatcgcgattgaccgatttcaagccgtcctatgcccccttggaaaactcagtggtggaacagttgcgcgaagacgcggagcgggcggtgacggagatgaccgatgagctgaggctttctctctcgggagcgcaatcgaaggtggcttggtacttgcctgaagaggtcgatgctcgagatgcggctctgagcgattggaggctgccgcttgggacggcaccgtcctcgcatatcgtaaaggtcgctcgaagaggcagggaggagctcgcctacaacgaattcgtatgcatggagatcgcccggcggtgcggttttgcgacacctgacgttgccctcatccccgagattccgggcgccattgctgttaagcgctacgatcgcgttccacttggcgagggcggtcttctgcggttgcaccaagaggatttctgtcaagcgcgcggacttcccctctatttgaaatacgctgatgcgcatcccgaagttagctatgttcaagtcatcgccaagcttgttgatgcagtttccgagcgtccggcgcaagagagactcgagatggcgcgtcggctgctgttccactatcttattgggaactcggacaaccatcttaagaattacgcctttctctatagcgaggactggaagcatcgcgcgctggctcccctgtacgatttgacatgcattccgttgacgggctattcgacaaaaatggcttttgcgctcggtgcccacagggagctgagcgatattacggctgacgacttggcgcgcacggctgaagatatgcgcgtttcgcggaaggcggcgaaggaggagtcgcgactgcttgcggagcggttcgaagccattgacccaaccagcttcgtcgaatttgatacccaggctatggcaaagcgcgtcatggagaacgccgcttctcggttagctgtgcttaagtcgttcgcaggctaatgccgttgagaacggcaagtttttcgaggattgcgacatttcagccgttgcgaccggttcgaggatcgctagcaactcttttcgatcaggtgttttatctggtgtctctgcatttgcggctacctagcggccttctgagtctctcgatgtcgaaaacctgcgaaaacttgccagatttgaagaggagagcatgcacggtttgccgtgatcgggcgacaggctggagggaa

SEQ ID NO: 10505 - DNA, 50880 bp, Unknown
  gut microbiota DNA sequence
gtctacgatgttgcgaagcaccctcatgctgatgcccagctggtcggccagaatggcaaaatccgcagtcgtcacctcttcgatgtcggtgtgctcgcctatggccatgcccatttcgcgggagaatcgggcgaagtaggtcgtgctcaccagatcataggcgggggcgaggatgaaggactgccaatcgggagcgtagaggatggacagattctttaggtgattgtcgcagttgccgatcaggtaattgaagaggatgaggctcgcgaaggcgcgaagatctcgggccggttgggcggagcggcgacggaggaagtcggcgataacctgtacgctgctgggcttcagttcgcggtacttcgcgtggggcaagagcccgaacgcttgagtgaggtcttcctgatggcgccgcagcggagcgggcagtccattgatggtctcgttcgaggcgagccgacggtcatagcgctcgacgcaaatgatgggcttcaacggactgatgagggcggttcgagccacatcgagtccgcatgctgccgcgcaggtcatggagaggtgctccacctgcatgaggtcgatgagatcctctcgggcaaatttgacgatgtaattcgacggggcgcccccgacgggctggtaccatccttcggtgattggggccgcaggatcgtggaagaggccgcacttattctgggtgcctgcgagggagagtcgggccatttccagggactcgtcgatcttgcccggctttcctgccatttccttgatttggtcgagcgacaccgcttcataggagcgcgtttcggtatagacagcaggatcgatgatgacgtcgcccaggcaatcgagcccgcaggcggcaagcatggcaatgtagtcgtcctggggaatgcccaggctgcggcagagattttccagagccgccccctcgggcaaaagaccgcgaaaatagggtgtgagctcttcttctgtgtaaggttcggcttgcaaggggagggacagggagagcggggcggcagccggggaggcaagataatcctcgtggtagcggaaggcgacctcgccctcggttcgcgccaggattcccgcaggaagaggatcttccggaaagtcgcggtaaacggtcaattccatgactattcccctcgcttcgcgatcatgacgtcgagccccagggtgttgagcaccttgagggtcttctccagttcggtcgtcgtcttgccgttctcaaggttggagacgaacgacaggctgacggcgcacaaatccgccaactcggtttgcgtgagcttttggcgtttgcgctcggctcgaatgaccgcgccaatatccttggaggtgaaaacagaactcatgatgtttctctcatttctgcgtacgccgaaattgtgacagaggaagagcaaattcgtgcgtacgcagaaaaagtctgtagaatacccataattcatgcgtacgcagaaattggtcatgttttacctggcatcttgcgttctcggtagtcgtcgcgttggtgtgctcttcagaggcgggaagaaaaagctagaagaaggaagtcattccgcaagcgatcaagagaatggccagaaaggcgaaattcaacacgctgaataggataaggaagcggctggtggatagctcgggcaatgcggctgtttgggggaacactttgcgcacgctggtgaaatgctgcagcgtgatgaggctcgcgagcgagccgacgagcgtgccggcgccgccgatgttcacaccgataagcaggggctgccatgcgcctgcgaaatgggagagcagcacggccgcgggcacgttgctgatgatctggcttaagccggcgctcacgagcagaccgtggtcggccatgaggggcgaaagccatgcggacacttccggcacgcgggccatgtttcccgcgaacacgaagaagcacgcgaaggtggcgagcaggccccagtccacggcgaccagcgcgcggcggtcgagggcggcgagcgtcgcggccacgatgacgacggcagcggcgatgggcacgatgtggaacacggccaggagggtgagggcgagcagcagcccgtaggcgacaaggcgccgccgactgagaggcatgggcgcggtggtgttgtgcgtatcgcttcggctgtcattgcagtccgagtggccgcacagccaccaggtgcaagcgacgacgccagcggtcgacagcgcgaagggcaacgccatcgtgcgcaggaaatcgccgaggtgcagcccatagtaagagtacagatacaggttctgcgggttgccgaagggcatgatcatgccgcagaggttcgctgccaggctctgtagcacgaacacgggcgccacgagacgcgcatgccccgcgccgatgagcgtggcggcggacagcggcagcatcatgatgagggccatgtcgttggttgccacacacgagagcgcggccgtcgtgagcacgagggccagcgcgagaggtccagggctgcgaaaccgtgcgatgacggcgcgagccgcccggtcgaaagcgcccatgagccgcagcgcgctcgcgacggccagcacgcagaacaaacagccgagcgtcttccaatcgaagtatcccagataggcctcgtcgggcggtaccgccagggcggaagccgcagcagccaccgccgccacgacaagcacggcgtgctcgcgcagaaagacaacaagggaggtggcggagatgcgcaagagtcgctctttctcggaaaaggatggtgcccgtagtgtaccccaacgtcgcgcaaacaaagagcgccgcctcctggatggatgcggcgctgatggttcccgatgcgcttggtcgagcgcttctgcggaaggttacagggcggcgtactcttcgtcggtcacgggctcgcaccattcgttcgcgcagtcggtgcctggggtttcgaaggccacgtggctcatccagctatcggcggcggcgccgtgccagtgcttcacgttggccgggatgtacaccacatcacccgcgacgatcttgcgggcgggctggccccactcctggtaccagccttcgccgtcggtgacgagcaggatttggccgccgccttcggtcgcgtggtggatatgccagttgttgcggcaacccggctcgaaggtgacgttggcgatgaactgtgtttgtgccggatcggtcagcgggttcaagtaggactggcccgtgaagtactgcgcgtaggcgtcgttggggtcgcccaggccgaagatgccgccgtgggcctcggggttttcgagatccagcgggtcgtcggcgtacaccttcagcaccacgcggaaggcggcccaggcgttgggccagccggcgtagaaggccacgtgcgtgaggatggcggccatctcgcgagccgaaacgccgttcttcttggcgttggccacgtggtgctcgaaggacgtgtcggccattcccttggcgacgagcgtggtcacggtgaggatggagcgcatctttagggtgaggtcgtcgttgctccacacctcgccgaatagcacgtcgtcgttcaaggcgccgaactgaggcgcgaaggtgccgagcgcatcgcggccggcggtctgtactactttgggcatgaggttcctcgattcttttggggtgtttccgacgctactgctcattgcgcgccttcaagttttgcgcacttgatttctcgttaccctaaaccttcgagtaagctcaaagtcaaggcacaattgcgagagcgaagaagtttctgccggtcgttgaatccccctgtttttgcatgagattgacggttatgagcgtctggttctcgcgcgaaggagttcagcgcaaaaggcccttggcaaaactccaggtcaacagactgtatgtgatacggctctttcaaatctgtattcggttagcgcctccagacgctcataaccggtgatttgctgcaatttcgaggtggttcgtcgaccgagaacgtgagtgagtgctcttatgcctatcttttatgggccatgacgaacacgcagttgcttttgacgagagtgcccgcgacaatagggaaaacgatgcggaaagcggcgggccggccgccgcttcgaagcaggcgtctcggaagaggccatcgacgagttcgttaccccctacgccgagtagccgcgcagtttaaccttcacaaaactggtcaagttgctttgccaattattgaaaaactggcagagttacttggccagttacggggacgttagattctgcgcgtccccgctgtctgcctcttcgcgacctgctatgcgatctcgataaggtcgccgggggcgatggtgccgccggcgagcactttgcaaaagacgccctcccggggcatgatgcagtcgcccatctggtggtagatggcgcaatgggcgtggcactgtttgccgatttgggtcagctccagcaccacgtcgttgcaggtgaagcgcgtgccgacaggaaggctcttcaggtcgaagccctcgacgatgatgttctcgccgaacgccccgttgcccacttcggcgccccgattcttgaatgcctcgatctgctcaaaggacagaaggctcacctggcggtgccacggggcagcgtgggcgtcgccctcgatgccccagttgggcctaagctcgatggcggcttgctcggttttctggattcccttgatatcgctcgtgcatacggctttgatcacgcccatgatgcacctttctcgctggcgatgggtcgtgcgccactctcgacccacccggtgcataggacttggcccccgacccgctgcacgacgctgaagggggaatgccggcgcgcccaaattctagcgaacccctagactatttgcaagcggggatagtaagaagcgaatgctcctttaccagttttagagcctttagaatttttagcagtcttagccaaggcccccgacgcggctcttctggcgtctagcctgtcggcatgagcgcgcgagcgagcacctttccgaccagcacgccggcgacgcacaaaacgacgctgaccagggcgtaggcgccggcgatggcgtattggccgccctcgatgagctcgagggtctccagcgagaaggtggagaacgtcgtgaatccgccgcataggcccaccttcaaaaacagcaccgcctcgcgggaaagggcgccggcggccagctcggaggtctccacgatggcccctatggccaccgaccccaggaagttgatgagcagcgtcatgagcggcagctcgcctcccagcgggatgagtcccaggctgtagcgtcccatggcacccagcgcgccgcccgctcccacgcatagaagccccgtcattgctcgctctcctttcccagtctgtcgcgtgcccagtatacgccatcggggaagaacgcgctgcgccattggggagcgcgcgcccctctagcgacggctccggcgcatgccgtcggggaggccggcttcggggatgtgcagcgttccggctttctcgcgacggcgcatgttccacagcatggccgcggctacgaccagaagcggaaggccgcccacgatacccgtgcacaagggccccacgaaggggttgccgcccgaaagggagaacagcgtcacgccgttagtcgtgccgttcacggccccgtgcccgatggccgcggcaaacgtggagccggtgcggatggtcacgtagctgaggaagatggcgagcacggtgcaccaggcgcacatggccgcgatgccctccgcgatggggtacaccacgagaaagtcgtaggcgtaggtgatgccgaaggtgatggcgagaaagacgagggcgcgtttcatggggaagtcctttcgtcggtgctgcgggattttgttctatgacaactagaacagtttatgttatacttcgaatagaacaagaagtcaaccgctaggcaagtctcccatgcgatggaggttgcggcaaagggattgcgtcgacggctgtcatcgtgcttagcagagagcggggcgcggggcatctgtcggttcgctcggtgccgcagacgcctcttgccggaaaggacgccccatgctcatcaccatcgatgctgcggccccagagccgctctacctgcagatacgcaaccagattgtggccggcatcgccaccgggcagctggagccgggccagtcgctgccctcggtgcgctcgctggcgagcgacttgggcatcaacttgcacacggtgaacaaggcctacgcggtgctgcgcgacgagggctacgtgcgcatgcgcggtcgcgccggggcggtgatcgccgatccggccgccgccgatcgcgctgacgccgatgcatcggcccaagtgaagatggaggatgacctcttcaagctggccttggccttccgagcccggggcggcgcgcgcggccagtttctggaagcggccgccgctcaggccgcccgcgcctacggggtgatggaagatgccgaggccgccccgcgtccggtgcaaaagcgaaagaccgctggagcctcgtcaagtgcgggtgcagggaaggcggtggccacccaatgagcgcgacgacccccatgcttctgcttctcgggcttctgaccctggtcgttcccttgatgggcgtgaccatggcgctcacgccctacctcatgccgaagcgcgagtgcttcgccgtcaccgtacccgacgacgcggcggccgatccttatctgcgccgcctgaaacgcacctatcttgcgatcatgctggcgcttacggcggcggcgacgattgcgtgcgcggcggccctggcgctcgaccctgagcacgctttcgtcgcggcgctggtggccgccgccctcgttctgtgccttggcggctatggcctcatgctgtacttccgcgcaaaggtgcagcgatacaagaaggcccaaggctgggtggccgaggggcgccgcagcgcgggatttgtcggcgacgagcccttcccgaagcctctttcccttgcgtgggatctgctgtatgtgcccgtgattctcattacgctgaccatgggtatcgtgggctatcccgccatgcccgacaaggtgccgctgcacatggatttggcggggaaggtgaccgagtgggccgacaaatcgtcgggcatcgtcgcgtttccggtgctgttcgtggtgctcatcgccgtgtgccttacggtggcccattggatgatttcgcggtcgaagaagggcagcgaccccgccatgccggcggcgagcgcctgggcctacggcatgtttgcccgcgcccagagtgtgatgctcgtcggcatgggcctgctcgtgagcttgctggggcccgtcatccagctgacgtttctcggtgtgctttccatgacccaggctttggtacccatcggggtcgtggtggtggtcgtactggtggcgagcacggcagtgagcctggtgtacggccagaacggcagccgcctgctcgcccgggtgagcgccgacgggcgcggcggcgccatgccgcgcgacaacgaccggtattggaagggcggcatcttctacgtgaaccccgacgacacggcgctgtttctgcccgagcgcttcggcattggctggacgatcaacttggggcgtcccgccgcgtgggcttttgtggtagtcttcgtgctggtgatcgcgggattcatcgcggcgtcgtttctgctcacctaagcggtcgggcgcaagcggccgttcgcgtcccggcgccggggccatcgcgcgaggagcaaagggaggctgccatgaaagattgcgcccagccactgcagcacatcgagcacggtattccgccagtgttcgatgagcgctcggaggtgctcgtgctgggcacgatgccctcgccgaaatcgcgcgaggcggcgtttttctacgggcatccccagaaccggttctggcgtgtgctggctgcgctgttcgacgagccagtgcccgaggacaacgccgagcgggccgatctgctgttgcgccaccatatcgcgttgtgggacgtgctggagagctgcgacatccggggcgcctcggacgcctccattgccaacgcccgccccaacgatctgtcgcgcgtgctggagaaggcgtcggtgcgtcgcgtgttctgcacgggcgctgcggcggggcgctactacgcgaagctgtgcgcggtcgctagtggtttgcccgccagcgtgctgccctcgccgagcccggccaacgcggcgtggtcgctgccgcggctcgtggaagcctatcgtcctgtggccgatgcggtgactcctttcacgccgcccgtgctcgaggtgccccaagtggtggcgctcgagcaggccatcgccgaagccggcacgccgctcgatgcgctcatgcgccgcgccggccgcttcctggccttcgaggcgcgcaaggccttggaaggggtggaaggagcgggggaaatagtcatcctctgcggcaacggcaacaacggcggcgacggctgggtggccggggagtatctggatcgctggggcgttcccgttcgccttgtgacggcgatagaacctgcggcgcttacggccgagccggcgcgtgcggccgccctgcgggcgacggcgtccctgagcgcgcgtagccaggtggttctcgcgccgacggacgcggaggtgacggccctgcttgaggccgccccgcttgccatcgatgcccttttgggcacggggttcgcctacgataccgtgaaggcgcccttcgatgattggattcgcgctctcaacgctgcccgcgagtgcggcacgcttgtggtggccgccgacgtcccgagcgggctttcggctcagacgggccgcgcagcgaaagatgccgtgcgcgccgacctcaccgtcacgatgatcgtgccgaagccgggtcttgccgctggggatggagccgcgcactgcgggcgtgtcgtggtcgccccgatcgcctacatcgagccgctcgtctgaggctgcgggggtcttcgtggcttccaaagtttccgcaagttgaaattttgctgtcgagaccgtgcgccttatagaagtgagcgggtgcggatgctatggtgcccaggaaaagtcagtgggccgcgcggtgcccgcgccgaacaggggcgagcgcgtcgcagcggtatacagccaaaggaaagctcgccatgttcaaagttcgctcgaaatacctgctgctcatcgcggccgccgtgtggctcatcgccggaagccaggtcgcccgcatgggcatcgaggccatcgcggccggcaacggcaacctgtggcttctgctcatcggcatccccgccaccttcgtcgtcttccatatgatgttctccaagttggtgggcaagcatgccgcccgcatccgcagctacggtgaggagaagatgcacgtgctgaagttcttcgacgtgcggggctacctcatcatggccgtcatgatgggcggcggtatcgccctgcgctcattccatctggtgccgggctggttcatcgcctttttctacaccggcctcggcatcgcgctcgcgcttgccggcgtgggctttctcgtgcactacctccgccgcgacgggtacatcacctgtccggtgacggggaaggtgcgcgagggataggggcttcggcctcaaggcaatgcttcgtgcgcccgcttcgcgcgtcggcgcctaggtgtgcgattgcgatcgccgttcctgaagtttgcggcttgccgcttcgacgattttggcggcggcgaatcccgcgagcaggccgacgatggtgcccgccagcacgtcggtggggtagtgcacgtagcagtacagtcgcgtgagcgccatgagcaccgcgccgatgccgacgacgatgacgaggggcttgggccccttcgagaacagcagcgccccgaacgcggcgaaggcggcggtggcgtgccccgaggggaacgacgagccgtggggccgatcgatgatcatgggcacgagcggattcacgtcgcacggccgcgggcgcatgatcaggggttttagaatgccactggtgacaatggcgcccagaagcacggcgatgaggacggccgcgcccagcttgcgcgtcttcggaatgatggcgagcacgatgccgagcaggatccagatttgacccacgtcgctcgtgctcgtataggcggcaacaagggtgtcgagccacggtgtgtggataagccggatggcatcgaggatagcaagttcgttcacgtcaggggaggcaagcgtttcgggaaggtctcgggaaaaggctcgccccgcgctcctttcggccacaaggctacaggaaccagcgccaacgggcaacccgtcgcactctcaaaaacgtcgcgccgcgcattccgaatcgctgaattgctttagaaatcacgggtagcgtagttttcgatgggctcttatgcggtcgccgcgcgacgggtgcggtattttcccaggtcgcgaaaagttgctaggcgccgccgcgcttcggagactacgctacccgcgatttccaaagcaattcgcacgcgggcttgcgcatttgcgaacgcggccgtgcgcattcggcaatccgcatagccgattccctttctgcattgcccaactgccgccgcgcccgttactatggagttaagcagtatttggaaggcgccgggcggcagggctcggcgccggcgaaggaggcatcatggatcagacgcgcgtcattgaagtgaagaagaacatcctggcggccaacgacgaggcggccgacgccttccgcgccgagcgcgcccaggagggcacgttcttcgtggacgtcatggcgagcccgggcgccggcaagacgacgcttctgctcgcgctcatccgcgagctgcgcgctcgcggcgtcgaggccctcggcgtcatcgaggccgacctcgagtccgacgtggacgcgcagaagatcaaggaggccggcgtcgcctccgtggagctgaacacccgcggggtatgccacgtggagatgggcatggtgaccatggccttcgaggccttcgacggcgaccgcttcgactacctgttcctcgagaacatcggcaacctcgtgtgcccggccgacttcgacaccggtgcccacacccgcgtcatgctgctctcggttcccgagggctgggacaaggtcatgaagtacccgcccatgttcgccgccgtggatgcgctcatcgtcacgaaatgcgattacctgcccttgaacgaggacttcgacatggaccgcctgaaagagcgcgcccgcatgttgaaccccaacctggagatcttcgtcacgagcgctcgcaccggcgagggcatcggcgagctcgccgactggatgcagtcccagcgcgccgagaaggtgcaggcctagggtagctttcatggtgatcgatctcattgaaagcgaaaagcggagtcagcatgagcgatacgtccaaaagcttcgtgagtcggagacggaagaggaatattgcaaggcgtctattccccaagcggctcttgacgaaaggatcgagcggctttatgcgggtctgaacgtctctcacacgcggcaggacatcgacgacttcgctcttattgattgggaagaggaagaggattggctggatccgtaaaggtgcagaatacaaggaggccactcgatatcgagcggcctcctcgacaatagccgaagctgcgcggttacaccccgagcggggcgtcgtcatcgtaggggagacgggctaccagctcgcagtactcctggatttgctggcgcgtctcgtggtcgaacagggcgatatgctcgtgagcctcttcggcgagctgctttaccggccagcggcgcgcttccttgtcgcggccctctttcttctcgatgacgtcagcccattcctcggccgcggccatggcgtggcgcagcttttcgggaatgtccttcgtctcgccggtcttttccatggccggaatgatgaggttctgcttcgcgatgattttctcgagcagctctttatcttccatgatggtgcctccttggtgcgttaggtcctatgacgggatgtcgtcggctctttcgggaaggcgaaggggtcgacggttccgaaaacccatggtaatccgcgccgggtgcggcgtctccttttggcaggaaacggtcatcgagtcaggggagacccgttgccaaatggcgaacgtgcgcaccggcgcctgcctcggaacgaagggggcctaggtgcggcgtttcttctggcagtcggggcgcggcgcggcgcaggtctcgcaatggtgcagcgggtgctcggccagctcggcttcccagtcgaagtccgggggcgggccggtgggcacgtcgtcctcgccggacgcggtgcttttcggacggccgtcccactggaactcttccatgatcacgcggccctcttcgtcgaaggccaccccctcggcggcgagcatccctcgctgctcgtcggggcctccgaaggcgaaaccggtggccatgcgtccgtccttgaaaacgacgcggtggcacgggatgcagcccggatcggtgccaggctcggggttggcgtgcagggcgtagccgacgtagcgcgccgtgcgcggggcgccgatgagccgcgccacctggccgtaggtggccacctttccgcgcggtatgcgccgcacgacggcgaacactcggttggcatagtctcccatgagatctccttcggtgcgctcttcgctgattggggccaccatagcagatggaagcgaaaaaataggcgcttctgcagagaaaagtgcgattgtgcgagtcccaaggtgcctaaaactcgctcgatcgttaaaaagtctgcacgatagaacgatagtgcatggaattactcgcacaatcgcacttttttccgcacagagagcccaaaagcctgcagggtggctgctacacggtgccgcgcgcggcgggaaagcccttcttctcagttgcccaacgtatgggagatgagtattgctgaggacgacgcttacgtataagatgaccgcgctggctgcaagggacgcgatgggcgtcgaagtgcaagggacgcgacaggcgtcgaagaacgcgatcgaaggagcgggaatgaagctgaggacgaagatcatcggagtggcggcatgcgccttcgcgctgtgcgtggcgctggcagggtgcgccagcgcgccggcgggcaacgacgccgcgaacttccagggggattggattttatcgagcggcacggtcgatggccaggaagccaccgaggagaccatggcccaggcccaggagatggggctttccgtctacctgcagctgaacgagggcggcagcgccgtgctcagcgtgctcggcacgaacatggatggctcgtggacggccaaggacgccaccacggtcgagctcaccttcgacggcagctcggcagaggcgacgctcgagggcgaggagctcgtgatgcagcaggacggcgatgtcatgcgcttcaagcgcggcgagattccgcctgtggccagcgaagttcagcgcgatgagaaccaggcggccgagccggaagcctaggcgacctgctgaaacgattgccaataacattttgtgcagcccgccgccttgtgacggcgggtctttttgtgcaagcgaccaaagaacaggcattttgcgaaaccatccttatacgggtaagatttactataaaatgaccttttggctcagaaagtggtacactgtaatagtgcaatgtatgggattttttcaacaaacctgtcaaggggagttttgccgtggatgaactgttgagagcctgggagacgacatttggctgcagcacgctgcctttcggtgtcgccgaagtgctgcttgacgatcgggggcgtccctatgatttcgcctatcgctatatcaacgccgcggcggcctctctgaccgggcatgtggcggaggacctgctcggcgaggaggcctacgccctgtggggcggcgatcccatctggctcgaccacttctacgaggcggcctacgagggcagcgcctcggagttcgaggcgccttccgagatgctccagcagttcttccgcgccgaggtgttccccatttccgaggggctgtgcggattcaccatccacgacgtgacggactggattctgcccgcccagcgctccatggagaaggcggccgccggtctgttcttctacgatatgcgctaccgtcagatgcttctgacggagcaggcccgcgagcaaagcggcgtggacagcaactatatcagcctgaccgagttcatcgacctcaccttcggcagcaccttaagcgaagaggtgcgtcagaagatggaggccttcctcgagcgacgcgaggccttctaccaggagggacgccttcccaacggccggtggctgcgcatgagcctcgatcataccgaccgctccgagcgattcgccttcggctttctggaggatttcacacgcacgaagctggcggaggagcgcagcgagcagtacatcgacatcatcgacagcctgggagcggagaacttcgcgctgtacctggtcgatttggaaactcaggaactcgaggtgtaccggcgcggcgaggagatgacggcggaattcgccctggccagcgcggaagagggcgactatcccgccgccatggagcgctacatcgacaccttcgtggtggccgaggaccgctcccgggtgcgagcggaaatcggcggcgaggccttgtggcgccgcctggaagcgggggagaccgacttctccgtgggctatcggcgcctgttcggcgacgaggagcagtacgtggagctgcgcatcatccgcctgccccagcgcgattcgaaggtcattttagcggcccgcaacgtcaccggcgagatgcgcgagcagctgcgccagaaggtggcgctgcagaacgcgctcgatttggccgagcatgcgagccaggcgaaatcgaccttcctcaccaacatgtcccacgacttccgcacgcccatgaactccatctcgggcttcgcgtccatcgcgctggaccacctgaacgacaccgatcgtgtgcgcgactgcctgcgcaagatcatgctgtccagcgatcacttgctgagcctggtgaacgacattttggatgtgagccgcatcgagagcggcaagatgtccttcaacgaggacatcgtcagcctgccggatgccgtgatcgaggtgcagggcatgttcggcgagaaggcggcggccagcggcgtcgatctgacgatcgatgtggacaacgtggcccatccccaagtggtcaccgatcccttgcgcctgaaccagatcctcgtgaacaccgtgggtaacgcggtgaagttcacgccctccggggggcttgtcaccgtggcgctcactgagctttccgacgcgccccgcggcttcggcgcttatcgcttgaccgtgagcgacaccggctgcggcatgacgccggagttcctcgatcgcatctttctgcccttcgagcgcgatggcctcgggtacgccaacaagaccgagggcacggggctgggcatgaccatcaccaagagcctcgtcgaccttatgggcggcgagatagcggtggaaagcgtcgtgggccgcggctcgacgttcgccatcacgctgccgctgcgcgtggccgacgccgacgagctggccgaggcccgcgagaaagcggcggcggccgagcggtgccagcgcgattttaccggctgcaaggtgctcgtggtggacgacgacgatctgtcccgcgagattctggtggagattctgaaggactacggctttaagcccgaagaggcgcgcgacggcgatgcggccgtgcgcaaggtggcctccgtggagccgttctactacgatgccgtgctcatggacatgcgcatgccccgcatggacggcgacgaggccacgcgtgagattcgcgccctggatcggccagacgccgccacgctgcccatcatcgccgagacggccgacgccttcgaggagggccagcgccgcgcccgcgacgccggcatgacggcgctgactaccaagccgctgaacatccacgagttggtagcgcttctggccgagtacattccagagaaatagaaacgcgcgggccacgagcggcccgcgcgttcttgcatcgacggttcgaagaggtgcgctcttaggccaccggcggggtgccctcccagttgccggcgatggcgtcgatcatgacgcgggcgccgaagggcagctcaccgcatcccacgaccttgcgggccggcttgtggtcgccgaagaaggcggcgtaggcctcgttcatggcggcaagatcggcgatgtcggccaggtacacattcaccttcacgatgtcttccaccgcgtggtcgaccgactcgacgatggccttcacataggcgaggcactgggcggtctgctcggcgacggtgccgtcgatgagcttgccggacagatcgagcggcagctgggcggagatgttgttgtagtgcgagaaggccacggactgggtggcaagcgggcgcttcggagcggcgtcggtgttgcacgcctcgatgatgaggccgtgacgatcctcgatggcctggggcggggtgccgtcgccatgggagaccacggcctcgacggccacgtcgcagtggtagggcagatccttcaccggcaccacggtgcgggccggcaggtagttcacggcgcgcgcgatgccggaatcggggaagaacgtcttgtacacgtcgtccaccacgctcgaatcggccaggttcttcacgaagatggtcaccttcacgatgtcgtcgaagggcacgtccacggaggtgaggatggccttcacgttcgcgaggcactgcgcggtctgcgcggccacgtcgcccaggatgggacggcccgtgccgggatcgagcggcagctgcatggtgatgttgttgtagtgggagaacgccacggtctgggtggagccggcgtcgtagggggcggcgtgggtgttgttggtgagcttcaccaggtcgccggcctgcggcaccgactgggtgccctcgccgttatcgacaagcgcctcgatgaacacgagcgcgccctggggcagggcgtcgacggccgccacggtgcgggcgggctggtaggtggggaagaaggaggcctgcaccttctccaccgcgttcagatccatgatgtcggccaggaagatggacacgcggatgatgtcgttcatgtcgtggccgatgctctccacgatagcctgcaggttcttgaagcactgctcggcctgctcggcggcgcctcccgccacgatggcgcccgtcgccgggtcgatgggcagctgggcggagaggttgttgtagtgggagaacgccaccgtctgggaatacaggtcgctcacgggcgccttgtcggtgttgcgggccactaccacgttcggatcgctcattggtacccctttcaaaggtaagaatcagcagcgacgcacaaattgtgcaagtgcattaaacatgacgaaaagagtcgttgtcaatgaggaaagcttattgctacattgtcgatgggaaattggagtgatcttgacaaatgaaacttcttcaaatgctcaggtcatgtctgtaaaatttgagcatatgaacaaaaccaagtcagttatgggtttttggcgatgaagtcgcgtcgatggtaccttaatttcgactcgcgttgaggtggtagccgcaaatcggcgaagtttaaggtaaaaccgttgatttgaggctaggttttaaagacggggcgtttggggcaaaaggcgttttgggctgagtccttgaactggataaaggggatgtttagaattattctccatttcaatggcaattcaaatgaaagaaattcttaatgcttcgactgcacatactggccagcggcagtggcgggaacgctgccattgcggagaacgcggcgacgggcgagggagtgcttatcgattgcggcatctgcaagcgggacttcttcgcccgggccgaggaggccgggttcaatttggagaagctgcgggccgtcgtgatcacccacgaccatggcgaccatacgaaggggctcggcgtggtcctgcgcgggctggcgaaggcgggagcgcatcctgcggtgtgcgccagcgaggcggtgttcgcggcctccgcgcctctgcgcgaggctgtggccagcgtcggcgccgcgttcgagcccttcgacggaggcgatcggctcgatttggccggcctggccgtgcgtcccttccgcacttcccacgatgcggccgattcctacgggtttcggttcgaagagcgtggaagcggttgcgactccctcggctacatgaccgacaccggtgtcgtgaccgatgcggcctgggaggcgctttccggcgtgcacctgctggctctggagagcaaccacgatgcgcgcatgcttcagatgggcccctatccctacgtcatcaagcagcgcatcgcatcggcgcgcgggcatctgtccaacgaccaggcgcgcgaggccctggataacttggctcacgaaaacctgcgcgcggtggcggccatgcacgtctcccaggagaacaacacctaccggctcccgcgcgacaccttcgaggccgtcattgccgagcgcggccttcccacgacggtctttgtcgccttccaaaatcgcctcgtgaccattgggtagcggctctacagctgcacggcgtacacgcggccggcaccgcagagcttgccgaagatgtacttgttggaagccgactcgtcggtagtgtagacgcgcccgtcatgggattcgatgccctcttgcatgggcggtccgaccagatcttccgtcaggttgcgggaatcgaggcagaacagctccacctcgtcgccggagccggtggtgaaggtgccgtcgggcgcggcgaggttcacgttgtaggcgagcaggtgcgagggcgcgatgccataggagaccgacagcacgatgcgtccgtcgtcggtgatacaggtgccctggaccatgccgggaatggagaacacgttgtcgggcacggtgaggaaacggcccggctctgcaggatcggcggcgaaggcgtacatgaccgcggggttctcggtgccgtccggcgtggtgatgtggtggttctccggcgtctcgtagtcgttcgggtagtagaagttcccgagcagaagctggccctgctcgatgttcatgaaggcgggggagaggtcgacatccaccttctcggtggcctgcacggaggcgccgtcctcggcgaacagcaggtcgtccatggggatgacgagatagccctcctcgcaggccagataggcgtactgctcattggtggtgatggccgagccgtggccgtcgtaaggggagccgtcgggcagggagacgtagaacttcgtgatggtgccgtcggcagcgcggcggtacagcggcgagggggaatggtcggccatgtacccgctgaacagccacgaatcgtcggcttccacgtggtcgaggtcctgggggacgaagccggtgttgatgccggggatgtcgaagggggattccgcgcggtcgaagaagggggcgaaggcgacgcgcatgtaaatgttgagggcgaccaccgcgataagcgcgatgccgacgatgacgccgatgacgatgccggtgattttcagcgcccgatggcttttcgcggccatcgagacctccttaagcgttggcggttcggcgagcgacgatggctcgacttcagcatacccgtgcccgcgcttcgggcgctggctcgtgggcgctacgtcatgagtttgtttcagttcgcttcgctgggccgatggttgccctgaagtgccgtcagtggtgtatactctttagtcgcatttttcacgagcgcggcggctcgaacacttgggttcgcgcttccgcaaacacaaaggagcccctgtgatcagagagattgtcaccgacgaggaaatcctgtcgaagccctgcgaggccgccacggccgaggacgccgccatcgccgacgatttggtggagacgctgctcgccagcgatgaggccatgtgcctggccgccaaccagatcggcgagacgcgccgcatcatcgcctatctgaacgatgccggtcggccgcaggtcatgtacaacccgcgcatcgcgcagaagctgaagccctacacggctgtcgaggcctgcctctcgcgcgaggagccgacggccgtcacgcgctacgattgggtgcgcgtgagctacgaggtgctggccgatggcaagctcatcgagcgcaagaagaagctcgagggcaacgccgcccaggccgtacagcacatgatcgaccactgcgagggcgtccttgtctagggaagagcaacagagcgccgacgccccttcggctcgggacgtggctgccgctcgggagggcggcgcaagcaccgcccctacggagcgggcgaccatcggcggcgcggtcgctggagccatccccgtagggggcgaccttggtcgcccctcggccgcgagcaaagtagcttccgcagatcccgtcttcgccgccgagcaggcgcacctgagtgagacctacggcaagctggagaagatcggccgcgatgcgctggccgccatggaagctgtggcggcccaggccgccgaggacaagaagaacatggccgaggagctggccgtgaacttcgccacctgggacgatatcttggagacccatgccgatatcgtggccatgaacaacatcatcgaggcccacgatatggccaactccgtgcaggccgagcgtctgcgcgcggtggaggtgctgcttcgcgagccctacttcgcgaagatcgccctgcagttcaaggagggcgctccggccaaggagctttatatcggttcggcgggcatttcggacgagaactaccggcgcctggtcgtggattggcgcagccccgtggccgaggtgtactacaaccagaccatgggccctacctcctatgtggccgacgggcgcaccatccatgtggatctcaagctgcgccgccagttcgaaatcgaggaagaccgcctcatcacctacttcgactcggacgtggccatcgaggacaagctgctgctcgcctcgctttcccgcgggcgctcggcccacatgcaggccatcacggccaccatccagcgcgagcagaacgccgtggtgcgccacgaggacgtgccggtgctgcaggtggcgggcatcgccgggtcgggcaagacttcggtgctcatgcagcgcatcgcgtatctgttctaccagcatcgcggcgcgctggatcccacccaggtattcctcatctcgccgaacccggtgttcggccgctacatcgaccgcgtgctgcccgatctcggcgagcgcaacccggaaatcctcacctgggaggagttcctgatgccgcttcttcccgctgggcgcggcgtgggtgaaagcgacgtgtcgcttgagcgcctgcacgccatcgacgcggccgtggcatccttcgagttcacgcgcagcgacttccgcgacatcacgagcgccggcgtgcgccttctcggcggggatgcggtggagaaggtgtcggcgaagttcgcgaacctgccggccggcccgcaccgtgcgacgctcatggccgaggagctgtcgagtcgcctgacggcgcggctgaagtcgctggcggggctggaggacacgcacgacgagatcgcgtcgcttcccgttgacgagcaactgcgcctgttcggcgaggtattcgatccgcaaagcgacgaggaggctcgtgcgctggctctgacgtatctggaggagaagcacgccgacgccctgcgggccatggatgccatggcctggctcgacatcgatcgcgtggccgcgcgcctgctcgggcgcgaggggctgacgtcggtggagtgggtctatctgaagatggcgctcacggggctagggaatcccgaggcgcgctacgtcatgattgatgaggcccaggactattcccagggccagctggcggtgctcgcccgctacttccgccgggcgcacttcctgcttttgggcgacccgaaccaggccatcttcgagggaacggccacgtgggacgagatgcggacggtgttcgaggagatgcgcggcgccgtatcgcagtgccgcctcatgacgagctaccggtccaccccggccatcaccgacctgttcgcacgccttctgcccgcgggcgaggccatggaggtggcctcggtgcagcgcgaggccccggcaccggagatcgtggtgtgcgagggcaccgacgagtggaaggcggccctggcggaagcggtgcgcgtcgcacgcgatgccggcggtcttacggcggtgatcgttccctggaagaacgacgccaaacgcctcgcgaaggcgctggacggcgtcaccgcagggagcggccagccccccgtagggggcgaccttggtcgcccctcggccgcaagtgatgccaatgcggggcagggcgtcgttgtcctcggcgagggcgacagcctgccggatgagggcatcgtcgtggtgccgctgaagttggcgaagggcctcgagttcgatcgcgtcgtcatccccgacgcctcggctcgcaccttcccggaaagcgacatcgcccgccgccgcctctacaccaccatcagccgcgccacccgccacctcaccatcctgtcgaatggcgacctgacggaacttttaggatagctatgtcgaagaagcaatcgcttacgatgcgcagcttgcactattactggctggcgactcgcaatcacctggggctgttcgtggcgctcgttgcctcgacgatcgggttctgcggttttctcacctacggcaacccctacgtgatgagcctcatcgtcgaccgcatcagcgccgacccggtggcgcccgaggccgtattcgacgtgttcggttcttacatcgcggcgctcatcggcatcaacttggcgggccagacctgcagcaagcttcaggactacacgctgtggaagctgcagatcgccgtgaactacgacttggccaccatggccttcgattgcctgtgcaaccagtcgctgtcgttccattccaaccgcttcggcggtacgctcgtcagccagacttcgaagttcatggccggctacacgcagcttctcaacaccatgaacttcccgttcttgccgattctctgctccatcaccttcacgtgcctcattctgtttccggtggtgccggcctatgcggcggtgctcatggccatgctcgcggtgtatgcggtcatcagctaccttatgtacaagcgcatcctgcatctgaacgagaaggccgcgagtgcccagaaccagttgtcgggcgagctgtcggacgcggtcaccaacattctggccgtgaagacctacgggcgcgaggactacgagcggcgtctgttcgacacggcgaaccgcgaggtggtggcgcgcgattcgaagcgcatgcgcgcatcgctcgcccgcggcatcatcacggcggctatcacggtggtcatcatgtcggtggtgacggtgttcatctccggcggcaacgcctggttcggcatcacgccgggcacggtcatcctcatgttcacctacacgaacacggtgacgaaccagttcaacttcatcaataccggcctgcagcgcatcaaccaggccttcggcgatgcaagcggcatgacggcggtgctcgacgagccgcggttggtggccgataagccaggagcgcaaccgctcgatgtggagctgggcgacatcaacttcaaggacatcaacttctggtacaccgacggcgacgtgcgaacccaggtgttccgcgacttcaacctgcagattcccgctgggcagcgcgtgggcctggtaggcatgtccggcgcggggaagacgacgctcacgaagctgctgctgcgcttggccgacatccaggagggcgagatcctggtggatggccagaacgtggccgacgtgacccagcagtcgctgcgccgccagatcgcctacgtgcctcaggaggcgctgctattccaccgttccattgccgagaacatcgcctacgggcggcccgatgctaccatggaggagatccgtgaggcggcgcgcgcggccaacgcgctggagttcatcgaggacttgccccagggcttcgacaccatcaccggcgagcgcggcatcaagctctcgggcggccagcgccagcgcatcgccatcgcccgcgccatgctggccgactgccccatcctcgtgctggatgaggccacgagtgccttggattcggaaagcgaggccgccgtgcaggaggcccttgcgcgccttatggagggccgcaccgccatcgtggtggcccaccgcctctccacggtggcgagcctcgaccgcatcgtcgtgctgtcccagggacgcatcgtggaggacggcccccatgccgaactcgtggccaagggcggcgactacgcccgcctctggaaccgccaaaccggcgccttcgcgggggagtaggcgccgggtttcatccagtggttcgacctgccgagcgctggtgacacaaaacgtgcgcggaaggagcttgttttgtcaccgaagtctgggcctacagctttacgacggcgtcggcggggccggattcggtggcgtttatgaggacggtggcggaaggggaggcgatatccccggtgcacagggcatagagccccgggcggctcaccgtgacggcgccgagctcgtcggcagacagcgtgcggtcgcgggaggggatgacggtgccgtcctcggccacggcggcggtgcagaggtagacttccccggctccgctttccacggcgaaggtgaggcccgtctccgtcgcactggccgagccggtgccctccacggcggcgcggccatcgctgtggcaggaagcgcactgctcgccggacttcgtggtggggtggctcgatgcgcagccggccagagtgccggcgttcgctgtcaggagacaggcgagggcgagcgcggcaaggcacgtgcgttggggatgccgatgcgcggcggcgttggtgcgaggcaggatgaaaaggcccatgactctcctcggggtggtgttgggaattgagtgacaaaggcagtctaccattcgttgcgtcatccccctcatacccagagccgtatttcccgcgagcaagcttcgaagcgtaaatctggcaagtttttcgagggtttcgacgtgtctcctgaaggctcctctgcgaaagtaacgtattgtgctaattctcgctgggaaatggtcagcaaacaaggaagatggggccatttctggctctctgagggaagcgcttgtcgaaaacctcgaaaaactagccaggattgctggatttcgaagtcgcgcatgataaaagatatgacgcgaacgcgggagcgaatccgtgctttctttttgctgggtggcttttgaatatgcgagagcaaaggcctcgcgtccgctgtgtgagggggcgagttgtggtaccctcaagactttgcattcggtaattgggaaaaggaggtgcggtgggtctgggcggtatcaagctggctgaatacgctgacccacgcgccgtgtcgcggggtgtgggcattgccgccaatgccgcatctatcgtggatcggcgcgttcggcgcagcgatgacgtgtcggtggtcaccggtcgggtggcgtcggcctcgggcattgccgattacttcaacgttgatgtcgtgttcgccgatttcgagtcccgcattatcgactacgattgcgattgtcctgccgccgcgcgcttcgacggcatgtgcaagcactgcgtggcgctgacggtcgcctattttgcacaacccaagtctttcgaagagataggtgatggccgtgccgccgtttcgccgggtcggacgacgagcgaggcgctggcgcagtgcctggcggctcgatccgacgcgacgcccgtgcgcgtcggcgcactcgccgtggacgcagctgcgggcaccgtgcatctcgccgtgcatcttgcctacgacgggcgcttctggtcgatggatctgaccgtggaaggccctcgcggaacctatgtggtgcgcgacctcgaggcctttgcccatcgcgtgcagcgcggggagcatttctcttacggaaagaagctcgccttcgcccatcggctcgaggccttcgacgggccttcccgggccgtggctcgcaaggtggcggagctgtttcccgatgagcgcctgttcggcggctcgatgttccgcacggcggggagcaagcgcgaggtgcgcctgcgcgaggcggagttggccggcatgctcggcgccatgggggagggcgctgaatttacgtttgggggatgggaggcgccgctagcggttgcgaaccggggcacggtggggcctggtgcgagggagggcgatgagaagcagggcaacggagacggcctttgggttgtcgccagggatgttccggcgctgacactgcggttcgtccctgccgagggcggctttgagctggcgctttccgaacgggtgctcgtggtgcgcgggctggaggaggccttcgtgctgtccgacggcgtggccgcgcgagcgacgggcgccgacgcgcgggcctttgcctggttgcgcgaggcgggcctgaccgccgacggctccgcaggggaagccccggtcttcatcgccgagcgcgatgccgaggctttctgtcggcgcgcgctgccggtgctggaggagacgctttcggtggagttgcccgagacctgggaggcgctgcgtcccgtggccggcacactcgccttctacttcgatgtgacggggaagaaggaggccgcgctcatccgcctggtggtgaaggcgttttacggcgagcgggaggtagtgctggaaagccccgccgattccgccgaggagccggagctgcgcccggcttcgagtcaggccttccgcgaccaggatttggaagatgcgggtgtggccgtggccgcgcagttcttcgacgggtccatgaccttgcccctgcgccagaccgaattggccggcgatctgctctacggcggtctcgtgcagttccgcgccctaggcgaggtgtttaccacgccggcgttcgatcggctcatcgtggagcggccgccgcgggtgtcattgggcctttccctgcgggcgaacctcattcagatggatgtgcgcgagagcgatctttccgccgatgagctgcgggcgatgctttcagcctaccggcgccgcaagcgcttccaccgcatgggcgacggccgcatcgccgctttgggcgagggggacgtggcggcgctcggcgacatgatgcgggacttgggcgtgtcggccgacgagttgctggatggcggcgccgagctaccgacctaccaggcgttctacctggatcgggaatatggcgacgccgtgcgggaccgcgccttcgaagattaccttcgctgcctggacggtccgggcgagcctgtggcggcgcccgcatctctcgcgggtacgctgcggccctaccaggtagagggtttccgctggctggcgcgcctggcatcgctcggcttcggcggcattctggccgacgagatgggcctcggcaagacactgcagatgattgccctggtgaagagcttgcgcgattcggggcagctgggcggcccggtgctcgtggcctgccccgcctcgctcgtgttcaactgggccgacgagttcgcccggttcgcgcccgacgtgccggtctgtgcgttggagggcttccgagcgcaccgcgaggcgctactattccgtgcgacgcaggggatagacgaagggcgcgttttcgggtgtggggacgatgcgggtgaggacgcgcgaacgactggcgagcgaatcgctggcgcttcgagcgccgatgtcccgtgcgtgatcgtggcctcctacgaccgcgtgcgcatcgatggcgcgcagctcgcgcgtgtcgaatggggcttggtggtgctcgacgaggcccagtacatcaagaaccacgccaccaagaccacccgcgccgtgaagcgcctgcgctcccgtttgcggttcgcgctcacgggcacgccggtggagaatcgcctctcggagctgtggagcatcttcgacttcctcatgccggggttcctcggcagctacgagcggttccgcgagcgctacgagctgggcattatcggcgaggatgaagaggcggcggctcgcctgcgcgcgctcatcgagccgtttgtgctgcgccgccgcaaggccgacgtgctcactgatctgcccgccaagctcgagagtatccgctatgtgccgctcggccgcgagcagcgtcggctctacgacggcgccgagcagcgcctgcgcgaggatctgaacgcccagaagcggcagaacgcctcgcgggccaatcgccgcgggcacattcccgatgcggagaagagcgccgtcgaggtgctggccgaactgacgcgcctgcgccagatcgcgctcgacccggcgctcgtgttcgagaactacaagggcggcgccgagaagctgggcgccatcatggaattggtggacgaggccatggaagctgggcgcaaggtgctcattttctcgcagttcacgagctatttggacgtgctttccgccgagcttaaccgtcgcggtatcgggcatttcgccataacgggcgccacgccgaagcgcgagcgcgtgcgtcttgtgcggcagttcaataacgacgagacacccgtgttccttgtgtcgctgaaggccggcggcacggggctgaacctcacgggcgcttcggtggtggtgcacgccgacccctggtggaacgcggccgccaccgaccaggcgaccgaccgtgcccaccgcatcgggcagaaccgcgaggtggacgtgtacaaggtggtggcgaagggaaccatcgaggagcgcatcgtcgccttgcaggaggccaagcgcgacctggccgattccgtgatcgccgccacggccggcgaggcgctcgccggactcacccgcgagcgcctcgcggagcttctcggggaggcggactagcgggtttcgtgcaggattttccgattgggagagcctgctcgctcggaaagcccgagaatgactctctcaatcggaaaatcctgcactattccagcacgaagactcttcctatcgaaaaatcctgcacgttctggcaggttcggtcgacctgcgtctggccatctcgcactcggccgcctcgcgcccgccaaaccagaaggggcggcccgaaagccgcccccatgcaggtatattttattgcgatcggagcgctacttccgcttgtcctcttccaccatggcgttgatggcggcgcgctcctggtcttccaggcgctcctcggccgcgtccagcgcgcgcttgtcgtgcttggcgttggcgatggcgagcaccgcgccggacagcgcgaacagcgcgatggcgttggggatgaccatcagctggttgaacatgtcggcgagctcccacaccaggtcgttggagagcagcgagcccatgaagatgaaggccagcgcgatgatggtgaagggcagcaccgccttcttgccgaagagccattccacgttcagcttcgcgaagaggttccacgaaaggatggtagagaaggcgaagaacagcaggcagatggccacgaaccaggcgcccacattcgcgccgaagaactgcccgaaggccagctgagcgatgttggtcttggtgatggtctcggcggtcagcgtcgcgtagtcgccggtggccagcgtgccgtcacccacgtagagcaccgacagcaccacgagcgcggtcatggtgacgacgatgatggtgtccacgaacacgccgatcatggccacgacgccctgctcatgggggtcgcgcacctcggccagcgcgtgggcgtgcggggtggagcccatgccggcctcgttggagaacaggccgcgcttggcgccctggctgatggcggcgatgatgccgaaggtggcgccgcccacggtggcgtcggggttgaaggcgcactggaagatgagcgcgaaggtggccggaatgttggcggcgttcatgatgagcacgacgagcgatccgagcacgtagagcacggccatgatgggcacgatcttttcggtgacggcggccaaacgcgacacgccgccgatgaacacggtgccggccaggatgaccacgatgaggcccatgacccaggtggggatgccgaaggcggtgttcatggtctcggcgatggagttgctttgcaccatgcagcccatgaagccgagcgccagaatgatggccacggcgaagaacccggcgaggaacttgccccccttgcccttgaaggccgtggtgatgtagtagactgggccgccgtgcacggtgccgtcctcgtcgactacgcgggtcttctgggccatgaccgcctcggcgtagttggtggccatgccgagcagggcgatgatccacatccagaagatggcgcccgggccacccacgatgatggcgccgcacgcgcccacgatgttgcccgtgcccacctgggccgcgatagcggtggacaacgcctggaacgacgtcatgccgccgccctggttgccgccgcgcaggctgaagttgccgaacacgcggcgccagccctcgccgaagcagcggaactggatcgccttggtgcgcacggtgaaccaaatgcccatgccgagcagcaggatgatcaggatgtagttggacaggtagttgttgatggtggtaacgataccaagcagcgcctcttccacggcattcccttcttctcgtgagaaaactcgggggaactcatgcgtgggcggccgaagaagtcgcgtcatcgctctgtccgtttgcctgagagattcggcttgcctgcggaggtcgtccgcgcgcaagccttgcaccttcggcactcacttaagagttctccagagttttctccgcccccggtttgcttatgtcgcgcttgcgctgttgcggcgctgcggacgaaccgctttgccgttcgcgcgagcgcctcggcattccgaaggcctcacagaaatattgacgcaggccactatacgccctgacgcggcgtcgatcaacaactatttcgctcaacgttacgcgttgcccccgcaatgctccgtagcgcccgcgaaaggtggtgtcctcgcggtggttgcgagatgcctacgaacgggatccggccgcggtgcccgtgttagactggggcgacgaaagcggcaaagccaaggaaagagatcgccatgagcaagtacgataagctgtgggaatacgtggaaaagcaagaaggcgacgagctggtgctcacattcgacgagattggcaccatcgccggcgttcctttggatcattcgttcctcaactacaagaaggagcttgtgccccacgggtgggaagtgggcaagatatccatgaaacagcaaaccgtccgcttcaagcgactggcggaataggccaagatcgacggaaaaggtggccggcggctggcgaaacggactttcgctggcgcttataactcaagatctcgtgcgcaaattgcccttttcgttgacgaggggctcgtctgttttgcgcttgagcatagtcttgtgcttggcagaagactcgcatgaatgccaagaaactttctctcgtgctgtatgctatgaaagtgaaaacctgtgaaacgaagtgaaagcttgtgaaacgaagtgaaagattgtgaaatgaagcgggataaggcgacatctacatgcaacccattcaccccgaccttcggatgtgtgccccccaaacttgctggacgagacgggctcatcgctgacattctcgaggggttggataacgcgccgggcgaccctaacagggcaactatctttgtgagtgcttgaggaacgggcaagacggtgctcctcacggccattgccgaacgggctgagatgaggggatggattagcgtcaatgtgaccgatcgcgatgggatgctctcggagataatcgtccaacttcgtcagaaggcgtcgcacatccttgcccctgagacgaactcgtggctctcagaaatacatgtccatggcgtagggttcacgcgaacgagggaggaagtgccttctacgtggcgcgcggacatgacgaaggccgtcagcgagctcaacgagaagggctcaggtcttcccatcaccgtcgacgaggcatcggcacaatccgatgagcttccggttctcatcgattcgttccaacatttcgttcgcgagcgccgggacgtcgcattgcttttggctggtctgccgcacaacgtctcgacgcttatcgatgtggatgcgacctcgtttctgcgcagggcgttcaagcatacgatggaccagatttctgcaaccgacacttcttacgccattaaggagacggtggaaggtgccggaaggggaatcgccgcccctgcgctcaaggtggctgccgatgcttcggagggctatgccttcctcatacagcttcttggctaccatgcctggcggcagcatcccgagagggaaaccatcaccttagaagatatggagcaggctgtggttctcgcccgaaacgacatgtaccgcatggtgctcgagccgacggtgaacagcttgagtgagcgggagttggaattcctcgtcgcgatgacggaaggcgaaggtccccaccgcgtttccgacatagccggccgcatgggtatcaccgagaacaacgcgaccaaaatccgcgcgcgcctcatcgagcaggaagtaatcggagccaggcgaaggggcttcgtagatttcgacatgcccatgatccgtgactacctggtggatgaaggctaggtcctattgcgcggttaggcagcatccgggtctttttttgcacgagatcttgagttgtaagcgtctgaatcgtgcaccgaaggaagctggtcggaggagcgcttggaaagtgcctggtcagaacgttgcgtgcgaaatgaaaacttgccggttcgccgattccgcaccctcgagacgctcataaccgtcgatctcatccagaaaccgcgctttccgtttaccgagtctggatgtctgcctcttccgcggtcgtgcttttcgggagatcggcctcaagcaggtgttggaagatccctcgaagtaggctctggaaaggttttgaatgtcgcttacgttttccttaacttgattctgcttgccgagtgagcggggtatattcgtcccagacggtaaggaggatgaggcatgggcacgtggctgaaaagaatcggactgggcgctctggcactcgtcgttctctgcaccgtggcggtcttcgcggttgatgcccatgtgcgctcttccgccggcccgcgcatcgtgtcggttgacgaggcggcggcgctcggcgacgtggactgcgtgctggtgctcgggtgcggggtgcatcccgacggacgcccaagcgacatgctggcggatcgcgtcgcgtgcggcgtcgcgctgtacgagaatggcacgtcgccgaagctgctgatgagcggcgatcacggacgtgccgactacgatgaggtgaatgtcatgcggaatgcggcggtgcaggcggggcttccggtggacgacgtgttcatggaccatgcgggcttttccacctacgagagcatgtaccgggcgcgtgatgtgttcggggcgaagcgcatcgtggtcgtttcccaggactaccatttgtaccgtgcgctttacgtggcggaacgcctcgggcttgacgcctacggagtgcccgccgacctgcgtccctacgccggccaggaggcccgcgagctgcgcgaggtgctggcccggaacaaggacttcctcacagcgattgtgcagccgcccccgacgtttctgggcgatcccatatcgctttccggcagcgctgcggccaccgaggggtagggaagaatggcagcggcctctccgcggtgaagcgaaagcgctgccattctgtcctgtgtggggcgcaggtgtgcttactccgccaagtcttccacaaagcctacgcggtagttgcggaagatgacttcgccctgctcttgggtggcgtccaggtcgacgtcggcttctatgcggaagtcgccggcgtcctcttcatccaggaagatctggcggacgtgccaggcgtgcgattcctgctcggggctctcgtcgatcatcagataggcggcggaccgcgcgtcgccgtcgaggcggatctcgttgtgctcggcgaagtagtcgtccaatgcggcgttccacgcgcgctcgccgtggccccattcctcgtccaggttgcccagctcgcgggtgcgatcgagcgcggccaggcgcacgcgggcgaacagcgcgtttctcaccatgacctccatgccatggcggtcggccaccacggcatcggccgcctgcgggggcgcgccggcctcgggcagctcgccggcgttctcccacgcgtccaccagcgacgagtcggtggtgcgcaccatgaagccgagccaggcgatgatgtcgcgcagccgatcgtccagccgatcgggcggcagggtgcgcacgagcacgcggaaggcgtcggataggtagcgcagaagcgtcccttccgacttcgcgatgccgtagcggccgatgtaggtcttgaagtcgctcgccgtctccaccatgtcgcgcagtacgctcttcggcaaaagctcgtagtcgcgggcccacggcacgccctggcagtacagctcgaaggcgcggttcagcagctcttccaggggcttggggtaggtgatttcagccaggcgctccaggcgctcctcgtattccacgccgtcggccttcatctcggccatggccgcgtcgcgcgctttgcgctcctgagcccgcagcaccttggcggggttttccagggtggcctccacgagcgagatgacgtccagggcgtagtcggggctttccggatccagcaagtcgagcgccgccagcaggaagggcgaaaggggctgatccagggcgaagtcctcgggcagttccacggtaagctcgtaggacggccgaccttcggcgtcctcgccgcgcaccaccacgcccgcttccaaaagcgtggcgaatatctcgtcggcccgcgcgttcagcttgatcttctcctcgggggtttgggccgaatcagcgatgagcgtatgcacgttggcccaggcatcgcctccgcgcgacaccacggacagcaccatggaatgggtgatgcgcatgcggggcgtcagcttctccggcggcttctcgatgaggtgctcgaaggtctgcttgttccagctgacgaagccttcgggcggctgctttttcttcacgcgacgctgctttttcgggtcgtcgccggccttgagcatcgccttgtggttctcgatctcatgctcgggggccagcgccaccaccatgccctcggtgtcgaagccggcccgtcccgcgcggcccacgatctggtggaactcgcgggagcgcaaacggcgcatcttggtgccgtcgaacttggtgagctgggtgagcaccaccgtgtggatgggcacgttgatgccgacgccgagcgtgtcggtaccacagatgactgggagcagtccctgttgggcgaggcgttccacgagcaggcggtagcgcggcagcatgcccgcatggtgcacgcccacgccggcagcgagcagccgctgcaggatcttgccgaagggggtcgtgaacttcgtgcccttcatggcctgcttgatttcctcgcgctgggccttgtccgacacgccgtagctggccagcgcccgggcgttcttcagcgcctcgtcctgggagaaatgcacgatgtacatcggcgcctcgccggcgcgcagacccagctccacggtggcttccagggtttcgaaggtgtagtcgtaggacagcggcacggggcggggcgcgtcggtcaccaggtcgacgggacggccggtgcgctcctccagggcggcggcgatgtcgctcacgtcgccgagggtggcgctcatcagcaggaactgcgcattcggcagcgtgagcagcggcacctgccaggcccagccgcgatcgggatcggcgtagaagtggaactcgtccatcaccacgcaggccaccttcgatgcgggcccttcgcgcagggcctggttcgcgaggatctccgccgtgcagcagatgaccggcgcctcggtgttgatggtggagtctcccgtgatcatgcccacgttctcgcggccgaggatgtccaccatgtcgaagaacttctccgatacgagcgccttgatgggcgccgtgtagtaagcggtgcgccccgtggccacggccatgaagcagagccccagggccaccatggacttgccggagcccgtgggcgtgcccagaatcaccgagtcgcccacggccaagtccatgagcgcgtcctcctgatggggccacagctccatgccgcgggcgtccacccattccaagaatacctccagggcctcgtcgggcgtgagcacgtcgccctcgccggtttcggcccagggaaggagccaccccagcgagccgggctcgaagggatccacgggtgcgatggggctatctgcggcggcgcgggcggcgcgctcggcgggtttcgcagcttcggcggcgatgtcctcgggcgtctcgtagacgccctcttcggcagcggcggtgttcttggcggtatcggtcatggggtgtccgttctaatggcgcgatcgttcgccatctattataagtaagacccgcgtatcgaagatgacgcatcggcagcggttcccgtggtgtagtataggcgcttactgaaacaaggagtcgctggtgcggaaggcgggtcgtgggcaggttggagccttgcagatccgccgttccggaagcggcgtccagcgcgcagggatgcgcttatgagagttagggtgcaacgtgaaaaagggaaatgtggcggcgcttctgcccatcggggtattcctcgtgctgtatctggggctcggcattctgtttgagtacggcatgggcatttccatggggttctacaacatccccatcgtggtgatctttttggtggcgcttctggtggcgtgcttccagaatcgcagcctttcctttgacgacaagctcgtcgtcatgggccgaggcatcggggacaagaccatcgtcaccatgatcctcatcttcatggcggccggcgtgttcgttggcaccgtgggacgtgattccgccgagtcggtggcctacctcatgctgtcggtcattcccgccgagtactctgtggccgttctgttcgtggtgagctgcttcgtatcgctttcgatgggcacgtcggtgggcaccatcacgctcatcacgcctatcgccgtggcggtggcggcggcctcggggttcagcctgccgctgtgtgtggcctcggtcatgggcggtgccatgttcggcgacaacctgtcgttcatctccgacaccaccattgctgcctgccagggacaaggttgccaaatgaaggacaagttccgggagaacttcaagatcgctttgccggcggcgctggtgacgctggtgatcattctggtgctgtcgctgggcaccgacatctccggcacggtgcaaaacgattacaacctgctggagctcatcccgtacctcatcgttctcgtgggcggcattgtgggcatcaacgtgttcatcgtgcttttgctcggcattctgtccggctctatcattgtggtggccgagggcgccgtggccgccaccgatctgctcggcaacatgggcaccggcgccgccggcatgttcgagacgactatggtggcggtgctcgtgagtgccatctgcgcgctcattcgcgagaacggcggcttcgtggctctgttgaacggtatcaagcgcctgttccgcagccggaagggcggccagctcggcatggggctgctcgtgggcgccatggacatcgccaccgctaacaacaccgtggccatcgtgatggcgaaccccattgcccacgagatggccgagacgtacaacgtctcaaggcgcaagacggcctccatcctggacacgttctcctgcgtattccagggagtcatcccctacggcgcccagatgctcgtggccatctcggcctgcacggagctgggctttcaggtgtcggccttccagatcatgccgtttctgttctatccgttcttccttctgataagctcgctcgtgttcatcttcttcgtgccggatgaccgcggctacgtgcccgaccatgccgccgcccgcatggaggcggcggttggcgcggcggagggggctgcgggcgacaagtaggccggccgggtgtcgatggggcttcgcctgccagagcggaagctggcgaaatttcgacaatgagcggcgtagcctgtcgtcggtagggttggcgccatccagggcaccgggcagctgaagcgtctaccactcctctagttcgtaatagcgcttaagggccacgcctgcgggtgtcaccttgaaatcggcctgccacagttccacgccggcggcgcggcaggcgtccacggtggcgagcacctcctcataggtggtgccgtggtagaagcggaacccgaagttgtcgtagtagaggcagtagaggaccgcggcccgttcgtggtcggccagcgatgcggccaactcgcgcaaatggcgcagggagcgctcggtggagctgaagggcgcctcgggtaggcgcggcacgtaaggcgggatgtccgtctgcatctgcacgagcggcgtcttcacttccagatacaagtcgtcgttcacgaggaaatcgaggcgcgagtcgcccaagggcacctcgcggcgcaccgtgcgaacggggccggttatggtcgcgaaagcaccttcgcgcaggaagtgctccacgtagcggttcgacgcgttctggttgatgccgatccagtgcttgtcgggatcgtccggctgctgcagcgagtaggcctccaccgtgagcggcatcttgcgcttggggctgtgggagtcggacacgaggcacgggcgccccgccaggtccaggccgccaatacgcgacaccaccgggcaatggcagcgcacgatgcccgcaggctcgccctgttcgtcggcggttccgaagtcgacgtccatgatgaaccgattcggccgcgcgagaatgaccccctcgcgcagaggctcggggaatgggagaaagacgtcctgctttttatcgcgtggctccatgggctccttgcaagaattttagaaaaaatggtcacaaaatcgagttctgaactcctcgcgcgtcagtgcctaaggcgaacgtgtctgaattagtcgaatagtattaattgcgacactaatggctgtccagattcactggatagtagggcaaatcgctgctttgggagttcaaaactcgactttgtgaccaaatagagaaaagtttttgcaagcggaaagttatgagctctgcgcgtcgcggtggtgggctgcggcggccaaggcgttgaacaggccgtgatggcggtcgagatactccggatgccactgaacgcccaggaagaagggcttcgcaggatcctccacagcttccaccacccgatcctcggaacgggcggcgacaagcagggcgggggccacgtggtcgacgccctggtggtgcatggagttcacctcgaaatcccccgatgcgctcaccaccgattccagcaagctgcccttggcgatggtgaccttgtgggatatgccgtaatagggcgggttctggcgatgctgcttttcggtgacgccgcagttgtacaggtcgcggtagaggctgccgccgagggccacgttcatgacctgcatgccgcggcagatgcccaaggtgggcaggctgcgctcgtgggcgaggcgagcaagctccagctcgaaaccgtcgcgatcctcgcagacggcgagcaagccgtccaggcagggaatgggcgggcgtcccgtggcggacagcacgtcgcgaccgtccagggactccaccgtttccacggccgaggtgccgtccatggcctcttcgaaggtgcggtcgggcacataatggccgcagaagggaacttttgctcctgtggagcggcagtgggaggaggagccgcagcccatggccgcaaggtcatccaggcccagcgcatcgcgattcttggccgggtcgggcacgtagtagcgcggatgcacgtcgccgcctccggtgatgagcaggccgtccaccagctcgatgacgtggcgggcgtgctctcggtttgcctcggcgcccccggcgatgggggtgaggagaatgggcacggccccggtagctgccacgcggttgatgtattccacattcacgcgctgaaagccatcggcctcgttcagcgtcgtcgtaattccaatgatcacgggattgttccttttgttgctatcgcggcgagttggcagcgcatgcgttgcttctgcggatgcgctgccgtctcgccgaaaccacctaccgcgttagaacataccaccccgcatgccgtccgacaattgtctatctcaccgatgcacatctcaaggaataaaaggctcggaaaaagcggagacacattattcggtggatttttcgattgttagcagaaaaaggttctgaatgggcgtgaggattagcggaaataagcgcaaaacgataattcatcgattgcgattcaggaatgagggattctcgaggcgccgagcagcgagttctatggctaacaaacgcaaaatccgtcaaaataatgagagcgaaattgtctggagtaagccagggcgtgtggaaagattcggaagcgggagggaaggtctatgcgggcggtagtgcagtgcgtgagcgaggcgtcggtgacggtggaggggcgcgcggtcggtgccattaggaaggggtacgtcatccttctgggcgtgggccatggggacaccgaggacgaggcggagcggctgtggcgcaagattgccaagctgcgcgttttcgaagatgcccagggaaagacgaacctaagcctggccgatgtgggtggggaagtgctcgtggtgagccagttcacgctgtacgcgaattgccgcaaggggaatcgcccctcgttcacggacgcggccgacccggccatcgcccggtggctgtacgagtacttcgccgagctggcccggactgacggcttcaccgtggcgacgggggagttcggcgccatgatggacgtggcgcttgtgaaccacgggcccttcacggtggtgctggatacggatgcgctttaacgggggcggctccgaccaagaggagccgcccccgttgcgtggggtaatggcgcgttgcgcggttagccttcgtccaccaccaagtcgacgaattggaaggtggtgcagtccaccaggccgcgattggtgaggcgcagttccggcaggcaggcgagcggaatgagcgccatggtcatgaagggggagggcatggtgcagccgatctcggcccaggtcttttccagatgatgcaccttctcgctcatggcaggggcgtccaggtcgttcatgaggccggcgatgggcagttctacgaggccgagcacctcgccgtcggccacgacgaccatgccgccgcccacctcggcgagcgtgttggccgccagcgccatgtccgcatcgttggtgcccaccacgagcaggttgtgggcgtcgtgagccacggtggaggccatggcgccgcgcttgatgccgaagcccttggtgaagccgacgccgaaggtgcccgtctcgtgatggcgctcgaagacgaaggtcttcagaacgtcctggtcaaggtcgctttccaaggcgccgtccgccacggtgagcgcggcgcgaacctcgcggtcgggcaccgagccgggcagcacctctatgacgcgcacgcataccgcatcgccgtcggcggcatcggccggcgcttccacgcggaacgtctcgggcgtgatggcgcatcccaaatgcatggagtgggtcacccaggccgggtattcgaagggcgcaagcgggaaggtgcacgcgccgttttcggctaccatgtcgccgtcgatgagcacgcgggtgacgttcaaatcctccaggttgtccagaaacacgatgtcagcgcacttgcccggggtgatggagcccagctcgttgtccatgcggaagcaggtggcggtgttgatggtcatcatctggatggcgcgcaccacatcaatgccgcattccacggccttgcgcaggatgtagtcgaggtgcccattggccacgagcgtgtgcgggtgcgtgtcgtcggagatgaggttcgcgaagcgcgtgtcgatgtcggtctcggtgatggcggccgccaggttcggcaggtcgagccacgccgagccgtagcgcagctgggcgtactgcccgaggcgcatcttggccagcgcgtcctcggcgcgggtcgactcgtggcagcagcgcacgccgctggcaacgtaggcgttcagcccctggtctgtctcggggatggagtagtgtcccgtgactaccttgtcggcagcgagggtggcggcgagctcgccgtgggcgtggtcggtggccgccagcacgccggggaagttcatcatctcgccgaggcccaccacgccgtcccaggtcatggagtccgcgatctcggcggggcccacggcagcaccggtgtcctcgaagccgggcacggccggcacgcaggaaggcgtggtcaccatggccttcagcggcgtgcgcgcggcgtcctccatcatcacctgcacgccttcaaggccgagcacgttgcacacctcgtgcgggtcccagtaaatgcccaccgtgccgtgggggatgacggcccgggcgtactcgccggcgccgatcatggaggactctacgtggatgtgcccgtccaggaagcccggcgcgatcacctggccggcagcgtcaatgacgcgggtgccctcgccgatgcaatgggcggcgctttggcccacgtaggcgatgcggccctccgcgatggccacgtcgatgtcgtcttgcacttcggccgtgcacacgttcacgagccgcgcgcccgtgatcaccgtgtcggcgggttggcggccctgggccacggcggccagggtttgcgtgcactcccaaagcggtttcttgcagaaatggttcagcatgggcgcctccttcagcgctagatgaatggtcggcgtgcacgggcgtcgcggcgtaggcgaccgatcaaatgagcggccgaaatgcctgcctgcggccgcagccggcctgatggcgccagtgtacgcccgccgtcttccgagaaggtgtcaatggccgagaatgcagaagggcttcacggagttccctttccttggagttagctctaaatgctttaatggggaagcggggaatgagaaggtcgcgataaggcaagacggtcgaagaagaacgtcacggcagcatagggtttgcgaagaagagaggtgtgccatggagtatcggaaattgggtcgcacgggcctggaggcgagcgttatcgggttcggcgccgagtggatcggcaagatggagcaggccgaggtgaacgccatggttgcccggggcgctgcggctggcgtgaacatcgtggactgctggatgagcgatccggcggtgcgctcggccctcggcgaggcgcttgagccgacgcgagatcagtggatcatccaggggcacatcggcagcacctggcaggacggccagtacgtgcgcacccgcgagctggaccaggtgcgcccggccttcgaggacttgctggagcgcttgcgcaccgatcacgtcgaactgggcatgatccactacgtggacgcctgcgacgagttccgcgccatcatggacggccccttcatcgaatacgtgcgcgaacttctggctgcgggcaagatcgggcacatcggcctttccacccacaatcccgaagtggcgctgctcgcctgtgacgagccggagatcgaggtcatcatgttctcgctgaacccggccttcgacatgatgccggcttccgaggatttggaagatctgttcggcgactacgagaacgtggccggcgatggcatcgaacccgtgcgcgctcgcctgtacgcccgggccgaggagaaggatgtggccctcacggtgatgaagggctacgcgggcgggcgcctgctttccgccgacgcgtcgcccttcggggtggcgctcacgccggtgcagtgcatccactacgcgctcacgcgccccgcggtggcgagcgtcatggtgggcgtggaaaccgtggaacagttgaaagaggccttggcctacgagggcgccaccgccgccgagcgcgactacgcgagcgtgctggccggggcgcccaagcacgcctacatgggccagtgcacctactgcggccactgcgcgccgtgcacggtgggcatcaacatcgcactttccaacaagttcgccgacctggccgagatggcgggcgaggtgcccgcctcggtggcggcccactacaaggccatggacgtcacggccggcgcctgcatcgcctgcggcgactgcgagccccgctgccccttcgacgtgccgatcatcgagcgcatggaaaagacggaggagctcttcggctgctaaacgagccggcgaacttcggagtcttcagcattcgggcgggctaatgccacttcgacgcagaaatggccgatggaaggtgccagttcagggccgaaatggttgaaaatgccagttcaaccttgaaatggccggcgttgggaaggcgcgtcgcgccatttctgccctcaactggcatctgccggcggattttcgaaatcgcgctcggcgcagaggcccttcaacgtatccaaaaaagcttgggcttggcgggtggggagggtcttgcgccagacgaggccctgggtggattccagggtgggggacagcggtacgaaagccaagtcgctcagctcgttggcctcgaacaggccgcgataggtgaacgcgctgccgatgccctgccgcacgaggaacttggcgttcagtggcaggttgtaggtggcgcgcacgtccatctcgtcggccaagtctcccagccattggccgagcacgcccaccttcacgccttggcgcgagctgatgagcggctggtccagcaggtcctcgggcatgacggccgcctttgctgccagggggttgtcgcggcggacaaggagaccccacgtgtcggtgtggggtaggcgcaaggtgtgcatgtccacatggctgcgcagctcgcattccagaaggaagtcgtagaagccgcggacgaagttgtccatgaggtcggccgaggtgccgctgtacagctcgaaggtgatgccggggtaggcggcgctcgtgcgcttcatggcctcggcgacaagctccatggcctgggtctcgccggcggcgatgtgcaccttaccggcgatggaatgggtgagaagggcgatctcctcctcggccttgtcagccaaagcgaggatggactcggcgtagcggcgcaggatgacgccctgctcggtgagctcgatgcctttgcggttgcgctgatacagaaggtgccccagctcgtcttccaaagcggccagctggcgcgagagcgtcggctgggtgacgtgcaatgacttggccgccgcggtgatggagccctcgcggacgacggtgacgaaatagcggagcgttctcagttccatggttcccccttcgattccccggcgtgctcggctgccgcgctgtccgcgtctattacgccaggcgagattgggtctggcacatcctgcatgcctttcaagcatttacaagattacaatataagcattacctatggaaggggtgccctccgtatgattcgagctgtcagagaagacacgagaagaggagggtgatgttcatggctctattggacaagggcatgaagcgtcgcgatttcttgaaggcgtccgccgccgctgcggccgccacggcggcggtcgggcttgcgggctgcgcgccgagcacggccaccgacatggccgagaccggcgggagtgccggcgcgacgacccatcaggtggccagcgacgccgccatcatcgagggcaagggcgagtggatgcccatccattgccaccagaactgcaaccagatgtgcctgaacatggggtacgtggtggacggcgtcgtggtgcgccagaagaccgacgactcccatgcggacagtttcgactgcccccagcagcgcggctgcctgcgcgggcgctccctgcgccagcaggtgtacaacgccgaccgcatcaagtaccccatgaagcgcaagagctggcagccgggcggcggcgagaacgctcacggcgagctgcgcggcaaggacgagtgggagcgcatcagctgggatgaggcactgaccctcgtgaccgacgagctgaagcgcgtctacgcggagtacggccaggacgccgtcgtctgcaacggctggcgctgggcccccggctccgccatgttcccggtcatcggcggcgcagtgtacaacaccgagtgcgagtccttcggctgctgggccttccaaacggaggcgctgggcatgtactcccacggcgaccatcccgacctcatgatggcgccggacaagtacgatctgcccaacgccgacaccatcgtgctgtacggctgcaatccggcctggtcgcagcactcctccatgtattggctgaagaacgcgcagaaggccggggtcaagttcgtgttcgtcggccccgactacaacgccaccgccgccgccatggacgcccgctggatccgcgtgcgccccggcaccgacacggccttcctcctagccgtggcctacgagatggtgcggctcgacgaggagcgcggcgacatcatcgattggggcttcgtgaacgagcgtaccgtgggcttcacgccggagaccatgcccgccgacgccaccaccgacgagaacttccgcgactatctgctgggcgcctacgacaacacgccgaagacgccggaatgggcgacggagatctgcggcacgccggtcgaggacatcacttggtacgccgagatggccggcaagaacaacgccgtcatgttcctgcacagctacgccgcgtcccgctacctgggcgccgagaacctctcccaggccttcatgacggtgtcggctttaggcgggcacttcggcaagagcggccacggttcggcggccatctacacctgggacgcgggcgactcgggctatcggctcatccagcacgtcggcggcgactacggctacgtggacaacctggtgggcagccccgccgccacgggccccaaccgcaatatcgagggcaattcctggtggagctcgctggccgacggcaagtatctgtcctcctcggaaggcccctacgacctcggctccagcgacgtggtgggcgatccgacgaagctgcgcgccaacacgccggtctaccatgaggcccgcgagatgccggtgaacccgcgcctgctcgtgcagacgaactcgaactttatgcagacgcgcggcaacctgtccacggccatcaaggtgatgcgcgccgccgacacctgcgtgtccttcgagatcaagttctcgctcacggcccagttcgccgacattatcctgccggtgtgcacccactgggagggcaacgacgacgagagctggggcgagctgtcctggccgagccccttcggcgacggcaacggccagaagcagcgcaaggatgccctgctcgcttggaaacccctggtgaagccgatgtacgaggcccgcgaggagaagcgcgtcttccgcgagatcatcgagcgcatggggtacaacccggatgacgcctacccgaagagcaactacgatcagtggctcggctacttcctcggcatgcgcgtgctgaatgaggacgccacgaagtgggagccggtcatcacctggactgaggccgacaacgagaagtaccacgcgagctacccggcccaagagggcaaggtcgccttcgaccagttcatggccgacggaagctacgtggtggagcgctcggagggcgatccgcgcaactacgtgggctatcgtgatgacaagctgggcattggcgaagacggcgagtcggtcgtcgtggccgacaccgcctggccgcgcccgtcggtgtccggcaagctggaggtctactgccagtacaaggccgacaatgtgaaccgcatcgggcttaacgacgaacccatcaagccctacgcgaactacttcgtgccgcgccgcggctaccaggagacgttcgccaactgggaggtcaaggagaagggcgcctacccgctgcaggcctacacgccgcactacatgcgccgcgcccacacctgctacgacaacatgacctggactcaggaggccttccgcaacccggtgttcatgagcgtggaagacgccgaggcccgtggcatcagagccggcgacacggtgcgctgtttcaacgatttcggcagcatgctgagaatcgcccagcccatgcagggctacatgcccggcgtggtgggcattccccacggtgtgcactcggtgttcgacgagtccgaccccgagaacatcatcgaccgcggcggcagcgagcagatgctctccgatggcctgcagtcgaactacttcccccaggtggacggctacaacagcctgctcatcgagatcgagaagtacgacggtgagccgttggtggaagacttcgagcgcgggccgtttctggccgcgggtatagatgctgagggtacggccgcctatatggtgcccggtgccgacaacggacaggaggcttaagtcatgagcttgggattttatgttgacctggccagctgcatcggctgcaagacctgccaggtggcttgcaaggatcgtcgcgacatccaggtggcgggcccccgcctgcgccgggtggacaccttcgaatgcgggacgtacccggaggtggccatgttccacctgaacctctcctgcaaccactgcgagagcccggcctgcgtggcgaattgccccacgggcgccatgtacaaggacgatgacggcacggtgcagcacgacgacgaggcctgcatcggttgccagacctgcgtgaactcgtgtccctatggtgcgccgcagttcatcgaggaggacaagatcgtccagaagtgcgacacctgccgggcgctgcgcgaggcgggccatgagccggtgtgcgtggaggcgtgccccatgcgcgccatcgagttcggcgaaatgggcgatttgcgcgccgcccatcccgacgcggtgagcgagctgccctgcaccgaaccggccgccacgacgaccccgaacatcctcatcggcgccagccgcggggccctgctcgaggacttcaacccggtcgttctgtaaacgcgaatgctgctggggcggtcggtgcggccgccccttttgctagaggagggaaccatcatgaccgatgtcgtcaacatgcgtcgcgagtccatcgacctgaaggcgctgcttctgtctcgcacgtatttgtacacgctgttccacaagctgttcggcggtacgccggatgcggctgtggtggcatgcgtgctgtcggagaccacccgcgatgtggtggaggaatacgccggcgatgatccttccatgaaggggctcgggcgctttttggaaaacctcggagaatgcgtcgatggcgcggtgctgaccgagcaggcccgcgacgagtacacgcgcctgttcattggcccgggcgagctgccctgccagccgatggaatcgccctaccgcacgaaggatgcggccgtcttccaggagaacaccctggccgtgcgcgccatctttcgcgagcacgggcttcagcttgcgcgtctcatgcgcattcccgacgaccatatcgccaccatgtgcggctttatggcccatgaggccgagcgctctctcgccgagttgcgcgcggggaacgtgggcgccttggccgtgtccctgcgcggcgaggaggccttcgtgcgcgaccatatgctcacctgggtggacgatttcgcccgctgcgcgcgccgctcgaagacggcggtgctctacccgcagatgatcgaggcgctggccgccttcgttcgcaatgatgccgtgctgctctcggaggccgcctgctgggccgaggaggcgcgcgacgtctgcggcgagatgatccccgggggtctcggcgcccttccgggcagccccgaggccgccgccttcgccgaggtgtccgatgccctggcggcccttgcccgcctgcatcccttcggcgtcgaggatcacgagctggtgagtatatcggtctaaagagcagcctcgtcgctacagccaaagccccgtgttccccatcaggtagagagggacattggtgagccagtcttgctcgcggtagtcggaaagcgagaagcgccgggcctgaacttccgggtacttctccttgaagctgcgcaggctcttggcgcgcagattctcctcggctttcacctcgatggcgtagacggcaccggccgactgcacgaggaagtccacttctccccgggagttctcggcggaccagtaataggggacaagcccacagcttgctataagctcttggcacgcgtactgctcggtgagcgcccctttgaattcctcgaaaagggctcctcgtccgtcttttctgcgactatacaaaaacaaggacgtaaaagtgctagaacttacataaatcaggacgtaatgggagatattaccgtggtgcgccgttggcctcggcgagagtggccccggacgaggccaagcagatcggctagccgttcttcttctcctgctcccacacgaagcggaggttgtcggggccttcggcccactggcgggaggagaagtcgaacagcagctcgtaggtgcgcgacgaggcgaaggcgtccagcgcatcatcgaagggagcgccggtgtcgtcgcaccagtcttccaacatggttcgcatcaccacgacggcgcacgcctcgcgctgctcgtcggtcacggcctcttcgtcaaatcccatagggctcgccccccccctcgagcgcaaggcactcagcagaggcgtaactgccatggtagaggatgaggctgtctcgcagagctagcatagcgaatac

SEQ ID NO: 10506 - DNA, 138627 bp, Unknown
  gut microbiota DNA sequence
tcgagcgcaaggcactcagcagaggcgtaactgccatggtagaggatgaggctgtctcgcagagctagcatagcgaatacccttttgcggtaaggtaggtctcgatgtcgtcgagggcgcgctcgtagctgctcagatgcagcaggtcgtacagctccgtgacgtagtcgtagacgccggcctcgctgaagagctgggcgacccgaacggcgggcatgcgccaacgtttctgagcgaggcgcaaaagccagcacttcatatcggcgatatcggactgtcgcggcgacacggtctctccttgggcgttgcggttgcagcggttccattatggcggcttcgctgcaaagtcgcgggaacgtcaccttccaagaccccgaagaggcgttgtcatggttgcattaccataatgcatcaagtatgatgggtgcggcaaggaggttgttatggctcaggctaccatcaatgcgcgcttgaatgcgacggttaaggagcggggcgacaaggtgcttcgcgacaacgggatatcgacgacggaggcaatccgcgggctgtggtcgtccatggcccggacgcgcgaagttcctagcttcttggtgagggaatgcaagtgtgacgagacggcggagcgccgacgcaagcgcgaggtcgcgcgcggtctcgtggggctggcaaccgaaggggcgacccttagcgacgatgagctttccgacttgaggtttcaggccttgctgtctcgctacgaggtgctgtcatgaaggtccttttcgacaccaacgtgtggctcgacattattttgagtcgtgagggcttctgggaagcgtctttgacggcgctttacgactgcatcgacgaggacgatgatctctgcgtgatcgctacttctttgaaggacgttttctttctcgtcgagcggttgaaggacgccaatgtcgcctacgagtcggtcgagcgcatgcttgagctcgcccgccccatcgccgttgacgaagcggtttgtcggcgcgccctcccgctggagcggcccgactacgaggacgggataatagcggcagcggccgagatcgagcaaattgagtgcattgtcacgagggacgacgacgccttccgcgacttgggcattcattgcgtgagccctctcgagttcatcaaagagcgtggtacggaggtcgtcgctctgtagggcgcggagcgcacccgtgcgcggcagctgctggggtaggggcgaaggtcgattctcggttgcttgcgcccttccgcatcgtaccggtaacgttctttcgggagcgcgggcgcgaagcttttcggctgcactagaatgggcaccaatcattggcttcttacgatgtatcaaagagcaactttcttgaaaggacgaatcatggcgaaatcggcagtggtatttgtagcgaacgggtgcgagccggtggaggtgacggctccggtggatgttcttcggcgcggcggagtggacgtggtgctggccgccgtgtccgacgatttgaccgtgcgggcggcccaggcggtgacgcttcaggctgatgcgccgctttccaccctcgatctgacgcagttcgacattgccattgtgcccggcggctcggtgggtgtggacaacctgggcaagagcgcccgcgtcgtggccgagctcacgcgccgcatggaagccggcgagtacgtggccgccatctgcgccgggcccatggtgctcgccaatgcggggctgctcaccgggcgcaaggccgtgtgctaccccggctgcgaggagggctggccggctggtgtttaccaggcgggcaaggacgtcttcgtcgatggcaaccttatcactgccacgggccccggcacggcgctgcccttcggcatccaaattctgcgcacgctcgaaggcgacaaggttgccgatgatgtggcttcgggaatgctgctgaaataatcatcgcattgccatagcgcgacgagggttgcgcggcggcgggcgaaggggcggcgcaggaagcgcaacctcttcgcccgtcgtgcgtttcgggtcgaaaccttctcacccattctcgggtatattttacgttttcccaggtgatcgctgggtgaatacccgaatgcgggcgatgtgcggcctgttgcattccgcttaagatgcgtctcgttcggttcgcttatgggagggccggatgcgtgccggttcgcgtaagggagggccgggcgcgagccgtctttaggaggatgcaatggaaaccaatctttcccgtcgtggatttctgaccggtgccgccgcggccggcgccctggccgccatgggccttgcgggctgcgcaccgacccccgcggccgagggcagcacgaagaccgccgaaaccgggaccgccgctcccagctggcgcgacaagccggagatgcccaccgagttcgtggagaccgtagacgccgacatcgtggtcgtgggcgcgggcaacgggggccttgtggccgccaccaccgccgcccagaacggcgcgaaggtggtcgtgctggagaaggccggcgccatcgccgctgcccgcgaggccatcggcgcgctgaactccaagcttgcgcccgatcatcaggaggacgtgcccacgcttctgaaccatgccaaccagacccagtccggcgacgccaacatgctcatgtacaagacctgggccgagaagtctggcgagatgatcgagtggatggccgacacgctgggccccaagggcatgctctttcccttcgagtggcactgccccgacgacccgcacgcctattacccggccatgtgctacaacccctgcatcggcgagtacaacccggacggcccgaactacaactcctatgcgcatctggaagtgatgcgcgacgtattcaccgacgacctcggcggcgagatccgcttcgagtgcccggctcagcagctcgtcattgacgaatctggccgcgtgaccggcgtggtggccgagggcaaggagggtttcatccaggtgaacgccgccaagggcgtcatcatctgtaccggcggctacggcgccaacaacgagatgctggccgatctggctccgggcaattccgcttggtgcgccctgcgtgactcggtgaccgagaccggcgacggcatccgcatggcgctgtgggccggcgccgagcttgaggccggcggcgcctgcatgatctggaaccgcgccattctgcccgacggcttcgagttcaacgaggatcgcatgggcggcgacatcttcctgcccggcagccagcccttcctgcacgtgaacgtgaatggcgagcgcttcatgaacgaggatcagtgctatcccatgagctacgccgccggcgcgaaccagccgaagcactacagctggatcgtctgggacggcaactactgggacgacatcgcccagttcgacacctgcggctgctcgcgcctgtaccccgcgccctctggcaccgccttcaacgccgacgtgtacgactgcgaggccatgtccaaggagcacctggacgagttctggctgaacccgcgcctggaggccggcacgctgaagaaggccgacaccttagaggcgctggccgacatgatggagttcgacgccgaccagaaggccacgttcctggccacggtggagcgctacaacggcctggtggccgcaggcgaggacaccgatttcggcaagccggcctaccgtctgtccgacgtggggaccgcgcccttctacgcggcgcgcattggcggcgagctgctggtgaccattcacggcgtcatcaccgacgtgaactcccagccgctcaagaacgacggcactcccatcgagggcctgtatgtctgcggcaacgaccagggcggcttctatccgcacaactatccgagcaacttcacgggcatcaacgccggccgcacggccacgttcgctcgcatcgccgccaagcacgccttgggcgtcgaatagggcgaccgctcgcttttcccgagcctgccccctcccttcagcaggcgatttcagggctccccttcgggggagcccgtttttatggaacgggtgcatcggtttgtgcaaaatagggcacttctcgtagctgtattgatgcatcaggtctctgctcagggaaaggtggtggcattttcccaggtgaagagcgtctgtgtaacagttgacggactcgaagactacgagaagtgtgccattttgcacatttcagagtgtttggggctcattggagttcatgttgcgacgataggggctgtggctatagagtcgctaggaggagctcgttatcgccgcgcgaggtcgatgagctcttggcgggagtggacgcccagcttcgcatagatgtgtttggcgtgggtggccgccgtctcgcggctgatgatgagctcatcgcggatgtaggggatggagcggccttgggcgagcagcgcgaacacctctgcctcacgaggcgtgagaccggccttttgggcgatctcgtcgatgcgcgctccactgcgctcctcgctaggcgcggcggaggttggtgcggcagcgggcgccggtgcatccggctgaggcgcaccgggctggtccatggcgccgtggacatccagcgattcggacacaaggcccttctcatgcgcgtggggccgatccttcgcggcctcggggatgcgcaggaatgtggaggtctcgcccatgacggccatggtgaccgtcacgagaacgacgatgcaccccacgctcaccgcggtgagccccgccggctgtgccaacatcagcggttcgagaacgatccacaaaacgaggcccagaaggtcgcccgcatgcacgaacagccaccccaagctggaggcctgggcgggggtcgcgcggccggcggcagcgtagttggcgaagtagatctgggcgatcaggcagaaggtgaaacggcctccaagcgatgcggccacggcaacaagggcgccggcctgtccgaacaggatgacggccgcaaatccgatgaccagggtggggcatatccagcggtagaggaagaacagggatatgcggcgcggtcccgaaatggccatggccgctaccacggccatcatgagcgcgctgaacagcaagatggcttgaagggggatgccttccacccgctcggcactcatcatgcccgcgatgctcacgatggagaacacgacgaggatgccgaaccccgtgcgcccgagtcccgccaagggggagcgccgctcggttgcgaagcgatgggcggttgcgagcgcctcttcggtgcgggcggcttttggcgtccacgcgagatggaagcataggccggacaaaagcgggagcgccgcggcgacggcgacgggcacccagtcgtccatggcggataccagaagcacgatgacggcggcggaaaccgcggaaaccggcgcgagccattccgatcgatcgcgggggatgacggcgtagtactcgccccacatcgcccacagaagcgcgcttccgatgcccgtggccacggcgccgatgccgaaaagcagggcgttcagccctggatcggcgacggagacgaacatgaagggagtgctcgcggccgtaagggcgggggcgatgacgaagagggggcgatggcttgtgggcgagccgatgcgcggctcggcgagcacgatggccgccagggtcgccaccgatgcggccaaggggagcacggcgtagaagagcgcggcaccgatggatgtcgggacgggcgcggcactagctgcagcttcgcccgcattcgggatcgcgtccccgctcagcacgccggcggcgttggtgtagaacacgcagaacacccaggcgagcagaaacgcccatcccagctgccgcagcggcgcgacctctcggcgctcgtcgttctgcggcgccagccatgtttcgaagcgttccttcacggccctccctttccaatcccctcattgtagcgcgaatggcgcgaaggctaccgcagcttgaacttcatggcgacggggttgtggtcggagtaggcgaagtccaagttcacggtggagcagtcgaggcactccacgttgtcggagtagatgaaggtgtccatgacccagcggtcgttggtgccgtcgtaggggcgtccggcgtcgcggcaggtggcggcatcggggaaggcggcggtgcccgtctcgtctagcttcgccttggcggccaccgtgaagccctccggcacgccatcgaagtcgtagggcttcgcccagctttccacggcctgggcggcgttgccgtacacctcgccggagacgccgatcatgtcgtggttgtagtcgccaccggcgatgacgtagttgcccgccacccgctcggccgtcatgtcctcgtagagcttctcgcgctgggccgccatgatggaagcgtcggccccgtaggcggacagatgcacgttgaagagcacgagctcggcgtcgcccgcgggcacgcgcacgatggagtagcagcggtccaggtcgaggaacttgctgaaactctccgaaatgggcaggctcttgcgcaccgggtcgcccacgggcaggcgcgagaacgtggccagccccgcgcggttggcgccgtgaggtgcgtagaggggccaggcgaggaaggccgagtcgtagttctggcagaacaccgaccagtcgctggggaactgggtgcgcagaagctcgtactcgtcgatgtggtggctgcgagtgccgtctgtgtccacttcttggaagagaacgaaatccggcgagagcgcacgtatggcctcggccgagccgagaatgtcctcgcgcaccacctccgggctttcggccaccgatcctgtgccgccgtccatgaagaagtcgaagtcgcggttgtaagcgccgaaaccgaggttggctgtcaccacggtgaactcctcatcagcggaaacgaccggcgcagcctcgtcggcagccaaaggcgcgtccacggtgagcgccagattgtcgggaagtcgctcgtaggtgaccatgacgtaggcgacgtaaacaagggccacggccagaagcgcgccgagcaatgcgagcagaaccgttattatgcgtttggccacaaaaggctcctttgacgagggaaaaatccatttgggtcattgtacttcaccctgatacacgggtcattgtggaataccctagcttaaccatatcgttaggcagtcgcattagatgactaaaaactcaccattggatttgaatctgaacactctgtatccagataatgacagggaggtaacagagacctgacgcgacagtgacaagctagaggaagctataaggtacgctccatcggattgcacaggtagcaagcattccctttggcacccttcttctcgcgggttggtcgcttgggtgcgcttaaagacaggaggtccctcatgcagtcgaacaagaagagcacccgaggtgtggcgacgcgcgaggtactccgcagcaacgacacggccaagcggtcggcggagatcgtcgtcgccgcgcgcgagctgtacgaggagaagggcctggcccgcacctccatccaggacatcaccaaccacgtgggcgtgacgcgctcgctgttctaccactacttccagaacaaggaagaagtaacgagcgccgtgctcgaccagtacatcaccgattttctggaggccatgcagcactggcacgagagccagacggcgctggccaccgacgaatcgctgcactccatggtgaaaatcatgcgcatggtgctgttcgagaagaacactttccgcatggccctttccacccaggagaacgcggcgctgtacctggatttcctcaatcgcttcgccgcccagggcgccgagttcatggtgacgcatcccatggtggagcagacgaagtacggcgagcagtccgaccatctgtatgagacgttctacgtgctcatcgtggggctggtgagctatctgcgctcgcatccggatgtggaggacgaggtgctcatcgacgtcgttacccgcatgctcaacatcgagcaggccgaggaggcccgcgagctcgcttaattcggggtttcgcactgcttctagttggaaggtcggcgatcttgccaagctgctctggcgctcttctcggccggattctgcgtcgcgccgccgttgtgcggcggtatggcgaatcggttacgatctgcgcgccgcgccgcctatcggctatcatcttactcgtaaggtaacgggcccgcccgcgtaagcggcgggcccgtgcgcgattgcgggaaggaggggccatggacatcaaacgagtgctggcgagcgcgcctcgcgaccacgacccgggcgctgcccgtccgctgctcacgcggtggggcgaggcgctggatccggaaaccgtgcgcggcgagcacccgcgcccgcaattcgcccgcgaccgcttcatatccctcaacggttggtgggactatgctttcgttcccatgggagctcatcgtaccgtgcggccgcccgatgcgttcgacgggcgcatcctcgtgcccttctcgcccgagtctctgctgtcgggggtgggtcgccagcttcagcccgacgagctcctgtggtacgtgcgccgagtgtccgtccccgccatgggcgagggcgagcgctgcctgctgcatttcgaggccgtggatttcgcctgcgcctgctgcgtgaacggccaggtcgtgggcacccacgagggagggtatctgccgttttccttcgacatcaccgaggcgctgcgggcagagaagacgaccggcgaggggagtgcggaagcgcgttttcagggtgcggaatcaatgactggggacgtggcggttgaaggtgtcggagacgcggaaggtgacgcctgcggggagggaaaggccgatctcgaagaggcggccgacttggctccggcgccgccgcgggagttcgtggtcgccctgtgcgttcgcgacccgagcgatgcgggcacccagccgcggggcaagcagaggctcaagtcgggcggcatctggtacacggcccaaagcggcatttggcagccggtgtggatggaggtcgttcccgctcgccgcgtgctggccctggcgctgcatcccgatgccgatgccggcattctgacggcggatgtcgatgtgagcggagacgcgggcctggtgcgcatctacgtttgcgacccgacgggccgccaggtgggcgccggcgccgctttcgccgaagagggctcggtgccggtgggggttgaatcctcagggcaagcggggccggcccgtcgcgtgcgcttgcggctcgatctcggcgaggtgcgccgctggagccccgacgatccgtgcctctacgatatcgtcgtgcgattcggcaccgatgcggtgcgcagctacaccgccttccgcacggtgaaggtggctccggacggcgccggccgctttcgcttcttcctgaacggcgagccgctgcttctgcgcggggtgctcgatcagggctactggtccgacggcctcatgacggctccctccgacgaggcgctcgccttcgacattcaggccatgaaggacgccggcttcaacatgctgcgcaagcacttgaaggtggaggccgaccgctggtactaccattgcgatcggcgcggcatgctggtgtggcaggacatggtgtcgggcggcggcgcttacgacgggtgggaaacgagctacaagccgacgctgtggcgcggaagttgggacggctacgaggacacctcggcatcccatcagcggcgcctcggttccgatgacgacgcctaccagcgccaatggctgcgggagtgccgcggcacggtgacccacttgcgcgctcatccctcggtggtcacctgggtgctgttcaacgagggctgggggcagttcgacgccctggcctgcgccgaggaggttcacctgctggatccgacgcgtcccatcgacgccgtgagcggctggtacgaccagggcgcgggcgacttccagagcgtgcacaactatttccgtccgcttgcggtctaccgcgaccggcgtgacctgacgggttacgcgcggctggcgggcggtcgtgccttcacgatttcggaattcggcggggtggttcacgccgtggcggatcacagcgcctttgcgggcacctacggctacggggccaccgacacgccggccgaatggcgcacggaggtgcatcggacgctggacgctgcggcggctttggagggggcggggctttccgcctatgtgtacacgcagctgtcggacgtggaggaggagtgcaacggcatccttacctacgaccggcgggtgaacaagctgaaggaggacggcgatgagtgcggtagcgctgagatgtgatgccgatgccgaccgcatgttggcgcatctgcgggagcggttcgccgaggtgttccccgtgacggggtcggcgggcgacggcgccggaggagacgccggcggaaatcccgacgaaggcgccgatggaagcgctgacgcggccgtccggttcgcgcccgtggcggaccggggctctttcgcgttcgcctcggcgccggggcgtctggaagtggcgggcaaccacgtggaccaccagggcggccgcgtcatctcctcggccatcggcgagcgaacgtgggggctggcggccgagaacggaggacgcctggtgcgggtggccatggagggtttcggcaccgatgtgatcgacttggacgatgcggactggcgggcaccccatggtgtggagacccagtcctccgccgcccttctgcgcggcatgctggccgcttacgatgaggccggcggcacgttgcgcggtttcgatctggccacctgctcggaagtgcccgccggctgcggcctgtcctcctcggccgccttcgaagtgatggtgggcgccgttttagaggggctgttcggccccgggcccttcgcgggcgtgccagcgccggcgccgggccaggacgctgcagaaggggagggggatggcttcgttcccctgaatcccgtggcgctggccctggcgggcgttaccgccgagcagcgctacttcggcaagccctgcggcgctcaggaccagctggccagtgcctgcggcggcacggtgctgctcgattttgcgtcggcggtgccccaggtgacgccgcttgccttcgacgcgacgggcgtcggctacgccgtggtgctcatcgattcgcgccaggaccactcggtgcacaccgaggagttcgcctccgtacccgccgacatgcgcatggtggccaaccacctgggcgtcgcgcgtctgggagacacgaccgcggacgtgctgctcgcgaacctgcaggatgttcgcgcggcgctgggcgacgggcgcgccatgcgggcgctgcactacttcgacgaggtggcccgggtcgatcggcagcgtgaggctctggaggcgggggatttcccgctgtttctgaagtgcgtgcgcctgtcgggggcctcgtcggcccagtttttgcagaacgtgtccccgcgcgataccggctccggggagcgccaaccggccatgctcatccaggggctgtgcgcgcacctgctcagcgaagagggcgcctggcgcatccacggcggcggcttcggcggctcggtgctggcactcgtgccccgagccgaggtcgccgacttcatggagacgatggacaagccgctcggctaccgcgcctgccgcgaggtggtcgtgggcggccccggcgtgctggcgaggcggctgtcgtgagcggagtcgcaagaggcgtggaaggtgcctcagggtatgccgtggacgagcgcggcaatcctttctggacatacagttctccggcggggccgctggagatcactgtcaatttagtcaaacctgagaaagatccgcgggacatcgccgctgcagcggggacaaccctcggtggcgcggcgcttgaggcgacgcccgctggggaaggcgaggctgcggcgacaacggtggagggcgacgcgaggaaaggggctccctctgtcccgacgacctgcgacttgtgctgggagccgtcgggggaggacggcccggcgcacctgcggcgctcgggcgcgcccgtgaccgaggtcgccctcggcggcgagccctgggcctggtggttctctccctacggctacttccccgagcacctcatcgtagcgtcgcgcgagcaccgccccatgcccatcgatcacggcaccatcgcgcggctgctcgatttctcggacgcctacccgcggtggttcatcggttccaacgccgatctgcccatcgtcggcggttcacttctggggcacgaccatttccaaggtggcggccaccgcttcccgttgatgaatgcgccgattgcgcgcgcgttttccatcgaaggcttggaaagcgtggaggccggcatcgtgcgctggcccgcgtccgtggtgcgactgcgcagccgcgaccggcggcttctcgctgaagcggcctgccgcgtcctggatgcctggcgtcccttcagcttcgaggaatgcgatattcgggctttttcgctcgtccaggacgacggccgcgaaggcgccgtgagcgcttcgggcgccctggcctcgcccgcgcgtttcgtgcagcacaacacggcgaatcccatcctgtggcgcgagggcgacgactacgtgatggatctcgtgctgcgcaacaaccgcacgacgccggagcaccccttcgggcttttccacgtgccggagcgactcttccacatcaagaaggagaacatcggcctcatcgagatcatgggccgcgccatcctccccacgcgcctggcagccgaactgcctgttatcaaggacgaatgcagccgtgccttctacgagattctcgtggccacgggcgtcttcaaagacgatgccgccggccgccgcggctgggaagccttcctcgcgactatctaggaacgccgcggcttaccgccggcggtgtggcggacgacctcgaagcgctcgaggcgcacctgctcgtctggtcggatgcccgctttctgcttggcgatggcaatctggtcgaagacggtgtcgacgccttccaaatcgggaagcagcaggccccgccgatgcccgcgggtcacgatgaccccgtagcgcgcaggatcgagctcttccagattgctaacgggctccggctcgccgagcacgtccacggaatagtcgaggaaggggagctcctcggggcgcacgggggcgaagcgcgggtcctcggtggccgccgccacgccgtttctgatgacttcctcggcgaggcttttgcgcaccggcgcgatggtgccgatgcagccgcgcagctgcccgtgctcgtgtaagctcacgaaggcgccggcgcgccggccggtgagctcttcgggtgcgtcggcgggaagggggaagacggtgccctgcgcgacgatggactccacgctcgcccgggcaagggccacgatggggtcgtctccggggcgcggcggccacgccggcgaaccgccgggagccccgccgatctcgcgatcctcttcccgcacgatttcggacgccgcttcctcttcggtgctctcgggagcgttctcaatctcgaaggcggccacggcgtagcccacgccgaagggctcctcgtagcttaagagcacggaagcgaaaggctcgccggtcgcctctagggcgccggccatgatctggaaggagcgcagcccgcactcggcggcaccatcgcagagggcggcgtccaggccgaacaggccttccaaatccccatgggcgaaaagctcggtcacgatacgatcgaactcgggtccttccggggcgaacccgtaggggccgtcctccttcagcttgtgggacacgtccccgcttgcgacaagcacgcagcggcggttcaaggagcgggcggcctcggcaatggcccggcccaggaagcggtgatcggcctcggaaagccccgagagccccatgcgcaccacggccaccgagcccaggtcgacggtctcttccaagaaatggagcggcacgaaggtggcgtggtcgatgtcggccatggacgccggggcaccggccgagggaatgccccggcggtgcaggcgcgtggccacgtccttggcgaagggaaggtcggtgcgggtcgtcatgcgctcgcccggctgcccgaaggcggccagcgagccagtttcctccggcgtgtcggcgatgaagaacccgtcgcggtagagcggcgcgtggggcgacgtgatgacgataaggtcgggtcggtgggcggccacgcgtcgggcgacctcgcgataggcggcgatggtgtcggcgatggccgcctcctggccgcgcccgacggcgggcacgatgagcggcggatggggcacggcataggcggcgagcaaggccatggggtctcctttctttccgggcgggctggcgaacgcgggcgggcgagcagcgcgcgaacgctgaggcgcgaacgcttaagcggcgcgttcccttgccctcccgcgacgatgagcgctttcatccatgatggcctacccggtccgcgtttcccgccgaatcgccaaaccgtcacgcgatcgtggtcgttgccggacttcttgacttagagccgactccaatctttatcattctcctcatcaatgattgagaggagaattcatgaccgcatcctgcgacggcgtggcgaagctcggcttcggcgccatgcgcctgcccctgactgatcccgatgatgtgacggccatcgacatcgagcagctgaaggccatggtggacgagttcatcgccaagggcggcacctatgtggacaccgccttcgtctaccacgacggcgcctctgagacggctctgcgcgaggcgctcgtggagcgctacccgcgcaacgcctataccctggccacgaagtgcctggcctgggcctgcgccagcaaggaggaggcccaggcgtgcctgcccacctcccttgagcggctgggggtcgactacatcgactactacctgctgcacaacctgggcggcgcgcgcacggtcaagttcgacgagtacgacatgtggaactacgtggcgaaggcgaaggccgacgggctcgtgcgtcacgtcggcttctccatgcacgacggccccgaggcgctcgaggagattctgacggcgcaccccgaggtggacttcgtgcagctgcaggtgaactatctggattgggacgacccggtcacccagtcggcgcgctgcatggaagtggctgcggcccacggcaagccagtcatcatcatggaaccggtgcgtggcggacgtctggcgaatctgcccgagcgcggtgctgcggtgctcgccgccgctgatccggatgcgagccaggccagctgggcctaccgttactgcctcgatctgccgggcgtgctcacggtgctcgccggtgcctccacgctcgagcagatgcgggacaacatggccaccttccaaagccatacgccgctgacggatgaggagcgcagcgccatcgacggtgccatcgcagccctgcgcagcgtggacctcatcccgtgcacgaactgcggctactgcgtaaaggactgccccgagggcgtgaagatccccatcgccatgaacctgctgaacctggagcgcactaccgaggacgacgagttcgtcaagggcctctactcttggcaggccgccgaggagcccgcttcgaagtgcatccagtgcggcacctgcgaggccatgtgcccccagtccatcgacatcatcgaccacctcgccgaagccgtagagcatttcgaggggtagaggagcgtcttttagacgggagggccacagtggcggccctcccgtcgtttaccgcccaagcgaatggtgtccgaagctacgagcgcagcatcttccttcgtgcctgctttagccagtttttcttgaatgatccgaccccgccaaaaaacttgtcgtaggtagctccgttttccttggcggcatatttgacggcagcaagctcaatggtgcaaagatagtcggccacctgggccagtcggtattcagtcattgttgtgcgcttctttaccacggcctctttggaaagagtcgaataaatcgcctcatctaaagctttcttcactatggcctggccgttgtcatagtagagctttacatgatcgaagccttggaagtaggcgaggtgatccgctatcatctccgacgcatcacgcctcatgcgcgcagcaagtttctcaatgtttgggaactcgcttctcttgtagaggaaggtcttgtgctggatggggaggcgttgcactaggacgttgaaggagacgagtagttttttgcgctgggttaaccctaggttttcgtaatcgtcgtgaccattcaagagaggttctgaatggaaaggaatgttaggaagatctgcagcagctaaggtctgctcatagacctgaatcttgctggtgattctatcggattgctcatgtagtacgaaggtgagcaaatagtatcgggtagcaatacttttatcgccgctttcaacaacgaaaagtggtaattcgcgcattgtctttgttcccctaatataaaagttgccgggggataagcccccggcgcttggaggtagcgctatgtgcaccaccaagaaaagcttataccatgctttgagaatcctgacaagcactttttggctcctgttctcatgagctcgcaggggccgatattcttctgaaatgttcgagcctgacctagttcgtacatctccgaaattcagttggcaactgaggaaatcctccttcgtgtttctcataattagattcgctctatttgcttgcagaatggttttgttctcgaagaagaagggaatgccctaatgaaggagcagctaaatataacaatgctctgcgccgttttggcgttgagcggagcgtgtctcggagggtgcgggatgcagggtggattcgttggcgagccgtccgatactactgcgagccagatccctccgatggctgaagacgcagagggtgacaatgactctaaagctgaagaatcgcagacggccgcaccgttcaatcttgacggggttatcgagcagacggtgctgctcgacgatgacgcgctaactatcgtagcggaaaagctagagtatcgaaatgatatggcctaccttacgctttcgatcaccaacaacacggaaggggaactcgacgtcatgacctcgacgctgggctacagcgccaattacgtgaatggatgcatgatgacggcaggtcatctgagtgtgcagctcccagctggggaaacaacggaggaggagattggctattccctctgggaattgcagctgtacgggatgaagggcataggggcgcttggattaggtgttcgcgcggttaacgatgaattcgaagaggttttcaagggtattattgaagtggcgacatccctttacggagaggactcgattgattcaggcactttcgctggcttcctcgatagtcctgcttttgctcaaagacttggatacgatgtcgaagcggcttcgtcgatcgaccatagcctcggcgccgccggtcttgatgctctttcggccttcttgctcaccaatcaggaaggtgaaaaggctgttatggttgagctcacgaataatactgatgatgccctaatcgtacatgtgagtgatgtgtccattgatgggcgttggcttacgaagggccatggacggtagacacggttgctcctggaaagcgctttgtcatagacgatttgcttctgagctctatggtggaggacaaagccgatcggttcgatctgtccaaggtgggtaatgtgagtatgaccatttcgataaccgatgctaataggaacacgatcctagattcagccgaactgacggtctctttttagccgaagaagatattcttccgaagtgccacaatcaccacaactgctaaggctttgttctgggatctgacggcgaccgcgtgtggctgtggcgcatggcgcggtcgctcaggctcgcaccatgcgctataattccctctgccacaactgccgtcgatgatggcgcaacaactgaagagcaatatgcggcctggaaggcatctgctttcttctgggttgattgctctgttgcaacgccttggcagttgtggtgactgtggcggatgccttccagattgtcatctgcaaaggttcccgccgatcgcctgtcctgtgctgttcggaaaggggctccgttatgctggattccaagaaagttgccacaatcaataaggttctcgccaaaggaaagcttgtcgcgcttggcgctcttgtgggcattttactgggagtgggaggcacgattttctttcagaactgcaaccctcccgatgaagacaagggtgccgccgcaacggcggtcttcggtcgttttgtggagcagaccgagctcgtggggatatcccaggattattgcatagtcgacaagtatcccgacgtggagacttttttcgaccttttcgaccttccctggacggctaatagcgtatggtatcgctatgcgggcacgttgaaagcgggtgtgaacatggacacagctgaaatgtggcccgatggcacagtcgtccacgtgacgctcgatcagccgtacatcatctccaatacgcctaacatggatatttccggtgtgttagaagagaacaacaacattctcaatcccattcatgtggaggatgtcgatgagattcaccgcgaatgcatccgcatcagtgaagagaacgcggttgaaggagggttgctcgaagaggcccggattcaagcggaaagcgacattaccacgcttttcaagtcagcgctaggcgatgagtataatgtcgtattcgactggcgtgcggcataaggagggcgttacgcaagaagggcccatgatcgaagaacgcttgacagaggacttgctggcgcggttgcttgcggcaccgaaccctgatagctatcttggcgaagggcttacgttgcagcgctcccttgccgactatctgcatgaactgctggcggctaaaggcttgaaacgggccgacgtgtatcgggcctcgggattgaattccacggttgtctacgatgcgttctcgggcaaaagccgactggggcgcgacaatgcgctcatggtggcgttcgggctgggctgctcgctgcgcgagacccagcggcttttgaagttggccggtgcggccgagctgtatcctaaggtgcgtcgcgatgctatcattatctggtgcattgatcgcggaatgtcgcgcgaggcctgcgacgacgagctgtggcgcttcggcgagaaaacgcttttgggcacgtgcccgctgcaataaggcgatgcgtaactggttggaagtcgagagagaaggacgaacatggcgatgggacctcgggaggggcgagtgctccacgccatgagcatcgatgacgcctatgaggtgcagcgggtgctttcttcgggctccggcggccgaaccgaagtcgtgaccatcgatggctttggtccctatttgcgcaagaagattccgtcgccgttggtcgatcgccgggtgtgggccgctttgtccgaatgcgtcggcttgcgtctgccgcatgtggttgcgacctatgaaacgcccgatgaatttgtcgttgtgtgcgacttcgtgccgggcgacacgctctacgaggttgtgagcgcgcaggggcgtctccccgtctccggggcggtgcgcattgcgcttgaagtgtgcgaggcagttgaggagctccatcgccgcggtattgcgcactgcgatatatcgccgcgaaacgttcttttggctgccgatggagcgcatctcatcgatctgggcatcgcgcggccttttggagccgagccctcttcggagactccgaaccttggaacccacgggtttgcggcgcccgagcagtatgggttcgcgccggtcgatgagcgcacggacgtttatgctgcagcgcggctgctgggattcatgcttacggggcttgagccgggggatgcctatcgggtggcactcgtggatgaatctgttgtgcctaccccgctgcgcgccgtaattgagcgcgggagcgcctttgagccgagcgctcgtttccagacgatacgggacttcgcctgtgccgtgcgagaaagcgcgaaaggtgctttctcgcacggtgcctctcaggcgcgagagccttcctgcgaggctgcggacacattcggggcagtcggggacgagggcgataactgctgtggctccgccgcgtcctcgggcatccgcgttcctgctaagaaacgacgaaccgcgtttgtcgcggcctcctgcatcgctgcaatccttattgttcttgctgtggcgatcggctacgccgccttgtcggatgtgttggcggaggtaggcgctgggcgcgatgggggctctgttcatcaagcgagggacgatcatgcgtcgagcagtgatgccctgcctgtcgatggggaagcccctgaggcggcagatagatcgtcgtcggacggattgcctccagcgggcttctcggaagaagaaatggtgttttccaaggaggatctcgttgtcgcagagtcctcgtggcgcatgtcgaacgggtgcatctcttacgtggttgccttgagaaacgagagcaaggacatggcggttgattatcctgccttcaatattgtgggacgagactccgaagggaagatcgtttcgtcggaggagcaggttcttcctaggcttaatcccggcgagacaatgtacttcgcgtctattgccggtacggggacggtgactccccattcggttgattttctaccgatcgcacctgatgactaccaggttcaccgggcccaatccgagagcgcggtgtttcgcgtggcggacgtttcggccacaaccgatgcgcttggcggaacggttttcgttggcgaagtgacctgggagggcggcgaaagagacgaagacgccgcaggtgacgctctcgtgatggtagctctgagggatggtgcgggaaaactgattggcgggacgatggcgctcgcaagctgtcccgagcgcggtgttccggcgggtttccaaacgttgggagaagagatgccggattatgcgagttttgaggcatatgcttacgcatggtagcggtcgtctttgctcgaggctgcttctcccaagtagtggttctgtttcctagatcaccgcgcctacgaaggcggccaggatggggatgctcgctatagccagcacggtggtgacgaaggttccctgggccatgacgcgggagttgccgccatactggtagcagagcatggtgccgttggtggccacgggcattcccgccagcaccacggccaccgagaacatgagtcccgccggcacgaatgcgtggaagacggcccagatgatggccggcatcacgagcagacggaacaccgagcaggtccaaagacgcgggccgccgatgaggtcgtgcaccggcaggttcgccagcgacgagccgatgatgagcagcgccgccggcgtggtgatggagccgagcgtgctcagcgcatcccccagaattggcgcgtagtggatgccgcctagcgtgagaagtacggccgccacgcatgacagcatgaccggtgtgacgaaggtgcgccaggtggtttgaaccttcacgtcgccgtcggtgtcctgggtgagaaaccacgcgcccacggtgaatacgaagaagttgaagggcaggttgaacacggcggcgtacacgagggcgtcggggccgaagacggccgagagcaccggatacccgatgaacccgacgttgccgaagcagagcatgaaccggtacacgccccgatgtccgtcggggatgcgcataagcagcgtgaaggcgtaggccacggcgaacatgacgaggttgctcgccacggaaagtcccaggcacagccacacttctgtccgcgtgggcagctcggtggcggtgagcaccgagcctaagatcatgcccggcagcgcgatgttgatgaccagcttcgacagcatacggtcgaactcgtcgttcatgaagcgcagcttcttcgcggcgtagcccacccccacgatgacgaacaacgtgacgatctcctgaaatatgccgatcatgcccgcggtcatggggcgaagctctctttctccgattgcggaacgctcgctcgatcctttgcgaccctcgtcggtcttctcgagcaatttgcaggacagattgtggcaaaaaaatcgagttgttagactttcaagggtgcggcaaatggatttatggaacgatttgggtctcttcaggcatcggatgcggcttctttcagtgttttcggcgctactggcaggtgctgaatgaatcgaaatgtctaacaactcgaaattcttgcccaaatttggacttccgattgtctcgcaggcgagggcgaggatgtcgcgacgcgcattgcggttccgacatcgcgtcctcgcgttgtagaggctacgggttttctggaaagcgcgcgacgatgcggctcgttggcgtatactggccagcgctgcgttagcttcgtcgaaaggatgagcccgtgttcaccatcggttgccatttgtccagcgccaaggggtatctgaagatggcccaggatgcggcctccatcgacgggaacacgttccaattcttcacgcgcaatccgcgcggcggcaaggccaaggccatcgatccggccgatgtagccgcatttcacaagttcgctgccgcccacggcatcacgacgtttctggcccatgcgccctacaccatgaacccggcagcggccaagcccgagacgcgacagttcgccatcgagctcttaaccgacgacctcatgcgtatggaaaacacccccggccagctgtacaacatgcatccgggctgccatgtgggccagggcgccgagacgggcatcgtgctcatcgccgacgcgctgaaccaagtgctcgcgccggaacagtccaccacgctgctgttggaaaccatggccgggaagggcacggaagtcggcggccgtttcgaggagctggccgccatcatcgacgctgtggaactggacgagaaggtgggcgtgtgcctggacacctgccacgtgtgggacggcggctacgacatcgccggcgacttggacggcgtgctggaggagttcgaccgcgtcatcgggctcgaccgtttgcgcgccatccacttgaacgactcgaagaacccgctcggcgcccacaaggaccgccacgcccccatcggcgagggctgcatcggctttgatgcgctcgccgctgtgacgaaccacccggccctgcgcgatctgcccttcttcttggaaacgccccaggacgacctttccggctggggccgcgaaatcgccgccctgcgggcagcgcatgccgagtaactgccgcgttaaatcacgaagaagtacacgctaaagaactgcaggcagctggcggccagcacgaacaggtgaaaaaccgagtgcatgtaacgcacctttttgaagatgtagaacacggcgcccacggtatagctgatgccgccggcaactaagagccagaagcctgcgggggccagctcggcgaacagcgtcgggatgaagaacacgatggaccagccgagcgccacgtaaagcacggccgatatccaacggggacggtaggtccagaaggcttcaaaggcgatgccgacaagtgagacggcccagacgaaggcggcgagccagacgccgcccacatgtcccaaggtgatgaggcagtaaggggtgtaggtaccggcgatgagcaggtagatgccggaatggtcgagcactttgaacacgcgtttggcgcgttctgctgccagcgcgtggtacagcgtggacatgaggtactccagcagttgcgcgatgccgtagacgagggccgccgccaataggatgccgccgccatctgacaccgacttcacgatgagaagcacgagggccgccacggccaggcccgcccctacgccatgggtgacggcgttgaagatctcctcgcccaaggtgtactcgcggacgggctttttgccggagcgcttgatgagctcgcgaatttccggcgacaccttggccgccgccgcagcggcgttgggggagagctcggggtgggctagacgaatgttgggcacgacgtcctccttcgcgtgcgggtagatcaccgcatcatagaccattggttcggcttccccgacgacggtgggcaaaccgtaggagaaaggcaaatcgcagcaatacgtcgcgataggggtctcgattgctttggaagtgacgggtagcgtagtccttgctgctgccagatggtcgagtggggggtagttttcccaggtcattttctggctaagagccttctcgcgattttaaaactacgctacccgtcattttccaagccaacggagtgaagcggctcaccgctgctcgcgcagggccttcaagatggcgcgctttttggcctgcttgtcggcgtaggcctgcttctcggcgcgggtgcgggcgcgctcggcttcggcggcagcgcgctcgtcggcgtgggctgcaagctccgcttcgcgggcggctcgtcgggcggcgcggcgttcttcgcgctcggcggcggcctcggcgtcggagaagcggcagccgcagtagttctggcggtacatgccgccctcgcgcgagcgccgggtggcttcgtcgtagaaggggcggtagtcggcgaagtgggccttgatgccctcgcgggaacaggcgcgctctagttcctctcggatgatgcgggtgtactggtaggggctcaccgaaagcgtggtgccgagagcggcgaagccgtgctcgcgggcgtagcgcgcggcctcttcgaagcgcaggcggtagcaagctcggcagcgggcctcgcgcgcccgacgcgctgccgtacgcccttccgtaggggcggtgcttgcgtccgcatacccttccgtagaggcggtgcttgcgccgccctcatcgagtacggttgactcgcttgatgaggggcgaccgaggtcgccccctacggagtttgtcccggagggagtttcaccttcgaggtcgccttcctcgtccgtaatcactccatacttggcttcggcggcgttgcctatgcggccgacggtggcctcccacttgtcggggtcgtaggcgccttccacgacttccaaatcagcgtccgcggcccattcgcgcagggtggccagccggcgcgcgtattcctcggcggggtggatgttcgagttcgcgtagaacacgacgggatcgacgccctccgagcgcaaaatgcggaccggctccaaagagcacggtccgcagcaggcgtgtagaagaagcctgtcctcgttctcgggcgcaggctgcatagctgaatcggttttcgtggtctctgtcatgacgcccatgctagcacattgtcgcctggcaatgtgccggtgaaaaaaacgagccgcccgcaaaaggcgactcgtctataacgatatgctgcgaggcctacttgccggccagggggctcggcacggtgtagacgcgggcggcgcaggcctggtcgaggtcgtacaggcccttcgggtcgcctccgaacaacttcatgttggtgatcatggtgtcggcgttgtcctcttcctccagctgctcgtcgatgaaccagccgaggaacttctgggcgcggtagtcgtgggcctcgagcgcggcggcatagatgtcgttgatgagtgaggtcacgtacttctcgtgctccatggcggcctcgagcggctccaggaagttcgcgaaggtcttgtcgggcatgtcgatggccagaagcttcacagcctcgccgttctcgtgcaggtagttgcggaagatcatcgcgtgatcgcgctcttcctgagcctggatctcgaagtagttggcgtagcccgacaggccctcctcctcatagtagtcggcgaaggagaggtacaggtaggcggagtacagctccttgttgatctggtcgttgatgagctcgtagaccttggcgtccatagttgtcctttctcgttggtcggcgcgatgccgtctggcgcaacggggcgttgagcgtggggcccgcatccgcgcagccggcggggaacgccgacgcttcttggtgaaccgcatgacaggataccgcgaaaccgcttaatcttcgtggcaaatctatgcaaataacccgcttttaacgaaagcgccagacggcgcgcaccgccgcaccttcataatggctcccgagaattgaaggaagggaacgcgcgcatgctgcagcttaagaatatctgcaagtcctacacgacgggcgacttcacccaggtggccctaaacgacgtctccatctcgttccgcgacaacgaattcgtggcgattctggggccgtcgggctcgggcaagacgacgcttttgaacgtgatgggaggtcttgaccactacgactccggcgacatgatcgtcgacggcatttccacccaccgctacaaggaccgcgattgggacactttccgcaacaaccgcatcgggttcgtgttccagagctacaacctcatcccgcaccagaccatcctgcagaacgtggagctggcgctgacgctctcgggcgtggggaaggccgagcgcacccgccgcgccaaggaagccctggcgtcggtcgggctgtccgagcacttgaacaagaagccgagccagctctcgggcggccagatgcagcgcgtcgccatcgcccgcgcgctcatcaacgacccggagatcgtgctggccgacgagcccaccggcgcgcttgactcccacacctcggtgcagatcatggacctgctcacgcagatcgccaaggaccgtctggtcataatggtcacccacaacccggagctggcggccgagtacgccacgcgcacggtgaacctcgccgacggcgtcatccgctcggacaccgacccctatttccccacggaagcggaaatgcacgcctcgcgcaagcccatccgcaagacctcgatgagctttctcacggcgctcgcgctgtcggcgaacaaccttctgaccaagaagggccgcaccatcatgacggcgttcgccggctccatcggcatcatcggcatcgcggccatcctggcgctcgccaacggcgtggacaactacatcgagcgtaccgaggaagacacgctgtcggtgtatccgctgcagatcatgtccaccggtttcgacatgacggcgctcatgggcatggccgtcgatggcggaacgggcgacgggggagacgcgacgggcgagggcgccggcgacgacccgcttgcggaaatgggccttcaaggcggcaagagcggggacgagaacgacccggccgccgatggcaaggtgcccgagacacgcatggtcaccgacatgttcgcgagcctggagaacaacgacctcgcctcgctcaagctgttcttcgacgagaacggcggcgacatcaacagctacgtgaactccatcgagtactcctacaacgtggtgccccagatcttcgacggcaacaccgaggacggggtgcgccagatcaacccggacacgacgttctccgccttcggtatgggctccggttcgtccaacgcgctcatgtcgtccatgtactccaccgatgtgttcagcgagatgatgggcaacaccgccattgtggaagagcagtacgacgtgaaggcgggccggtggccttccgcctacaacgagtgcgtcgtggtgctgaccgcgaacggcacggtgcccgatctggtgagttacgccctgggcctgcgcgatcacgcggtgctcgaggacatgatcgaccagttcatgaacgaggaggacgtggaaagccccgacgacaacctcacgttcacctacgacgagatcatgggcgtgtcgctgaagatggtgcccgccgccgacttctacacctacgacgaggagaacaaggtttgggtcgacaaaaccggcgacgaggagtacatgaaggggctcgtggacgccggcgaggagctgaaaatcgtcggcatcgtgcagccgcggccggacgcgaaagccacggcgctttccatgggcatctactacacgcccgagctgacgcgccatctgatcgagcaggcctccgaggccgccatcgtgcaggagcaactgaattacccgaccatcgacgtgttcaacggcaaggagttcaccgaggaggaggaatcgggctcggatttctctatggagaacctgttcagcatcgacgagggggcgctgcagaacgccttcaagttcgatgagtcgaagctgaacatggacacgagtgcgctgggcgaggggatgtcggcgagcgatctgccggcgatgcccgggcttgatgcaagcgcgttgaatctggacatgacctccgccttcaacagcgacgccatgggcgagatgatgggcgcggcgctggccggctacacccaggcccttggcgtcgcctatgcccaggccgcggcgtcgggcacgccgccggacttccagacgctggcgcagtcgacgctggagtcctacgcccaaagccccgagctgcaggccattatggggcagtacgcggcgcagatcgtcgacgccaacgccctgcagaaggagatggcgacgaagatctccgcagccctggagtcttccatgaaagcctacatggagcaggtcatggccacgatcaccgccaagacccaggcctcggtgcagaaggtgatgggcgacatggcggcgagcattcctttggccatgtccgtggataccggcgctttccagaacgccttccagatgaagatgaccgaagaggagctgaccgagctcatcatgtcgctcatgacgaacgggacacggtccttcgacgcgaacctgagcaagttgggttacgcggagctttcgaagccctcgcagatcgacatctacccggacaacttcgaggacaaacagcaggtcatcgccattctggacgactacaacgaccgcatggtggcctcggggcaggacgacaagaaagtttcctacacggatttcgtgggcacgctcatgaaatcggtcacgacgatcgtggacatgatcagctacgtgctcatcgcgttcgtggccatttcgctcgtggtgtcgtccatcatgatcggcatcatcacctacatctcggtgctcgagcgcaagaaggagatcggcatcctgcgcgccatcggcgcgagcaagggcgacatctcgcgggtgttcaacgccgagaccatcatcgagggcctgacggcgggccttatcggcgtgggggtcgtggcgcttgtgtgcattccggtcaacgccattgtgtacgggcttttggacgtgcccgacatcgccatgctgccgccggtggccggagcgatcctcgtggccatcagcgtgttcctgtcgtttgttgccggcctgttccccgcgatggccgccgcccgcaaagacccggttgaggcgctgcgcagcgaatagttacgcgtcgttgccgatgaggccgttgacgagggcggacaccagcgagatgacgatggaggccacaaaggcgctgccgaagctggcgatgtagaagccggcgccgaacagcccgttggcgagccacgcggcgatgtagagcaaaagcgtgttcacgacgaggtagaagatgcccagggtgagcacggtcacaggcagcgagaggatctgcagaatcggcttgatggacatgttgatgagcgacagaatgagtgcgaagaacacgatgcccacccaggatgcgctgttgctcaagatctcgatgcccggcacgagccacacggcggcggcgacggagatggcggtgacgatccagcgaatgatgaagttcataagtgcctccttttcctgtggccccattatgtcaaaatgaggccatgacgagaaaacatgacaacaacccgaaacgcaccagtaaccgccccgctaaacccaagacgagccgggccaacccgccgcgccctaaacgcttcggggccgatcccgtagggggcgaccttggtcgccccttgtcccagaccaccaaggctgcgggaaagggctcggcgtgcgccctctgtcccgccttcgggcgctgcggcggctgcagccggcttgatgtctcctatgcggatcagctgcttgcgaaggagcagcaggtggccgctcttttcgaaggcatcgcccccgctggcgccttgctgcccatcctgggaatggacgaccctttccactaccgcaacaaggtgatctccccttacgccccggccaagggcgcaaagcgcaaggggaaagatgccaagctcactcgcgccgatatccttacgggcatgtacgagaccggcacccaccggctcatccccaccgatacctgcgccattgaaaacgagacggccaagaaggtgacgctcgccatccgcgacatcatggcccgctggggcatggagccctacaacgaggacacgggcgcgggcttcgtgcgccacgccgtggtgcgcgtggggcacaagagcggggaagtgctcgtcaccgtggtgaccaacggcgaggagcttcccgcatcgaaggccttctgccgcgagcttgcgcgccgcgtgcccgaggtgaccaccatcgtgcagaacgtgaacacgcgccagaccaatgtcatcttgggtgagaaggagcgggtgctgttcggccccggtttcattctcgacacgctgtgcgggctcacgttccgtatttcgtcgcagtcgttctaccaggtgaacgccacgcagaccgaggtgctctacaacgaggccatccgcttggcgaaccttacgggtgccgagacggtcatcgacgcctattgcggcacgggcaccatcgggctggtggctgcgaggcgcggggcggcccgcgttatcggcgtcgattccgtgccgtcggccattcgcgacgccgccaacaacgcccgtcacaacggtgtggaaaacgccgagttcgtgacgcaggacgctaccgcgttcatgaaggagttggaggcgtcggaagagcgcccgcagcccctcgttctgctcatggatccgccgcgggccggctctgcgccggagttcctcgaggccgcgacatcgcttgcccccgagcgcatcgtctacatctcgtgcaaccctgcgacccaggctcgcgacgtgcgccagctggtggaaagcggctacgaggtgcgcgccgtccgtcccgtggacatgttcccccacaccgaccatgtggaatccatcgtcctgctggagaagagaaatgactgacgtacttgaaaaggcccgcgccaccattgcggcccacgacctggcagcccccgatgccgccgtgctgctcatggtgtccggcggctccgactccacggcgctggcgtatttgggtgccgccctgcgcgaggcgggcgatgtggggccggtggccatgctgcacgtgaaccaccagctgcgcggcgaggacgccgatgccgacgagcgcttcgtggcggctttggccgaggcgctggacatcccgctgttcatctgctccatcgacatcgccgccgaggccgagcgcagccgcgagaacgtggaagccgtggcccggcgcgagcgctatctggccgccaacgaggccctgcgctcgatgtgccagcacgagggacggcccctttcggaggcgcgcatcttcacggcccacaccgccgacgaccgcatcgagaacttctacatgcgctccatcgtgggcaccggccccggcggtttccgcagcatgctctaccgcaacggaccggtggtgcgcccgctgctcgacgtcacgcgcgacgagctgcgcgactaccttgccgcccgggaggcggcgggggagacggtggttcgcgacgggtccggcgcgctctggcgcgaggacgccaccaacgcccataccgatcgcttccgcgcctacgtgcgccacaagatcgtgccggcggccaaggaatggaacagcgcgctgcccgaggtgctgacccgctcgatgaacctcatcgccgatgaggacgacatgctgtgcggcatggccgagaagctggcggaagaatcggcggaatgggtggccgaggacgacaccttcggtatcgaccgctccgagggcttccggctgctgccggctttcgggaaggcggagcgtcccttgcagcgccgcgcggtgctgcgccttctggaggccatgctcggcccggatgcacgggtggaggccgctagcgtggaagctgtgctcgctggcttcgcgaacggcgcgcccaacagcggatacgtggccaatattcagtatgatctggccgtgagcgcgaacaagcggggcgtcctcgtggagcccatggcctatttccgagcccgcagaaaacgcacgtccgattaagcatgcaggcgagttgcgttgcgggattgagtcgtaggggctgaccttggtcagccctctcaacaaaggcagttgatgaatgccgaaaagcgcaggaaaggaagcttcatgaacgaagatcagctcaacgacgaagtcgctgcaaaggtggctgccgatgaaatgcgccaggccgtggccgaggaggccgccccccaggcgcccgctttcgaggtgattctcgcttccaacagcccgcgccgtcgcgacttgcttaccgaggccggcgtgaacttcaccgtgcgtacgcccgtgacgcctgtggacgagtctctggagcccgatttggccgccaatccggaagaggccgccaagaagctcgccgagcgcaaggccggcgcggtcattcaggaggtactgtctgagaattacacggggatgcttatcgtcatcggtgccgataccatggtcgtgctcgatggcaagatcttcggcaagccccgtagcgcctcagacggcaagcacatgctgcgttcgttgtccggccgcacccacgaggtcatcacggccgtgtccgtctggatggtggccgctcccaacgccgaggacgtgtctttgggcttccgcaccttcgccgacataagccgcgtgaccttccgcgacctgaccgacgaggagatcaccgactacctgcgcaagggcgagtccttcgacaaggccggtgcctacgccatccaaggcgagggggcgtcgctggtggatcactacgacggctccctcgacactatcatcggcctgccagcgacgcgcctcatcaaggaattccccgacctcgtgaacgccgaggccgcagaatgctaagcgatcagttttggctgagtcttgcggttgcgtgatgccgggctctggcatgccgccagtatcgatgcggcccttggcggctcgatgacaattagcgcacataatttgtggcgttgctgtcttacggctgttcgggaaaaggtctttggtaaactggactgcgattaaagagcgctgcggcgtttgcgcgaggagcgcgcgctgcgggcaaagagaaagtggttcacgtgcataacgacatctcagagatacttttctccgagcaggacctggcgatacgcgtgcgcgagctgggcgaggccatcacccgcgactatgccgacgttgccggggatgcgggcattgtggtcgtgtccatcctgcgcggcggggcggtgttcacctgcgacctcatccgcgccatcgatctgccgctggaagtggatttcatggccgtgtcctcctacggcaacggcgcgaagagctccggtgtggtgcgcatcctgaaggatctcagcaccgatatccggggacgccacgtcgtcatcgccgaggatatcatcgattcagggctcacgctgaagtacctcctgaagaacctgcagtcccgcgagccggcgtcgcttacggtggcggcgctcatgcgcaaggacacgtcggcccaggccgacatcccgtgccgctatatcggcttcgagtgccccgacgagttcatcgtcggttacggcctcgactttgccgagcattaccgcaacctcccctacatcggcgttctgaagcccgagatctaccagtaaaggcagcaatcaactatggcagacaacaatcccaagaaaccaatcccgccggcgtcgacccagcgcaccacgatggtcatggtcatcatcctcttggccgtggcatttttcgtgggcagccagttcatgcgcaccggcgccatgggcaccaccgtgaccgatcagctcattacctccgagttcacccaagcggtggagcagggccgcgtgaagtcggtcacctactccgccggcgactacacggtgtcgggcacctacttcccggcggccaccgccggctccgaggccgccgccgccttcaacggggccttcgattccctgaacgccctcatggcgaccgagcacggcgatgacggcaaggcgctcggcggcgtggccaccacgacgctcgatccggccacgctgggcaaagagcacaattacacctccacctatgtgggctccgattcgctcggcgagcttctggcggctcaccccgacatctcctatcaggtgacgttgccgagtcccttcctggaggttctggccacgcttctgcccattctcatcatcggcggccttctgatgttcttcttttacaagatgcagcaggccaacaattcccagatgagcttcgggaagaacaaggcgaagaagactctggaggagcgccccgatgtgacgtttgccgatgtggccggcgtcgatgaggccgtggaggagatgcaggagatcaaggactttctggccaatcccgccaagtaccagtccatgggtgcgaagattccgcgaggctgcctgctcgtgggccctccgggcaccggcaaaaccctgctcgcgcgcgccgtggccggcgaggcgggcgtgccgttcttcagcatctcgggctcggacttcgtcgagatgttcgtgggcgtgggcgcgagccgcgtgcgcgatctgttcaaggatgcgaaagaggcttcccccgccatcatcttcatcgacgagattgacgcggtggggcgccagcgcggcacgggccttggcggcggtcacgacgagcgcgagcagaccttgaaccagctgctcgtggaaatggacggcttcgagtccaacgactccgtggtgctcatcgcggccacgaaccgcgccgacgtgctcgatccggcgcttctgcgtcccggccgcttcgaccgccaaatcgtcgtggacacccccgacgtgaagggccgccagcgcatcctggaggtgcattccaaggacaagcccatcgggtcggatgtcgatctggcgaagatcgcgaagatcaccccgggcttcaccggcgccgatctggcgaacctcatgaacgaatcggccctgctcacggcgcggcgcggcaagaagatcatcaccatgcgcgaggtgagcgagtcgatggagcgcgtcatcgccggcccggagcgtaagggccgtgtgatgaacgagaagaccaagcataccatcgcctaccacgagagcgggcacgcgctcgtgggccatttgctcgaccatgccgatccggtgcacaagatctcgatcatctcgcgcggccgagcgctgggctacaccctttccattcccgacgaggacaaggttttgaactcgctttccgagatgaaagacgagctggcggtgttcatgggaggccgcgtggccgaggagctcttctgcgacgatatcaccaccggcgcctccaacgaccttgagcgcgcaagcaagatggcccgcgccattgtcacccagtacggcatgagtcctctgggcactcaggtgttcggccagcccaaccacgaggtgttcttgggccgcgactatggcaacacccaggattactccgaggagacggcccgtcgcatcgatgaagaggtggccaagatcatgaaggaggcccatgaccgggcccatgcgattctgtcctcccatgccgatcagatggacctcatggccagcgtgctgctcgagcgcgagaccgtggaaggcgaggcctgcgaggcgctgctcgacaacaagtgggatgagtacttggcgcgcgaggacgacatcatcgccgccaaggaggcggaagaggccgcggcccgcgccaaggacgccgagcttttggcggcccaaggcgagggcgatggcgcgagcgacgcgccgggcgcgccgggtgctgcgccggccgatcccgatgccggcgagacgctggccgacccgaactggcgaaacgagccggtagagccgggcgaccaggatccgaatgcccccttccgcacgcctgccgagcacgccgaccgcgccgatgcacccacccaagccgaggtgaacgccgagatcgaccgcgaggacgacatggattcctccgccgacgcccctgatccgaacaagaaggattgagcgaggacgctgcgcttggacgcgatcctcgattgccaacatacataaccttcgtaggggctgaccttggtcagccctttctgcaacggcaaccatgcctgtagcaaggggcgaccaaggtcgtccccctacggaagaggccgcgcttgcgacaaagggcgaccaaggtcgcccccctgcggaagctgatatgacgccttcgggcgctctttttcgtgcatgcgcctaaacttgaagcccgctctaagagatattacggtacactcatctgaaaaccagtgtacacgggctttttgcgccgttacacttatcggttgagaatctaagggaggaaacgccgaggaagacgaggcttcagcattcatgatttggcattgcggacaatacgacttcgacaccagcacgcccatcatcatgggcattttgaacgtgacccccgattccttctccgacggcggtgcttatctcgatccgaaggcagctgtggcccacggtctggaaatggtgcgcgccggtgccgccattgtggatgtgggcggcgagtcgacgcgtccgggcgccacgccggtcacgcccgatgaggagtgggatcgcatcggcgaggtcgtggcggccctggtggaggccggcatctgcgtgtcggtggatacgcgccatgccgaggtggccgtccgcgccctgcatgccggcgcttccatcgtcaacgacgtgtcgggttttcgcgatcccgccatgcgcgaggcggtgcgccgctgcggctgcggctgcgtggtcatgcacatgaagggcgagcccgctaccatgcaggacaaccccgtttaccaggacgtggtggccgaagtgcgcgattacctgcgcgatgcggccgccgctttggaggcggccggcatcgaccgctcccgcatctgcgtcgatccgggccctggctttggcaagacgcccaagcaaaccatcgagctcatgcgcaatctccacgagatcgtccacctgggctatccggtcatggtggcggtctcgcgcaagcgcttcgtgggcgaggcctaccatgtggaagagcttcacgaccgcgatgtggcctccgcggctgaggcattgctcgcctgcgagctgggcgccagcgtggtgcgcacccataacgtagagatgacggctgcggcgttgaaggatctgaggccggcggtgcttctgggactgggctccaatgtggcgctcgtggccgagcccggcgaggagaccgaggccaaaatcgcccagctgaacctcgccgtgggtcagttgtgcagcctgcccgacacccagatcatggacatgtcgtcgttctacgagagcgagccggcctactacgaggatcaggataccttcgtgaacgccgtggtgcttctgcgcagcggccttccgccgaaagagctgctcggctacttgcacggcatcgagaactccctcggtcgcgtgcgaactatcgagaacggcccgcgcacgctcgatatcgatattctcgactatcagatgtacgtcgcttccgacgacgagctcacgcttccgcacccgcgtgtgacggagcgcgatttcgttgtgaagcccctgctggaaattctgcctgactgggagttggcggacggaacccccgtggggcgcgtgcccgaggcgcagcgcgttgggaaggcaaggaggatctagccatgaagctgaccgtgctcgatgaggtggcctccaccaacgaggtcgtgaagaacgcgttgcgcgagggcaaggccgagggtctcattgttcgcgcccgacgccagtccagcggctatggccgccagggtcgcgaatgggacagcccggagggcggcctgtacatgtccatcctcttgcgtcccgatgtggccggcagcggcttggctaccttgagcctggtggtggggctttcggtccagcgcgccttaggccaggtggcggcgccgcagttcgaggacggcatccaagtgaagtggcccaacgacgtgatttatatgcccgccgactgcgagcgcgccgacgagtaccgcaagctctgcggcatctcgctggaggcctgcgggggcggcgtgtgcgtgggcatcggcatcaacgtgttccgccccgaggtcgaccgtcccgtcctgggtcgcaacgtccccgagtatatggccgagctcatgccggcccccgaatccgagccggggcacttcgtgtcgctggcccaggccatcgcggcgctgccggagcgcgagcaggccgcccgccgcgaggaggtcatcaccgacatccagcgcgaggtcatcgcgcgcatcctcgtgaattacggccgctggcgcgagctcggcttcatgccgacgctgggcagctacgaaggctcctccttccttaccggtcgcgcggtgcgcatcgaggatgccgccggcaccgctactttggaaggcacggccaccggtgtcgacgagcgcggtcgcctcctcgtccgcaccgccgacgaaaccgtccccgtcgcctccggcgaggcccacgtcatggtgatgccgtaagggctacaatagcgccgaagagaagaaaggcgcgaaggcatgagtgacgagaagaagcttgacggggaattgaaagagggcgcagctgcgcggggcgagcgcgagcttggcgagaacgcgcaagcagtcggagacccgcgcggggagcggttgcgcgcctcgtcggcgggtgacgacaaggtgctgcggatgggaacggcctctattccgcggctcatcacggagttcgccatcccgtcggtggtgggcatgctcatcaacggctcctacgccatcatcgactcggtgtttctggggcacgcggtgggggagatcggcctttcggccatgacggtggccaatcccatcatgatcgtgttcatggccattgccatgctcatcggcaacggcggcaacgcgctggcggccctgcgcttgggcgagggcaagcgggaagatgccgagcgcgccttgggcaacgtggtgtccttgagtctcatcgcggccgtcatcgtgctcatcatcgggtggaatccggcgctcgtctcctgggtgctcgatttggcgagcgccacgccggaggtgcgccccttcgctcagacgttcatccagatcctctgcgccggcttcatcctgcagtgcatcggtcttggcgtgaacaacttcatccgcacctgcggcgccccgaaccgggccctcggcaccatggtcatcggacttgtgggctcggtggccttcaacgcgctgttcgtgctggcgctcggttggggcgtggcgggcagtgccctggccacggtgctcgggtgggcctgctcgtgcttggcggtgctgcagtacttctgcctgcgcagcgacgtgcccatgcggttgcgtctttcggctatgcgcccgagctttcccatggaccgcaccgtcctcgccttcggtctgccgagtttctgcgtgcaggcgggcatggccatcgtgaacttcgtcatcaacttccagctggtgcgctacggggcggcaacgcccatcggcgctgacgacgcgctggcggccatcggcgtggtgcagcgcatcgggcagttctcggtcatgccgctcatcggcatcgccatcgccctgcagccgctgctcgggttcaactacggcgcccacaacgtcgagcgcgtgcgcaagacgctgtggtacggcatcggagcggcttcgtccatctcgctgctcatgttcgtcatcgtcgaggtgttcgccgtgcccatcgcccacgctttcggcatctcccacgatggcctcgtggacttcacggccttcgccatccgcgtgcagttcctcatgctgcccttcgtgggcttccagattgtcagctcgaactacttccaggccacaggccagccggctaagtcggtgttcctcacgctgacgcggcagattttgttcctcgtgcctttgctgtacctgatgcccgtggtgctgcctcagctgtttccgcagttcacagggctggacgcgctgtacttcgcggcaccggtggcggactttctctccatcttcaccacggccgtctttgtggcgtgggagatggcgcgtctgcgccggctctcagcgatgtacgcataggcttcataggttttatgcacttgcacaaaaacagcgaataggcgacccgctagccgctcggagcgcgtcgagggggttgcggactcgtttcggcacctactatggactccttcgaacggaaggagagacctatggaatcaacggaaacgcgcagtatgccggctcagcggacgcggtcggtggcttttgtcgggctgaccatcgccattatagccgtgtcggcctgggtggtggtgcccatcggccccattcccttcacgttgcagatgttcgccatcaccttcgccatcgtggtgctcagccccaaggaggccatcgcggctatcacgggctatctgctgctgggcgcggtgggggtgcccgtgttctcggggatgcgcggtggcatcggtgttttggccggtcccacgggcggctttctgtgggggtacctgttcggcgtggcggcggccgtgctgttcctgtatgcggtgcgcacgaaactcggggtggccggcggcaagaatgcgccgcggcttacccgcgcggagaaggcggctctgacgagggcccagcgcgcgggcgccttcctgcgcagcttcggcgtggagatcgtcgccggcgtcatcttcacggccatcgcttacgcgtgcgggtgcgcccagtacatggtggtgggccaggttgatctggccacggcgtttctcgtggccgtggcgccgtttgtggtggtggatttctgcaagatcgtggcggcggtcatctgcgccgacgccgtccgcgcagccgtgcggtaggcgtctcgctgccgctaaatcctcgagcaaatgccagttaggccccgaaatggtcggccgcgcgttgccataacggggcctaactggcatttgcttgccatttcaccccttaactggcatcgcagcacgccataacggggccgaactggcatttacccctagaaaatcgaaaaacggtcggtggaaacccgtcgctaagaggaaaggctcccgttcgggagcctttcctctatgggggctgatttctcgcgagtcggcttacgccttgaagcggtagccgtagccgcgtaccgtttccacgagggccgggtcgtagccggcggcatgaatcttgtcgcgcagacgcttgatgtgggtgtccaccgtcttggtctcggtgaggtactcccagccccaggcgtcgcggagcagatcctcgcgggagaccaccttgccagcgttcttcatgagcgaggccagaagctcgaactcgcggggcgtcaggtcgatctcgccgtggtcgccggcggcggtgtgggcgtcctcgtccagcgtgatgcccgaggcggtgatggagttgctcgcgccggggaactcgccgccctgcccgcggcgcagaagcgcgcggacgcgggcgatcaactcgcgcacgccgaagggcttggcgagatagtcgtcgccgccgatttctaagccgacgactttgtccagctcggtgtcgcgggcggaaaggaacagcacgggggccgtggtcttcgagcgcagccggcggcacagctcgtagccgtccatgcccggcagcataatgtccaagataaacagatcatagttgttggcgcttgccaacgcgaaggcgtcctcgccgttgtcgacgacgtcggtctcgtagccctcctttttcaacgcgtagctgacgaattcggtgatggaaggctcgtcgtcaacgacaaggatgcggctcggtgtctctatcatggtcttgcctttctctcgtcatatcgacgaatgcccgtcgggggcatatcgttgagacattgctataatctcttacgcgttaactatacgcaaacaagggcgtttcactggaaaactgaggaagattgtcataattatgttacttgccattgacatcggtaacacccataccgtaattggggtgtacgctggggattcgctgcgcgcgatgtggagaatcgccaccaatcggaaggcggcggccgacgagctgcgcatcgtcttctccacgttgttctccctcgaggaacttgacctgcgccaagtgcgcgcctcggcggtcgcctcggtggtgccccaactgacccgtgcgtggatgcaggcgatcaaggatgccaccggcgcgctctcgctggtgtgcaacgccgagacggccgccgggctcttcgacgccgattaccccaatccccgcgagatcggcgccgaccgggtggccgacgcggtggcggcccgggcgctttacggggcgccggtggtggtggtcgacttcggaacggccacgaacatcgaggtcatcgatcgcgaaggccgcttccgcggcggggttatcgcgccgggcgtgcagacctcggccaacgcgctgttcacccatggcgcccagctgccggatatcgcgctggtggcgcccccggcggtcatcggcaccaacacggtggaggccatccagtcgggcatcatgctgggggaggccgaccgcgtggatggcctggtgcgccgcattttcgaccagttgggatactcggcgaaggtcatcgccacgggaggtctggcggcggtggtcgagcgctactcgagcaccatcgacgaggtgaataccgagctgaccctggagggcctgcgcctcatcgccgatcgcgcctaccggtaggggctgttgggcgcggatgccttcgggaatccccgcaatgaggggaagttgcgccctttggggatagaggggcgacggggcgcggccgcatcgctagaatgggagcgtcagcgtttggccggcaggacgattccttccgccggcgctgcgccatctatcgatgaggctgccaggtacgcctgcgcgccgcgacatgagaaagaagggcccgacgtgttgaccgacattgaaattgcccaggcgaccgaaccgaaacccattggcgagatcgctgccattgccggcgtcgacgagaagtacctcgagctgtacggaaactacaaggcgaaggtcgattacaacctgctgcgcgaggaggagcacgccccgggcaagctcatcctggtgaccgccatcaaccccacgccggccggagagggcaagaccaccacgacggtgggcctggccgatgcgctgtccctgcgcggcaagaacgtggtcgtggcgctgcgcgagccgtcgctggggccggtgttcggcatcaagggcggcgcggctggcggcggctacgcccaggtggttcctatggaggacatcaacctgcacttcaccggcgacttccacgccatcggagcggccaacaacctgctcgcggcgctgcttgatgcgcacatccagaacggcaacgagctcaacatcgacgtgcgcaagatcacgtggaagcgcgtggtcgacatgaacgaccgccagctgcgccacatcgtggacggcctgggcggcaaagcccacggcgtgccccgcgaggacggcttcgacatcaccgtggcctcggaagtcatggccatcttctgcctggccacctccatcaccgacctgaaggagcgcctgggccgcatcgtggtgggctacacctatgatgatgcgccggtcacggcccacgatctgaaggccgagggcgccatggccgcgcttctgaaggacgctctgaagccgaacctcgtgcagacgctcgagggcaccccggctttcgtgcacggcggcccgttcgccaacatcgcccacggctgcaactctatcatggccacgcgcatggccatggcgctcggcgactactgcgtgaccgaggccggcttcggcgctgatctgggcgcggagaagttcctcgacatcaagtgccgcctcgccggtcttaagcccgacgcggtggtggtcgtcgccacggtgcgcgcgctgaagaaccacggcggcgtggccaaggccgacctcgccgaggagaacctcgaggcgctggaggcgggcctgccgaacctgctgcagcacgtggagaacatcacgaacgtgtacaacctgccctgcgtggtggccatcaacgccttcccgaccgacacgaaggccgagctcgacctcgtggaggccaagtgccgcgagctgggcgtgaacgtggccctgtccgaggtctgggcgaagggcggcgagggcggtctggccctggctgacgaagtggtcgccctgtgcgagaacggcgatgaggccgggcgctcggctgatacgttcacgttctcctacgaggacgacctgtccatcgccgagaagatcgaggccatcgccaagcgcgtctaccatgccgacggcgtggtgttcgagccggccgcgcagaaggagatcgcgcaactggaggccttgggcttcggcaacatgcccgtgtgcgtggccaagacccagtactcgttctcggacgatgctaccaagttgggtgcgccccgcgacttcaccattacggtgcgccaggtgaaagtgtctgccggcgccggtttcgcggtggcgctcacgggctctatcatgaccatgccgggcctcggcaagacgccggccgcgcataagatcgatgtgatggaagacggcaccatcacggggctgttctagcatttacgtagttgtccgggctcggactcggcgcggaagtgccgtgctcaaacagcattgaagtgcaccatcggagttctgctccgggcatgctctatgcacttcaatgaactgcgcgcggcaccaccgcaccgagtccgagccctgctctttcggaaagaagggtttgcgtggtcgataccgagttcattgaggcgctggcttcgaaggcgccgacgccgggaggaggcggggcctcggcctatgcgggggcgctcgcgtcggcgctggcctccatggtgggcaacctcacggtggggaagaagaagtacgccgatgttgaggagcggatgcaggcggagctcgtcgagcttgcggacacgcgcgagcatctgctcgcgctcatcgatgaggacgcccgcgccttcgggcccctggccgccgcctatggcatgcccaagggcagcgacgaggagcgagcggcccagagtgcggcgcttcaggcggcgctcgtggatgcctgcgaggtacccctcgagatcatggccacctcggtgcaggtcatcgaatcgtgcgtgttcatggcccggcacggctcggttctggccctttcggacgccggagcggccgcggtgctcgccaaagccgcccttcaggccgcgagtctgaacgtggtcatcaacatcggctccatggacgacgccgaacgcgccgagggctaccgcaaccagatggaagaccttcttgctgccggttgcgccatggccgacgaagtgtacgccgatgtcgtgaagaggctcagctgatggcgcggattctgtacggcaaggaggtgtccacggctctgtgggagcggctgctgccccgcatcgatcgtttgcgtgcggccggcgcggcgcccacgctcgccatcgtgcgcgtgggggagcgacccgacgatttgtcctatgagcgcacctgcgcccgtcaggccgacctccacggcatcgctgtgcgccgcttcgtgctgccggcggaggcgacgcaggccgagctggaagtagtcatcgatgccgtgaacgccgacccgcgcattcacggctgcctcatgttccgcccgctgcccccgcagatggacgagcgcgccgtgtgcgatcgcctgtccccggccaaagatatcgacggcatcgggtcggcgtctctcgccggcgtgttcgccgacaccggcgagggcttcccgcccgccacagcccaagcctgcctggaaacgctcgatttctacgacattcccgttgcgggcaagcgcgtggtggtgctcgggcgcagcctcgtgatcggccgaccggtggccatgatgctgctcgcgcgccacgccacggtgacgctggcccattcccgcacggcggacgtggccgcccatacccgcgaggccgacatcgtcgtgtgcgccacggggcgtgcgcgggcgtatggggccgagtacttctcgccgggccagacggtgctcgacgtcggcatcaacttcgacgaggcgggcaacttatgcggcgacgtcgacttcgacgccgtcgttcccgtgctcggcgatgggggcgccatcacgccggtgccccggggcctcggcggcgtgaccacgagcgtgaccatggcccatgtggtgcaggcggccgaggctgggcagcgctaggggcggacgactcgtgaaacgagccttgccccttgggggcaggtggcgggtataatggtggcggcccccctggggccgcgcgcgaccggttctgattcgagaggagagaggttgaacaagctgcgcatcctgctgctcgcgttggcctacgcctgcttttgggcgttgttcgtgctgtttccctatccgtcgaacgtagtgcccgaatcctatacctcctacgatgcggcccctgtattcgccagcaacgttgtcgcgctcgttacgatggccctttcaggcggggttctcgtagcgcttcgtgacggtctggccgagcgggtggccggaagcacgatggctgtcgttgggtccggtgccgcgctgcttgcctgcggcgccgcgctcattgtcagcgctcatatcggagcgataccgctttggatgatggtcgcctaccccgccatcgtggcgatctatggcgtggtggtcgccgttacccttgcgggggcatcgtggcgcttgtcttctcgggacaacgccgtcatgcttgccctctccctgttcctgtcgttcctgatcggcgaggctatcgtggcgcttacggatcctctgcccaccggggagatctccaacccgctcatgcccgccttgggcggtgtctttctggtgattctcggtcgcctcggccgcagtgattccgaaccgccgtctccgccacgccctgcgtcgtcgctctcgggtcgtgctgctgcgctcgcggctgccattctactgtgctacctgctaggaagcggggcgttcatgagcctctcgtcggtggctcggggtgagacgtggttttccgatgggtggatccattgcgccatcgcccttggactctacccggctttttgcctctgcgcattcgctgcatggcgccagggtcgcgcgggctatccgtggctcggtttcttcatcctctgcatcgcctgcctctattgcaccgccctgctgtatacgccgctggccgtcctatgccgagctttgatcctgtcgagccgtcccatggccatcatgctgctgtgggtggcggttcaagaggggatgcgtgcgcggggtcttccttggtggcagtccgcggttgctgcacccatgctcaccgttgccgtcgattgcgccattcacgccatcggacttgtcgggttctcttccgcgcagatggattcagtcgtcaatgccgtcatgctcgttacggcctttgtcatgacgctggggatgctctggttcgtgcgactgcgccttgacggcacggatcccgcgcgccctgggtaccttgcgggcgccatcgatgtgtcggtggttatcgctgccttggccgacgaacatggcttgagcgagcgggagggcgaagtactcgggctgctctaccgcggtaacacccagaaaaggattgccgagcgcttgttcctgtcggtgaacagcgtccaaacctatgcaaagagcctctatcgaaagctcggcgtgcactcgcgtcaagagctcatcgacatggtgaacgaggctgcggacaaaggcgaccgggcccgctgaggggcccggtcgcagggggggggcgaaaagtggtcgattaccagaccgagatggccgtggcgcaagcggggctgtcccaggcgtagccgccgtcttccccgatgaaggagtcggcgatagaatcgaagctcgccgggttcgagggtgtcatgtccccggttagcgcgtggatgacggtgtagcgtccggcggtgaagatatgcgcgttcgagaagccgcccggcatgttccagttgatgcccccgcaggggttgcccgcctggatgccggcggcgtagaggccgggaatgggattgccctcgccgtcggtcactcggtagcggttgtccaccatgataccggcgttgatgcccgagatgcccacatctcccttgatgcagaagaacgggggagtgtctatggccgccatgtcggatccggccacgccgaaatcgtcgtcggtgcccttggcgcacagctcgttgtatcgctcgatgctggccactccctcctggacgggaatgccggccacctcgcagagctcctcgagggtattccccgacaccaccgtttcgggatccatccaggcgctgccctcgcctacgagggccaccggcggtacgccggggataccctccacggcgccttcggtcttagagtcgaagatgcggtagtggatgccgcgatcctcgggtttgtaggtggcggacatggagatgttcaggctgctcatcggaacggtttcgttgcagaagcgcttgccgttgacatcgagggccaggaagggatagaacatgaaggggccgatatagttggtgtggatctgccgggcgtgtccgagcggtgccatgcgcccgcctgccagaatgccgaggatgtgcccgtcgcctgtgtggttgaccaggcagagggggaacatggacgcatcgcgcatgttccgatccaccatagactcgttgttcatgtaatcgccggcggccagcaccacgccctttgtggcggtgagcttcacataggtgccgtctttttgcttgccgatggcgccggtgatggtgccgtcctcttcctggacgagctgcacgcagggggtttcgtagtagaacgtggcaccgccgtcggctgccttttgggcgagagcagtcatgaggtcctgattcgaggcttgggtcgcgtcgcaaacggcgacaacgctgccgtcatcgtagcggatggagctgtcggtgaggaactcgatgggctcgatgccgacggagcggccctgggatatcacccacggcacggcttcctcggcgtattccacatagtagtcgaacaagtcgttgttgatcctccagtcgttgaggcgggcccagtcgctgcgccagcgcttgatgccggcgggggtggagtgctctttcgcgacgaaggagcaaccgttgccattggcggacaccacggcctctttctggaggcaggctacctttgcgccctcttccacggcggtaagtacggcgggcacgccggcgcagcccgcgcctactacgacgatgtcgtaggtttcctcggtggcgaactcggtgatcggctcgcgctctacgatgctgaaatcgaagtcgctctccttgaggtcggcgggaagctcgtcgtttgcggtgtcggccaatttcccgctcgcagtggcggatggggcgcaccccgccattcctagcagggcggttccggccgctgcgccgatgccgcctttgatgaacattctgcgatccatggtctgcataagtccctccttgcactgtttcttggacgcgggctgcggtgcccgaacgtctcttgccagtgatcatcatggctcatgaagctggctcgcgcttcccatggaatggggatagttttgctcggagtgcttcccataaaatggggaagcacctgtatggaggcgcttttggaaacagtgcccgcatcttcgcattcgccgtgcgaagttggatgggaattgcgggaaaagacaaaggaggtcgtgccgtcagccgattagcgcaatgatgacgcagcgtcagaggctttctcgtgaaatgatatgtctttcgctgatattcacgagaaggagagcgaccatgtccatcttcacgcccaccgagatcaccgacaactacatgaaggcttcggtgggaaaggcggcatcgccggcgtggcgcctgttcgtcctcgctgtggccgcgggtctgctcatcggtttgggcggcgtgacgtcttcgacggcggctcacgggcttgagaacgcggggctcgtgcgcttgatgtcgggccttattttccctgtgggtcttatgatggtcatcctcatgggcaccgagctgttcacgggcaatgcgctcatgatcacggcagcgctcgacggcaagatcacctgggcgcgccttttgcgcaattggggtatcgtgtttgcgggcaacctggtgggagctgtggctctggctgcctgcatggcattcttcggccagctgaacatcggcgggggagacctcgcggtgtatacggcgaaggtggcggcgtctaagaacgcgctgccgtgggccaatgccttcgtattgggcatcttctgcaacatcatggtgtgcatcgcggtgtaccaggccaacacggcccaggacaccgccggccgcatcctgggcatcttcttccccattatgggcttcgtgctggccggcttcgagcactgcgtggccgatatgtactacgtgcccgcgggtatcttcgcgtacatgaacccggcctacaccgggcttatcgacgcggcgggcatcaatgtggccctgctcaacttcggcgattttatctgtgcgaacctcattcccgtgacgcttggcaatattgtgggcggcgtgctcgtcggtttagtgatgtacgcctgccacgccacgaagaaggcgtagggaaatctgccgaattcgtcaggaatatgggcaattcggtgaggttttgcggcttcgcggaggcaccccttgcgaagtggagccgagtgcctatgatgaacctatggcgaatggactgacatatacgcgcatcacctccacctcggaagcgaccaagcagctggcttccacgttggcgccttatctgcatgcgggcgacgtggtggtgctcgacggcgatctgggtgcgggaaagacccagttcgtgcaaggggtggctgccgcgctcggtgtgcggacgccagtgacgagccccacgttcaatatcttgctggaatacggagagggtcgcctgcccgtataccactacgatctctaccgcttggacgatcgccttcagttggaggacatcgattactatcgcgcgattgacggcgatggcgacggggtggcgttcgtcgagtgggccgagaagtttcccggcgacatgccctacgactacctcgagcttacgatcaccgccgatttggacggttcccgtcgtattgtcgcgcattcttacggatcgcgctcgcgccagctgcttttcgtgtgggccaacgactcgaaatcccgtctgggacgcagccagctgtagcgggggcgtctgtcttttgttgcccgctccgaggtcgtgttgcggcctgtttccgctcgtgggtgtgttttttcgcttgtgcggcgtccgggccttctgctcgtgctcgtgcttgtcgttcgggcgatagagtgcaagattttgcgatagagagaacttcggaagcgtcttttgccgtattcggctctcccgatcgcaaaatcctgcattttcggttcggtccgactctccctatcgcaaaatcctgcacaaaagagtagtctcgcttggcgcggcattgctctgtcggttgctgcggtagaatagagatgctcgctcggttcgttttgctgctacgaggctgcgtagtcggcgcatatgctggtgtagctgcatccggagcgtttgctcaattggaaatctgcgcgaaaaggagtttgcccgtggacagcgccacgccagcttatgtgctcgccttcgatacggccaacgaggtcatagccctcggcgtgggacggctcgatgctgccgcgcgggcgatcgagcttgtggcaagcacggaggtggaggcgcggcgggcgtcgaacacccagcttgtgccccgcatcgatgagctgtgcgcccaggccgacgtggcccgggaggagatcgcctgcgtgtgcgtgggccgcgggcccggatcgttcaccggcgtgcgcatcgccctggccacggcgaagggcgttgcgagcgctctggaagtgggcctcgtaggcgtctcgtcgctggatgcggtggcctggggcgcgtggagggcgggcgagcgcggatcgctgctcgttgtggccgatgccatgcgccgcgaggtgtaccctgtggagtaccgcttgggcgaggacggggccgaacggctgaccgctgatcgcgtgatcaaggccggggccttcgccgaagagctcggcgcgatgggaagctccgatcgcctgattgcgggggatggcctgcgcaagtacgcggatctcatcgaaggtgcgagcgcgcctctgcccgaggcgctctggacgccgacgggtgcgggcctcttgctggcgttgcaggccgcttggcgtgcgggggagtgcgaccccttcgatgccgcgcggcatgacccggctttcgcgctgcccgtgtacacgcgcctgtcggatgccgaggagaacgagcgggtgcgcttggcccgcatcgacgatggcctggcgggcaagcgcggctcgcgacatgtgaccatgaacgatacggccattgccaatgcccgggctaacggcgagggcatcgcctacaagccgctggatgcgcgccatgtggccgaggtggcggccttggaagcggcggtgatggggactgatgcgtggaacgaggcgctcgtggccgacgagctggggcgcgccgaccgcgtgtggtgggccgcctacgctgccgacccgaagatgccgctttctgccgaggcgccgctggtgggttatgccggcggttgggtggtcgacggcgatctgcagattctgaaggtgggcgtcgatcccgcgtggcgccgccatggcatagcccgggttctgctcgcccgcgtggccgatgacgcccgcaatctgggcgcacgtacgagctcgttggaggtgcgcgccggaaacactggggcccaggcgctgtatgcggcccttggctacgaggcgttggggcgtcgcccgcgctactactccgacggcgaggatgccctcatcatgcaggggcctctgcccaccatcaccctagcggcggttccgaacggcgaaagcatcgtggacgaatcccgtaggggtgcctcttgcgccgccctcggctgcgagagcgacggaacggcggtgtgccgccctctcattctggccatcgagtcttcctgcgacgagacggccgccgccgtcatcgacggcggggaagtgctgcgttcggatgtggtggcgacccaggtggatttccacgcgcgcttcggcggcgtcgttcccgaaattgccagccgcaagcacatcgaggccatctgcggcgtctgcgacgaggcgctggacgttgccgcggcgagcctggggcgctctcgtctccgctggcgcgatctggacgcggcggctgtcacctatgcaccgggactcgtgggcgcgctcgtggtgggcgtggccttcgccaagggcgcggcctggggcgccgacatccccttcatcgtggtgaaccatttggaagggcacctgtacgccaacaagatcggtcggcccgatttcgcgccgccggcggtggtctcgctcgtgtccgggggcaacactctgctcgtgcatatggccgactggggcgactatcgcgtgctcggcgcgacgatcgacgatgcggtgggcgaggccttcgacaaggtggccaaggcgctgggtctcgggtatcccggcggcccggtcgtctcgaagttcgccgccgagggcgacccggatgccattccgttcccccgggccatgctgcattcgggcgatttgcgcttctcgctctcgggcctgaagaccgccgtggtcacctacatcaacaacgagcgcgccgccgggcgcgagctcaatgtgcccgacatctgcgcgagcttcacggcggccgtcgtggacgtgcaggtggccaaggcccgcacggccctgcgcgagacgggggcgcccaccttctgcctcggcggcggcgtggcggccaatccgaccttgcgcgccgcctacgagcagatgtgcgccgaggagggcgtgcgtctcgtgatgccgccgctcgcctcctgcggcgacaacgccggcatgatcgccgaggtggcgctcgaccgctatcgggccggggcgttctcgtcgcttagcactgacgctttggctcatggcgacttggaggtgccgtactagcggctccgggcgtcagggttcgggcgtttgccgattgccctcggcgacccggagcgccgaacccaaaacaaaagcccgaagagccgtcggcttttcagcgactcttcgggctgggtgagcgatgggacaaatgctccgtggcctttgcgggccggggccttctctagtggcggcaggcgttggcggggtccatgagcgcgaccttgccctccgcgaacaggcgggccacgttgccaacgttgggctcggtggtgtcggagtaaaccttgatgccggcgttggtgaagcgagtgaacggaggcatgcccatgcccacggtgagaatgccgtcgacgccgatgccagagacgaagtcgatcacgccgccgcaacccacggcatcgtgatcggcgttcttcaccgactcgacgccgacgatgttcatgtcgtcatcgaattcgacgacggtcatgtacgcggcatggccgaagtgcccgctgcggatgctctcgaggccggcgtcggtttcgctggggatggcgatcttcatgcgaatgctcctttgctgttgcggcttgccgtttgcccggacaagccatacgtgtctttcagggtgaattatagcttgagctgcgtcaaacatgcgttgaaaatcggcgatgacctccgaagcggcgtccggtgcaccagcgttcgaggcgccgttgcttctagctcgctcgcgctggatccgttgaaagctgaatagcggggtggatgcgacgcagacgcagagacgagctgccggactgcaatcttaataccgtcttaatgcgggcgcatgaaccttaacggcgtctttagcccttgctgattatgctgacattcatcgggtggtgctcttgcgcgcgaagcgcgttgcctcccggatgttggcaagcggtcctgcgggatcttgagagacaagggcaagatcatgttcgtggtgacacctatcgtgggcgtgttggcgctcgccgcaatggcgtatttggcagttttgctgctgcggggcggtgagcagcgatgagcgcgatcgcggggtcggagtttctgcaggcaggcgtgctggtggcgctcgtcgtggcctgcgccctcccgctttcggggtacttggttgacgtgatggaaggtcggccccttctcattcggcgtgcgctgggcccgctcgagcgctctgcgtgccgtcttgtgggcgcgcgcgaggacgatggcatggattggaggcgttttctcgccagtgcgctcgcctttacggcggtaagctttatcggcctcttcatcctgctgatctgccaaggcgcactgccttggaaccccgagggctttccggggcttgcgctcgatacggccttcaatatgacggcgagctttgtgacgaacaccaattggcagcctatcgccggtgagacgaatctgagctacttctcacaggcggttggtctggcggtgcagaacttcctttcgccggccgtcggcatcgcggtggcattcgcgttgctgaggggcctggcatcttcggacggcggcaagctcgggaacttcttcgtcgatgtcgtgcgcgcggtgctctacgtgctgctgcccctgtcgctggtgctcgctttggtgggagtgtggcagggatccccccagacgtttcagggctacgagacggtgcagcttttggagccggtgagcgtcgatgccgaggggactctcgtcgatgccgatgatccgacggcggtgcaggaggtgaccgaggcggtcgtgccgctcggtccgcaatcgtcccaggtggctatcaagcagctgggaacaaacggcggcggcttcaacggcgcgaattccgcctcggctttggagaaccccacgccgcttacgaatctcctccaatgcgcggcgatgccgctcattcccttcgctctggtatttgctttcgggcgcatggtgggcgaccgtcggcagagtcgcgcgctcatgacggttgtcctcgcgcttctcgcggcgggtctgttctccgttatcgccgccgagacggcggccacgccccagctttcagccgatggggcagtgtatctgggcgccttggatcagtcggctggcaatatggagggaaaggaatgtcgtatcggcgtcggagaatcggcggcgtggacggtgctcacgagcgctacttccaacggttcggccaacgcatcaatcgaggccatgactcctatcggaacgctggtgccgctggcgctcatcggacttggcgaggtggtcggcggcggtgtcggcacggggttggtgggcctgcttggcttcacggtgttggcggtgttcgttgcgagcttgatgatagggcgctctcctgaatacctgggaaagaagctgggtccggccgagatgcgcatggcggtcgttatcgtggtggcgccggcgcttgccatcctgcttgccgcatcggtgcttgtgatgagccccgccagcgcggcggcggtgggaactccggctcccttcggttttaccgagttgctgtatgcggccacttcggccggcggaaacaatggcagcggcctttccggtctgagctcgaacacgccgccgatcaacgtggtgctgggggtggaaatgctctttgcccgcctggctccgctcgctgcggcgctggtgctcgccgggaatttggcgcagcgcaaggttcaggcgacgggagcggtcgggctttccacctcaagcgctttgttcgccgtgctgctgttggtcatcatcgtgctcatcggcgcgctctcccttcttccggcttttgcgctgggacctctggccgagcagttcatgggtacgttctaggtaaggtgcgtgggctatgaaaaaggaaacgaaacgagcgattcgcgacgcttttgccaagctgtcctttcgcagccaggctcaaaatccggttatgctcatggtgtatctgtcggcctgtttgaccaccgtgctgcttgcgttagcgctcgcgggcatatctgacgctccgtggggctacattgcggcaatttgcgtggtgctgtgggcgacggtgctgttcggaaactttgccgagtcgctcgccgagggtcgcggcaaggcgcaggccgatgcgctgcgctccgccaaacgcgatgtcgaggcgtgcctcattgacaacgccgccctcgctgatgccgccacgatggaagatccgtcggcgtttcttgccgatcgaggccgcgcggtgggatcggctacgttgaagcgggggcaggtgtactttgttcgcgcgggcgagcaggtgcccgccgacggcgaggtcatcatgggggcggcaagcgtggacgaaagcgcgattaccggcgaatcggcgccggtcgtgcgcgagagcggcggcgatcggtcgtcgattaccggaggcacgacggtgctctccgattggctggtagcgcgggtgaccgctgaggcgggtcagagctttctcgataagatgatcgccatggtcgagtcggctgcgcgcaaaaagacccccaacgagcaggctctcgagctgctgctcatcgcgctgacgttggtgtttcttgcggtgtcgctgtccttgtacctgttcggagcatttaccgccgcgcagcacggcgcgggaaatcctctgggaatcacctcgttggtggcgttgttcgtgtgcctggcgcctaccaccatcggcgcgctgctgtccgctatcggcattgccggcatgagccgactgaatgcggccaatgtgctggccaccagcggacgtgccgtcgaggcggcgggtgatgtagatgtgctcctgctcgacaaaacgggcactatcacgctcggcaaccgtcaggctgcggcctttctgcccgttggcggcgttagcgagcgcgaacttgccgatgcggctcagctggcaagcctggccgacgagacgcccgagggacgcagcgtggtggtgctcgccaaggagcgcttcggcatccgcgagcgcgagttggcgcagtccggttttgcggtggttcccttcacggcccaaacgcgcatgagcggtgtggatttcgagggtcacgagattcgcaagggtgcggccgacgccgtgcgggcatacgtggaagcgcgcgggggcgtctttggcgcggaggtggccgccgtggccgaggaggtgtctcgatcgggcgggacgcctttggtggtggcgcgcgatgcgcgcgtgctcggcgtcattcacttgaaggacatcatcaagtcgggcattcgcgacaacttcgccgacttgcgcgccatgggcattaaaacggtgatggtcacgggcgataacccgctcacggccgctgccatcgccgctgaggcggggcttgacgactttattgccgaggccacgcccgaagcgaagcttgcggccatccgccgctaccaggccgaggggcatctggtcgccatgacaggcgacggcaccaacgacgctccggcgctggcccaagccgatgtggccgtggccatgaactccggcactcaggcggccaaggaggccggcaacatggtggatctggactcctcgcccaccaagctcatcgaaatcgtgcgtatcggcaagcagctgctcatgacccgcggcagcctcaccacgttttcgatcgccaacgacctggcaaagtacttcgcggtcatcccggcgctgctcgtgcccctttatccgggtttggaggtgctcaacatcatgcatctggccacacccgcctcggcgatgcttgcggccatcatatacaacgctcttatcatcgtcgcgctcattccgcttgcgctgcgcggggtgaagtaccgcgaggcgtcgccgcaccgtttgctcgcgcgcaatttggcagtgtacggcctgggcggcgtgatcgttccctttgcggccatcaaggcgctcgatgcgctcatggtacttgtcggcgttgcgtaaaggcatccgggccgcaacatggcggcggccttcgtttgaaccgctgtgaaggcaattttcgagaacaggaagaacgcattatgagtggaaagatggtgacgcggtgcttcgcgagtgccctggcgtcgtttatcgcggcaagtgtgctgtgcgggatcgtttacccctgggctgtgacggggctgtcggctatagcgttcccgtaccaggcgacaggctctattatcgaggtcgacggggtgaagtacggcagcgagttagtgggacagccctttaggagcgacacccatttgtggggtcggcccacggtggtcgacgccggctccttttccggtgcggaggggcagccgcttttgtggtacagccccgagaacctcagtcccgcgagcgacgagtttgccgcgcgggtggacgaacgcatccagcaggtgcgggcggcccatcccgaccgtgccgcgcagcccgttccaagtgatttggtgacggtgtcggggtcgggcttcgatcctcatatctcgccggccgctgccgattaccaggtggaacgtatcgctgcggcaacgggacggcccgagagagaggtgcgtgccattattgctcagtgcaccgagtaccccctgttgggcattatcggcgaggcgcgggtgaacgtgctgaaggtgaacctcatgctcgacggcgtgctggagtaagtggagcttggcgcgcttggagaaaacctgagggaaacggatagcgaatgagatgcggctgagggatggggcgtgctaggatgcaggggcgctgtcgggacgatgcgaaagggcaagtgacgtggcggaagttcgagagagatgggagatcggcggcggccgcggcgaccccgatgccatcctgcagcgaatccgggaggaagaggaagcgggtgaggcggagcgcttcgaggggcacggccggctcaaggtgttcttcgggtacgccgccggcgtgggaaagaccttcgccatgctcaccgaggcgcatcatgtccaagatgagggcgtcgatgtggtagtgggctacgttgagccgcacacgcgtgccgacacccttgccttgctcgatggcctggaagtgctgcccgtgaaatcggtgaagcaccgaaacgtcgctttgcgcgagttcgacctcgacgccgccctgaagcgccgtccccaagttgtgctggtagacgagctggcgcataccaatgcgccggggtgccgccatcgcaagcgctatcaagatgtcgaagagctgctccgtgcgggtatcgatgtgtacacgacggtgaatgtgcagcatctcgaggggcttaacgacaagattgcctccgtgacggctgtggcgccctccgagcggatccccgaccgcgttttcgacgcggccgattcggtcgaagtcgtcgatttggagcctgctgacctcatcaagcgcctgcgttcgggcaaaatctacgcgcccgagcggatcgggtcggcgctttcgcactttttctcgcgatcgaatttggcggcgctgcgcgaaattgccctgcgtcgcgctgccgaccgtctcacgcgcgcctctgcggctacggtgcctcatgcggctggcggcgaagacgttttggtgctggtgaccgccgatgcggcggcgccgcgagttattcgcgcggcagcgggtatggccgaggcgtttggcggctcgtgcacggcgcttgtggtcgaatcgggcggcgagggcgcggaggggcgatcgaaaggcgatgcggcccttgcccgctcgatcgcccttgcggaggagatgggtgcgcacgtcgtcacgttgacgggggacgatccggtgcagcccgtggccctttacgccgcagcggcgggtattcgccgtatcgtggtgccctcgatgcccggtcgcatcggcctgctcggatgcggggacgtggcgtcgcggttgatgcgggccgctcccgaggccatggtgacggccgtccccgcggtggatgccccctcggtgctcgagcgtttgcgcacctacgcgagctttcgcctcacggcctccgatgtttttcgagcgcttctcgcgatagccgttgcgacggcgctgggggaagtggcgtggctggcaagccctacgccctcgatcatcctcatgacctatctgctggtcgcgctgctgctcgccacgcgcgcggatggttttctgtatgccgtgcttgtggcgctgggcagtgtcgtggcctacaacttctttttcacggcgccgcgctacaccttccatgcctatagcctatcggctcccatcatcttcacggttctgctgataggaacattgggggcctcgtctctggccatccgactgaagcgtcaggcgacgacggcggcgcgacgggcctaccgtaccgaggtgcttttggagagcagccgggagttccaggtggccgtgagcctcggcgcttgcctggagacggcggcggcccaagtggtgaagattctcgatcggccggtggtgatgtaccaggtcgatggggcggcgcatggcggcctccttccgccgcgggtcttcgatgtccccggcagcggcgggggagacgccgagaagctggatctcgcggctccgggcgagatggccgttgcgtcgtgggtcgccgccaatggcgaggctgccggcgcaacgacggacaccttgcgcgaggcgcgctgcctgtaccttcccattcgttcgaaggatcgcgtgttcggcgtggcgggattggtgatggagcaaggcgacgacgactttggctccttcgagcgcaatctgctcgtagcgctgcttgacgaatgcggtcaggcggcggaggctctggcgctggcgagcgagcggaagaacctcgccgtcaaggccgagaaggaggcgctgcgctcgaatctgctgcgtgccatttcccatgatttgcgaacgccgcttacgagcatctcgggcgacgccgatatgttgctcgcctcgggggacgtcctggacgaggcgcagaggaagcgtttgacgtcggatatccatgaggacgcgaattggctgatcaatctggtggaaaatttgctgtcggtgacgcggctcgacgatggcgacgtcgaagtgtcgcgcgcccccgaactggtttccgacgtgctggccgatgcgctgcgccatgtcagtcgctctgtgagcgagcatcggctgacggtggagatcgaggatgagtttctcctggctcagatggacggacgtttgattgtgcaagtggtggtgaaccttttgaacaacgccatcgcctacacgcccgcggggtcgtccattcgcctcaccgcgcatcgcgagcgcagcgtttccggcgatagggtggttgtcgcggtggccgatgacggtccgggcatccctcccgccgagcaagcgcgcgtgttcgatctgttctaccacgggggacgggtgggcacaggctgcgaggacggcgaagggggcgatgcgcgtcgaggaatggggctgggtctttcgctttgccgctctatcttaagggcgcacggcagtgatatcgtgttgcgcgatgcctatcctcacggttgcgtgttctcgttcgctcttcccgcggcagagctgcgcgaagaggctccggttggcgtcgtcgaggaagggagtgcggacgttgagcgatagagatgagggcgttatcctcgttgtggaggatgacccggcggtgcgcaatctggttacgtgtgcccttgacgtgcacggctatcgttcgcgtgaggcatccacggctacggcggctctcgctgaccttacgtgcgcgagggatgtcaacctcgtcattttggatttgggactgcccgatcgcgacgggacggaggtcatcggagcggtgcgcgggtggtcgcgtgtgccgatcatcgttctgtcggcgcgccaggaggatgccgataaggtgacggctcttgatgcgggggccgatgattacctgacaaagcccttctcggttgcggagctgcttgcccgagtgcgcgtggcgctgcgtcgcgtcgccttcgacgagaccgaggaagaggcgggggagacgtatcgcaatggtgacctcgccatcgacttcgatgccaaggttgtcgtgaggggcgacgacgagattcatctgactcccatcgagtacaagcttctggtgcttttggcccgcaataccggcaaggtgctcacccacaactatatcctgaaagaggtatgggggcaggcgttgacgagcgatctgcccagtctgcgcgtgtttatggccaccttgcgcaaaaagatcgagcccgatcctgccagcccggtctatctccaaacccacgttggcatcggctaccgcatgctgcgtgtggaataggttttcgcttctgccccatgttgccatatgcattggcgagcgtttgtgtcatacttcgggaaacggaatcgaagggggcgcgttgttcggggagctggtgacagcctatctgttcttggccggcgtcggcgcgggcggtgtggccgtggcgtctgtggccgacctgctcctcgtgcgcgagccctttggcgcggatgtggtacctgacttcgcggagaagcgtcccgccgagcgcctcgtcgtcggcgtgctggccctctcctgcggggcgctggccttaggggccggctgcctcgccgccgacctcgggcgcatcgaccgcgtgttgtcgttgttcctgacgccgcccgcaacgctcatgaacctgggcgcctgggccgtggcgctgctgacggtgctggcggcggccctcgccctggcacggtttctgtacctgccctgggcgaatcgtcgtgcggtggtggtcgcggaggtcgtcgcctgcgggctggctgtggtcgtggcggtttacgccggattgctgctgcagacgcttacgggcgtgcggctatggtcgacgccgtgggtgccggtgctcttcgtgctgtcggcggcgtcctgcggctgcgccctgctcatggcaggggcgctgttcgtggaaggcgacgagggcgttcgaaaggtggcgcaggccgctgcccacgccgatacggtcgtcatcgtggcggaggtagcggcggctgcggggtttctcgcttttgtggcgggaagcgatcacgcgggcgtggaggcctcggccgcaagcctgctgtgtggcccggcggctctgccctggtgggtgggctttatggcctgtggtcttgcggcaccgcttgccgtggaggtcggctgcctcgttcgcgagcggtggcgctcccgctcgggcgtgggccgggacgcgagggcgtatcccctcggggttccggtttcggagcctcgggcgtatcccgctacggttatggctctggcggccgctcttgtactcgtgggcgctgtgggcctgcgggcggcggtggtggaggccggcgcccagcgcccgctggagttgcaggaagcggaagcgtccgcttccgtcccttccgaaaacgaggcggcggaaggcttgctttccacgccttccgaaaaagacggcgggcaagatggtgccgcgcccgaaagagaggatgtgaccttgtggtcaaactaggcaagacgatacctgccggggatttgttcgagctggatgccgccagctccattcccgtctggcttcagctgaaaaaccgcttcatctacctcatcacctcggggttctacttgccgggcgatcagctgcccacggtgcggggcctggccgccgaggtggaggtgaactacaacaccgtgagcaaggtgtaccagagcctggaggaggacggctacatcgtgtcgaaacggcggcttggggcgttcgtggccgatgtgtccgacaagcccggcgtctcggccgaggtgacggcggagatcgtcaccgccgagtacctgcagcgctgccaggagcttggcatgtcgctggaggatattgacgcgcagttcacggcggcgctcgtggccgccaaggccaagcgcgagaagaacggcacaagcaaaggagcagctcatgactcgcaagaaacacggtgcggacgcctcgtcaagttccccgagcccgcaggggaggatgccgcagacgggcgcgcggctggaaacggggcgtaggcgcacctcccgcaacggcgccgtggctttcacgatcatcgtgttcgctgccgcctgcgcgctcgtgctcgcctgtgcccagttgcttgccggcggcatcggccttgcggccctcgtgatcgctgtggtggtcggcgccctggccgcctcgtcggtgcacatcgtcatggaatgggagcgcgccgtggtcatgcgcttcggccgcttcaaccgcgtggccggaccgggcatcgtgttcacctggccggtcatcgagttctacacggtgtgcatcgatcagcgcgtggcggccacctacttcggtgccgaggagacgctcacgtccgatttggtgcccgtgaacgtggatgctgtggtgttctggatggtgttctccccgaagaaggcggccgtagaggtggaagattacgcaagcgctgtggcgtggatggcccaggccatgttgcgcaaggccatcggccgcgcgagcctggccgaggtggcctgtcggcgcgaccagctggatgccgagctgaaggatgagctggaggcgaagctggacggttgggggatcgacgtcatcgacgtggaggtgcgcgacatcgtggtgccccgcgagctgcaaccggcgatggccgccggtgccattgcggcccgcgagcgcgacgcccgcatgacgcttgccgaggcggaggccgacatctccgacatgctgaaggacgcgagcgccaactacgagggcgaccccgaggccatgaggttgcgcaccatgcatctggcctacgagtccgtgaagcagtccggcggcacgctcgtcatccccagtgccttcagcgagggcttcactgaccccgacgccgccgaggccgtggcaaaggccgcgaagcagggctaatgccgcaggaaagaacctctggcgattcaacgataaagcgtgctacaatgggcctcgcctagagaactgggtttagccccgaggggccgggacgccacaaggacgtcccggtagcgagagtgcctagttctcgccttttttggtttgggatccgtcgctatgcggcggatctccgctatctagggccaaaagtgcaaccccaagagacgcggcggccaaaaaggtctgaaccagggccaggaaaacgctcatctgcatcacctccctcccgcatctagaattggtgttagggaaggtgtatgcagagagccccagctccccgcttatctacaagaatacaaacaaatattctcatttcaagtcttgactttgcaagatagtgcgattaatctatttgaaagagaaatagagaatttgaggtatatgaagtatacctatagtatattactgcaacaaaaggagctactatgcaatttgaattcgatccagtaaagagcgaagcgaatctcgaaaagcacggtatcgacttttgggaggctcaagaactatgggaagaacctcatttcgttatcgggacggcgttcgtggtgggagaaaagcgggagattgttgtgggtcgcatcttcggtgaatattggacggcagtaacgacgcaaagaggacgtgccgtgaggatcatctcagtgaggcgagcatcggataaggagcgcagtgcttatgacaaaaacaataacttctgaggaatttgatcgcatgttcgatgagggcgaggatgtttctgcttacattgactttgacaatggcgtcatggtagagggctcaaaagaaacgcgccgcgtgaacgtagatttccccaattggatggtggtcgatctggatctagaagccgatcgtcttgccatcaatcgccaggccgttatcaaaatgctcgttgacgaaggcttgagggctcgccgcgagctgcgtgccggctgaccggtttcgtgctacaacagctttgtctctgggatgtgagatccgccgcatagcgacggatctcactattttgtaagcatttttcttcttgtcatagattgtcctacattttgtcttgacaatctatgacagagtatgacaaactgacttcatcagaatccggccgattctaaagacatgtacggtatcccatcaaacgtgctgagcgacaaccggattcgcccatgggggatgggaaagaggggaaatcaaaaactcgatggcagagtagctctctgcgtcggcgttccccttcgcatgaaagaggaggaaagatgtcaggaagcgaaaccaagcgttccagtcttactcgccgcagattcttgaaagcagttggtggagctgccggtgcaatgggctttgcggccagctctagcgcactcgccggatgttcttcaaaatcagaggaatcgcttgcgtctacgggcaataatgatcagattttctacggaacatgtagaggcaactgcgcgggcggctgcgcgctcaagataaaagttcgcgacggctttgtcgtgcaaacagagatgggtgagcaggcgcaatccgcctttaatagaatttgcccaaagggtttgagtcacgcccagagaacctattcgcctcagcgaattcggtatcccatgcgtcagagtggaggcaaaggatcgggtgtatgggagagaatttcgtgggatgaagcaatcgaagaaattacttcaaaatggaagcaatatcaagctgagtcgggaaactccagcattgtttttagcaccgcgacaggtgttctttctgtaaacaaggacatctatggatatctgcaaaaacttatgggtggtagcagtacggcaatctgttacgacggagctggtttgtcgatcttgcaaaagatgattggttacggcttgtttggctctgggaacaatccggggtgcgagcgggattccaaggttgttttccttgtgggtgcaaatgctcatcttgctctgctcaacagttggcatttccttcaagaagctcgtgcggcgggtgccaagctgattcatatcgaccctgttcgcacgctcacttcgcaacagtgcgatcagtttgtgcccattaccccgggcacagatgcggcattgtttttggcaatgacgaagtactgtatcgaacaaggatgggctgacgaggattacctgggcaaaaacaccgtggctccttttctcattcatgaagatacgggttattacgtacgtatgagcgatttgggtctcgaacctctagtcggtgatcctgatccaactacgggggaggagacactagtagatgcaattatggtctgggattcagagacagggaagcctgcagtggctgacactgtcgagcatcctcagttgacgggagcattcgagcaaaacggaatcaaaatgcgaccagtatatcagggccttctcgatcatcttgacgagtggtcgcttgagagggcatcagaaatttgcgatattcctgtcgacaccattgcggaaatggcacgcatgtttgctcaagacggcccatcgacagtctatatgggatttggaatagaccactataacggaggtcataaaacataccaggccatcattacttttctagccgtaacagggcagttcggcacttccggatcggggctttccggcgtgtcgtctggcagcaatgtctatttcagcaatccaaatctctcagtggctaatgctcagacgggtcccgttgtgggcactgttaagctggcttcagtaaaagagcaaggtgctataggggatatcccactcgatattcgcagtattttcttctatgggcataactacatttccaacgtgacggagcgacttaaggcaattgaatgcctgaagtccatcgatttggtcgttgcggctgatattgccatgaacgatacgactgagtatgcggacatcgtattgcctgtatgtggatggatggagactcaggacatatactctggcggtccggttcctatcatgaagctgcaagagcgagctatcgagccactgtatgagtcgaagaacgactttgagatcggatgtcttttagctgagcgaatgggatttggggacaaggtttcgtggggtcacgaagaatacctggctgcatttttcgataatgctctctgtggctctctcggttacactctcgagcaactaaagaaggaaaagacgcttgctcttctgtctcagaccgacggcaggtatccccatggtgcaaatggagtgtttccgaccgagacgggaaaactgcagttctacttggagaagtattcgcgtggagttggcttcgaagggatggacaacggtgacgaggtgaacgaggccgatgagcaatttgcaacctttatgccgcctcatgaagcgtggcgcgagaatccacttattgaaaaatatccccttcagtttatgtcgatgcgaaatcgctttactacgcattctcagttctatgacgtagcgtggtttagggaaataatgcctgagcctatcctgaaactcaatcccgatgatgccgctgcacgagggattagtgcgggagatacgattagggcctataacgatcggggatatgttgtgcttaaagctgagatcgatgctggattgcgtccaggcgtgacagtttatccgaagggatggcaggcctctcagttcatagatggccatgtttcaaacctcacttcaagctatacgattccctcaatgtataacaattactatttcgacactctttgcgaagtggagaggtgtgaggaggattagcatgcgctgtggaatggttatagatacaagcagatgtgtggcgtgtcatgcgtgtgagattgcttgcaagtcggcgaacaatgttcctgagggggtgttctggaatagagttttgaccgatggcggttcgggcatcgagacgcttgctggagagtatccgaatgggactattagcgttatgccggtgtcatgccagcactgtgaaaatccagcgtgcgttaaagtgtgtcccatgggggccacgtataaagatcccgaaacgggagtcgttcgtcaggattatgaaaagtgcattggctgtcgtatgtgcatgtccgcatgtccgtatactggtgtacgctcgttcaattgggatgagccaaagtatatgctcgacttcgcgactggcgatgctgaggttcctccccatcaggggcatactgttgagaaatgcaccttctgctatcagagaatttcgcagggtcaaacgccagcttgtatggtgctttgtcctggccgagctcgcttttggggcgatctcgatgatcccgattccgaagtatcgcgactgatacgtgaacgcgaatacaagcaactgcttcctgaagaaggaaccaagccttcggtgtactacctggtatagggtgcgtccctctcttcggcaatgcgcgcgccgctgggcgcggcgcgcctgactctaggagattctcatgtctgatttctcttctggggccatcgttgatgatgacctcgacctcagtgcggctaggggccgcaagaaggcccgcgaggcagcgggcgccaaagccgccgcatggggcggcaaggggctgaacgccgccatcggcgtttcggccgcggtgatggtcgccggcatcgtgctctggggcgtgcagctttcgggcggcatggtccagaccggcatgcgcaaccttgactcgtggggcctctacatcacctccttcatgttcttcgtgggcctctccgccggcggcctcatcatctcgtcggttcccaaggcgttcggcatcgcgggcttcggcggcatctccaaggtggccgtcatgagctccatcgcctgcaccgtggccgccatcggcatggtggtggtggacctgggacagccggctcgcctgtgggagctgttcgcctattccaacctaggcagcccgctcatgtgggacatcgtggtgctgggcacctacctgatcctgtcctgcgtgtacctgtgggcccaggtgcgggccgacgcgggcaaagtgtcccacactgctctgcgcgtgatctcggtcgtggcgctcgtcaccgccgtgctcgtgcactcggtgaccgcctggatcttcgggcttcagcagggccgcgagatgtggcacacggccctgctcgccccctggttcgtgtcctcggcgcttgtgtgcggcacggcgctcgtgatggtggtcgccatcgcgctgcgccgctcgggatacctctcgctcgaccagtcctatctggtgaagctcgcgaagctgctcggcgccttcgtgatggtggacctgtacttcttcggctgcgacctgctcactgaggcgttccccggcggctcgggggccgaggtggtcgccatgctgacggccggcccgctcgccccttacttctggacggaggtcgtcggctgcgccctctgcgccgtcatttgcttcacgccggcgctgcgcaccaacgccctgctggtcgccggctcgctgctcgcgatcctcggcatcttctgcaagcgcgtgcagctgctcgtcggcggcttccagatcgccaacctggactacgccggcccgctcactcccatgcagcacacggccttcgattccggtctcgcgggcatctatggccagatggtctactggccgaccccgctcgagttcggcgtgacgctcggcgtggtggcacttgcggtgctggtgttcctgctgggcatcaagttcctgccccttcgcccgaaagacgacgaggcgccttccgagtaaccgtccctcttatgtgcaggcccgcgccgccccttcccggcgcgggtccctttggtgagatagacttggcacattcgcgagtgtggtttcggaaggaatgatctccaaaggggctcgcgggaaataaaagtggagcgcgggggcgagattttcgagttgttaggtgtcgatgtgcgcgtcgtcggccgcatcgacaaggagaaaactgtgcgacctggggtttttatcctccgcttcctctgtgagccttccgaatgcatgggcaaacctctaacaactcgaaaatcttaacccgaaatgattcgaaaattgtctggctcagtgaaggggaggaggtttgcgatgcctaagaagttggtcgctgccgttgtcttggcggcgctcgtgatcgcggtggcggtggtcggttttgcagctgtgccttcgtcggctatccagcccatcgctgcagattccccgtgtcccgccgcggggtgcgcatcgggcgtgtgccacgggttcgacgcggtgcccgagtccgacggcgtgcacgagatgatgtgccctgaggccggctgcgcgtcggtggagtgccatgggtgggactcgctcatcgggcgctaccaccaggcctccgacatgtcgctgaacgtgtggattctcatgcccgtggcgctggtgctgggtttgtggctgcttgtgcgccgcatgggtcgcccgggtcgcgtccatgacgatagtagggccgatgacgggatggctgaagcgtcgtcgcccgtcgcatcgtccgagcggcattgcgcagaaaacttgatgaccgctggcgaagaggaggcctgttgtgaagcgtagccatgtgctgttcgacgtggtcgtgcttgccgtgtacctgctggcggccaatccggctcttacgggcattccgccgcacgagctcattgggctcggtgctttcatcgtggtcgcggcccatgtgagcgtaagcgccgacggcctgggtggccgcggacgtgtgggacagctcgctttgaacgcggtattgctactgtcgttggccgcctgcgctgtgtccggcgtcatggtgtcggggacggtgctgccctccctggggctgtacgcgacgggctaccacttttgggatccgcttcacgcggtggcggccaaggtgctcttggcggccctgctcgtgcatctggtcgtgcgcgctcccgccgcgctggcggttctacggcaacgcaggggtcttcgcgctgcggaaagcgattgcctgatgggcagctgatccaagttcgtcttccaccccgcttttcttcgctatactgtgccgcagagaaatcgacggcgcgcttgcgatgggcgatgccggacggcggaaaggagcggggccgtggcatttggaaaagaagaggtgtgcgcgtatctggacgaacgaggggttgcctacgaccgggtcgatcacgaggcggtgttcactatgggggcgatggacgcgctggaattacccttcgccaatgcggtggtgaagaacctctttctgcgcgacgacaagaagcgcaactactatctggtcgtcatgcccgatgacaagccggcgaatctgaaggctttgcgggcggctctcggagcgcggcccttgcgttttgcctcggaagaggacttgcacggaatgctcggtctgcgtggcggcgcggtgtcgcccttcggcgtgctgaacgacgaggaagggaaagtgcaagtggtgttcgacgaggttttgcgcgattggccggccgtgggcgtgcatcccaacgacaacacggcgacgctgcgggtgcctctgtccgacttgctggcgctgtttcaagatcgcgccgtgccctatcggttcgtggatatggatgtggctcccgcgcagtaaagccctgttgttccggcaccttgcagaggtggcatgatgcggggacgcgaactcggccgtctgcgaggcttattggcgctaagcatggagttgcgacgctggctgcgatgccgcgctgccaatgagcgcacgcaatgctatgcttctttctaataaaacccatccgcgaaggaggaaccatccatgaccgtatccgcagatatctggcaggcgcgcgcggcgatgtgcgagcttttggcgctgtcgttccgctacccggaggacaaagtgctcgccgaggccatcgcttcgggcgagtggggtgaggccgccgacgagatcgccggcgcgctcgggatcgactggacggccgccgcggctcccggtgccgctgaggccgccgcgctgcccgacccggacgacatccagaaggagctgcgtcccgaggccacgcgcctgttcgtgggcgctcccgaggcggcgtgcagcccgtacgagggcgtgtggcgtgcgaagaccgagggcgtgcagccgctgctgttcgtgaacccgcactccatggccgtggagcgcttctgcaaggcctgcggcttgggccgtcccgagggcaccaacgagccgctcgacgctgtgtggactgagttggaactgctggagtatctggccctgcgcgcggcggccgatgccatggacgcagcggccgaggacgacctcgccgctggcggcgacggcgctcccaccgaggagcaggccgagcagtacaaggagatcggcgacgagattgacgaattcgacgcggaggacgacggccccgagcccggcgacgtggtggcctcggccgacttgcccggcggctcgcccgaggcggcttgggacgagttcatggccgaccacgcgaaggtgtggatgccccagttcgccgaggcctgcgaggcggattcccgcgtgccgttctacaagcaggccgccagcctgctcgccgccttcatcaaatagcgccggcttctacgatattgagctatttcgagggaacctgctgcaaggttccctcttttttgttcgcatccccgtgtgtctaaaacggcattttccggcccttcggagaaagtgattgcgacctggcgatatggccataaaatgccaggtcgtggttggtgccgcattttagagttttagacacgaggcttcggcggatgggtcttgttgaactgggcccagacgccggaatagaggatggagtccataaggtgcgcgtcctgcaccagcggcaggcgctcgtagggggcggctgcgtcggcggcagcgagcgccagcgtggcgcgcacggcctcggcgtccgagccgagcgccacgaaggggttgtagctgcctgaagcggcatcgtcgtcgaagtccacggcggcgtccatcaagtagatgaagcgcccgaggccgcgccccagctcttccatggttttggtccaggagccctggttatgggtgaatagccgcccgagcatccgcccgaactcgtgggccgcggcatcggggtcgaatgcgaggacggtatcggttgcgtctgcactaaaaggagagtcgcaagctgttccggcgccgcccgaaagagcatcttcgttgctgcgcccggcctcttcgatagtccggatagtcgccatggcccgctctatctcggcgcactgctcggggatgcgtgtccgggcccgctcgtaggcgccggcgagcaggcgctcggccgcccgggccttcaaagcgccgtcgtcggctatgtcgtcgagtaccttgtggtaggcgagcgccacggaaaggtcggcggcgtaatcggtccaggtcgagcgcgcccagggccgtggagccgccggcgccgggtgcatcacgcaatggctcgcgcccttcgtctcgacaggttcgtgaagggagttgcacagcagcacgaagaaggtgaggtcgtaggtcagacacgcccgcgacagctgcccgtaccggtcgcgcagcgcgaggcacagcccgcagtacaccgcccggtagcgctccttctcctcctcggaaagcgcccccgcatccgccgccacgaatccgaacatgggcgccccgcttactccggctttttcgctacgtggacggcggcgatgccgccggtgtagttcttccaggtgacgtcggtgaagccggcatcgcgcatcatctctgccagcccctcctggtcggggaaggcgcggatcgacttcgccaagtacacgaagccctccttgtcgccggtgaccagcccgccccagagcgggataagatggcgcaggtagaagtggtacagcgcccgccatgcgccattgggcggcgtggagaactccaggcacacaagcgagccgcccggcttcaacacgcggaacatctcggagagcgcccggggccggtcgggcatgttgcggatgccgtaggccatggtgatgacgtcgtaggaggcgtcctcgtaggggatgttctgggcgtccacaacctcgaaatcgatgggcacgccggcgccgtccccctcgtcgatgtgcatgcgcgccacgtccagcatctcgggcaccaaatcggtgcactggatatggcgcgggtgcttggtgcgggccacggtgaaggtgacgtctccggtgccccccgcgatgtccagcacgtcgtggctctcatcgatgggggcctggcgcatcatgcccgcgagccacagcttgtaggcgccgaagctggagagggcgttgaaccgctcgtatttccgggcgatatgcgagaagatgtcgcgcacgcgctcgctggaaagctcggccggggcctcaagcccggtggcggtgtcgatggtcataggtgtaaaactccctcgtgcggcgtgccgatcccgcaagatcgcgcctttcgtatcgtcgtttggccccagtatagggcactcgcccgcaaatcgagggcgcatatccctaggcggcgcggcgccgtgctatcatgggtggctaattgaacacgcccctcatgaattgggaggtaccatgcttctgtgtgcccagtatatcctgccggtttcttccgagcccatcatcgatggcgcggtccttgtgcgcgacggcgtcattcgcgacatcgggaaggccgagcaattgcgcctgcgctaccccgaggaagaggtcgtcgaccagggcctggccgccgtcatgcccggcctggttgatctgcacacccgcctcgagcagtcggtgctgcgcggcgtggtcaacgatgcgccctatgtgcagtggcttgcggaagtggcccagaaaagcgggcgcatggaagcttccgactggttcgactccgccatcttgggcggcctggatgctctctccggcggcatcaccacggtggccgacatcacgctgaccggcgcctcctgcacggccgtgaacaagctcggcctgcgctcggtgatctaccgccaggtgggcgccatggacaagaaccgcatcgacgcggccatgcagttcgcccagaaggacatcctgcactggcgcgaggaggtcgactccgaccgtgttaccatcggcatcgccgcggcgcccctgttcaccaaccacccggccatgctctccgccatctcgaaattcgccctcaaggaggatctgcccgtggccctgtggctcgccggcagccgcgaggagtccgacttcgtgcgctacggctcgtcgcccttccaagtacacggcggcgatgtgaagcgcggttacgtggagatcccgccctggctgcccaccggcgtgagcccggtgcgctacgccctcaactggaacgccttcgacgccgacaacgtcatgatcgtcggcgcggtctacgtggacgacgaggatctgaagaagctgcgctcccacaacgtcgctgtctgtgtgtgcccgcgggcctcggcccagctgggtatgggcgtagcgccgcttgacgagtacatccgcgccggcctgcgcgtgggcctcggcaccgattcgccggcggccacggaatccaccgacatgctctcggagatgcgcctgggcatgctgctgcagcgcgccgtgaaccccgggcgcttcctcgactcccatacgatgctcgaggtggccacgctcggcggtgcgcgagccctcggcattgctgacaaggtagggtcgctggagatcggcaagtgcgccgacatgatcgccgtggatctgtccagctctcatcagtcgttcacgaccgatccggtggccgccgtggtgaacacctgcaccacagccgacgtgctcatgaccatggtcgacggcaacgtcctgtacgagaagaaccgctggcacgtgaaggtggaagtggcgaagagcatcgcgcgcgtcatcgagatccgctccaagctgcgccccgaggcctagcgggcgcaatcgctgagcggggcgctcggcgcagttgtgaattcgtggagggcgcgccgcggcaggcattttcgctggcgcggcgcgcctgcttctgcgataatgccatatttgcgtatacctaatgttgggaacctgaggagtacccgcgatgtcgagcaagaagaaccagatcggcgcgaagaatcccacgcgcaagcagcaggccgagcgcatcaagcaggccgaggagcgcgagcgccgcgccaaggaggccgccgaggccaaggcgcgcaccaagaagatcttcaccgtggtcgtgtgcgtcatcctcgtactcgccctgggcatccccactatggcgctgaccgtgctctcgctgtagagctgttgaaaggaaacgagtcgtgtttggaatcggcggattcgagctttttctcattctgctgttcgggttcctcattttcgggcccgataagctgcctgccatggcgaagacgatcggcaaggccattgcgaagttccgcaacgcccaagaggagatgagcggcgtgctgaagggggagatggtgttcgacaaggacgccgaggaccccttcaagaatccgctcgatgccctggacgaggcggcggccaaggccaagaagggcgccgatagcgccaagaaggccgcgagcgccgtgtcgaagaaggcggcatcaaccaccaagaagagcacgtcaaccgctgccgccggcgccgctgccgcagcggccgccaaggccgagcagggcgcgtgcgaggccgataaggccgatgccgctccggccaagcccgagagcttcgccgagcgcaaggcccgctacgacaaggagcgcgccgagcgcaaggccgccgaggaggcggagctgaagaagaaggaagaagaggagcgcaaggccgctgccgaggcccgcaaggcggaggcggccaagaagcgcgaggaggcggccgccaagcggaaggccgaggcggaggccaagaaggccgccgaagaggccaaggccgtgaccgaggctgccgacgctggtgccgctgacgccggtgctgccgacgagaagaaggaggcgtaacgatgcctatcggaccggcacgcatgccgctattcgaccacctcggcgagctgcgcatgcgccttgtgcgcatcgtggcctgcctcgccgtggccgtggtcgtgttctacatggccacccctaccatgggccagttcctcctcatgcccatcgctgagtttctgcccaacgtcgacggcatggcctcgcttcaggccatcgatcccttcgaggcgttctccgtgcgcttccaaatctcgctgtgggcgggcattgtggccacgtcccccgtcattctgtggcagctgctcgcgttcttcctgccggcgctgaagcccagcgagcgcaagtggttcatgcccaccttcgccgccgccgtggccctgttcatcatcggcacggtgttctgctacctcgttattctgaacccggcgttccagtggctcaccgaccaggccatgggcctcggctacgtggcgccgcgcatgagctcctacatcgacatcatcatcaagttcgagctcggcttcggcttcgccttcgagctgccgctcatcgtgttctacctcgtcatcttcgacgtcatcccttacaagaagttgcgcggcagctggcggacggtgtacgtggtgctcatggtcatctgcgccgtggtcacccccgacgcctcgccggtcaccatgctgctgatgttcgccgccatgatcatgctctacgagggcagcctgctcatcgcgcgggtggtgctgcgtcggcgcattaagcgccagaacgaggagctcgccgcggaagaggacgagtaagtgcacgagctgggactgatgaccggcgtcatggacgccgcagtggaggcggcccgggaggccggggccacgcggctgctcggcgtgaaggtctccatcggcgaggccaccgaggcggtggaagacgcgctcgtgttcgccttcgaggccctggccgagtccgacccgttcacccagggcgccaagctgggcctaacgatgatccgcccgcgcagcgtctgcctggaatgcggccacgagttcgagcacgacctccacaaccgcttctgtcccgtctgcgactcgttcgccacggagcttctggccgggcgcgagctgcagatcgactccatcgaagtggatttgccggaagagtaacggccgcgcacgtcgccagaatgacgcatgccggcaatcggcccgaaacaaagcgctgccatactcgtggcagcgcttttgctatgctgtcaccgttccaacctgagcgcagcgaaggatcgccccttgcgccaacccgagaggacgcctatgaacccccagcagatgtacgaggcctgcaccgccgctttgggcgccttcgtgcgcagcgccggcttcaccgatgtggtcatcgggctgtccggcggcatggattcgacgctcgtggccgtcatggcgcacgacgccttgggggccgaccatgtgcacggggtcatgctgcccggcccctattccagcgagtcgtccatcgacgacgccgaggcgctcgccgccaacctcggcatctccaacatcacggtgcccatctgcgagcccttcgaggccttcgaggcggtgctcgctcgggcctgcggcggggcgctcatcgggctggctgccgagaacacccaggctcgctgccgcatggtgtgcctcatggcgctttcgaacgcccacggctggctcatgttgaacacgggcaacaagtccgaggcggccatggggtactccaccctttacggcgacaccgccggcgccttcgcgcctttgggcggcgtgtacaagaccgacgtcttcgccatggctcgctggcgcaaccgccgggccgtggaggagggagcgtgcggccccattcccgtgaacgtgttcgtgaaaccgccgagcgcggagctcgcgcccgatcaggaggacgagaagtccttaggcgtcgattacgccacgctggaccagattctcatcgcctatgtggaagaggggaaggacgtggcggccatcgtcgccgagagcggcctgagccgcgatttggtggactacgtcatcgcccgtaccgacgccaacgccttcaagcgcgcattggagcctccgtaccctgacgcgccgttctacggcgctcccgcgtcccgttagcgaagctgcgtcccgctggcgatcccgcgtcccgctggcgaacgagccccgtctggtgccggcgttgttcaacaggctcgtttcatacaccccgtggtgtatggcgcgcggcggcgcagtcgtttaccatagcggtcatggataagatcttccgaaatacctcgaagcttacggccaccgactggctcatcgacgccgtcatcgcggcgggggccttcgggttctgctgcctgcagctcaccgtggccgtgaacctgctcattcccgacgagttcatgcgccggctcatgggcatccaggccatggtgccctcgggcctctcgcttttggccatcgcgctcaccacgttgccgctcgtgctgcggcgcaagttcccctgggccgtgttcgtgtggtgcctggtcagctggggtctgcttcaagcggagctgaacggcatcgccctgtccgtggcgggccccctcatcgcgctgttcacgctggcgtctgcgcgctcgcgggccgaggcggccatcgcgtgcgcggtcatgtgcctggtgctgctcgttgccccggcgcctccggagcagtcgcgcgtcttaacgcagctcaccgtgttccagaacatggcgctggccctggcggccgccttcgccggctatgccctccacgagcaccaggaacgcacgcgcgccatcgaggagcgcgcggtcgccgccgagcgcagccgcgaggccgaggcgcgtcgccgggtggaggccgagcgcgtctccatcgctcgggaggtgcacgacatcacggcccattcgctgtcggccgtgagcatccaggccgctgctgccgagcgcttggtcgatcgcgatccggcggcggccaaagaggccatcgccgaggtgcgccgcaccgccaaaggcgccctggaggagattcgcgccatgatcggcgtgctgcgcgcgggggaggggccggccgagacgacgcccacccagggcaccgaccgcatgggcgatttggtgtcctatttggaaggtgccgacatcgaggtcacgctggacgagaccgcctacgaccgcgcctgtgtgccggcgttcatcgacgtggccctcttcggcatcgcgcgcgaggcagctacgaatatcgtgcgccacgccggggcgcgccgtgcgacgctggcgctgtccacgaaacgggagggcttcgccgagcttgtcgtcgacgacgacgggaaggggctcgctgccccggccgccgcggccggtcaccacggcctgctcggcatgcgcgagcgcgcgcggcttctgcagggcacgttctccgcatccccaagcccgctcggcggcgtgcgcattgccgtgagcgttcccctcagccagaaggaggagacccatgagtgaggccgatcccatccgcgtgctcgtcgtggacgaccaggatctcgtgcgcggcggcttcaaggccattctcggcacctacgagggcatcgagatcgttggcgaggcccgaaacggggccgatgcggtgcaggaggcgcagcgcctcaagccggacgtggtgctcatggacatccgcatgcccgagatgaacggcatcgaggccacccgcgccattacatcgaatcctctgctcgcaaaaacccgggtgctcgtgctcaccaccttcgacgtggacgagtacgtttacgatgctctgggcgccggggcgagcggctttcttctgaaggacgccgaccccgacgagatcgtggcggccattcgcgtcgtggcccgaggcgacgcgctcatccagccctcggtgatgcgccggctcgtggagactttcgtggccgcgcgcccgcggggcggctggggcgccgccgatgtgaccgaggctcgccgcgccgcgctgacgagcctcaccgaccgcgagcgcgagattctcgtgctggtggcccggggcctttccaacgacgagatcgccgaggagctgttcatctcgccggccacggtgaagacgcatctggcccgcgtcatggctaagaccgatgctcacgaccgcgcccagcttgtcgtcttcgcctacgagacgggtttggtgacgcctgccccctagggagactgttcacttgcacaaaatccaacttggaaagtaatccctgatcaagattataatcacaggaaatttgagtgaaaaaaactcaagtttttctccgtcccctcttgcattccttcccgtagctgttatgatgcgtaactgtttagcactcgttgctaccgagtgctagcacttaacccaaccgagtggttaaattggaagttgcgcgaaggcgctacaacaaccattgaaaggacggcaagctatgaatttgaagcctctgggcgaccgcgtcatcctgaagcaggacgaggccgaggttaccaccgcctccggactgttcctggcctccgatgccaaggagaagccccagaccggtaccatcatcgccgtgggcgagggcaagatggacaaggacggcaagctgcttcctatgcctgttaaggtcggcgacaaggtcatctacggtaagttcggcggcaccgaggtgacgctggacggcgagaacgtgctcatcctgcgcgccgacgacatttacgccgtagttgaataactgagaagataaaccgagaagatagatccactgaaaggaacgcgaacttatggctaaggaaatcaagttcgataccgatgcccgctccggcctggccgcgggcgtctccaagctggccgatgccgtcaaggtgacgctcggccccaagggccgctacgtggccctggagaagtcctacggcgctccgctcatcaccaacgatggcgtgaccgtcgctaaggaagtcgagctggagaacccggtcgagaacatgggcgcccagctggtgcgcgaggtggccgtgaagaccaacgacgtggccggcgacggcaccactaccgccacacttctcgccgacgtcatcgtctccgagggcctgaagaacgtgaccgccggcgccgacgcgctcggcatccgccgcggcatcgagaaggccaccgacgccatcgtggccgccatcaaggccgacgccaccccggtgtccaccaaggagcagattgccaacgtcggccgcatctccgccggcgacgccgccatcggcgacaagattgccgaggccatggacgccgtgggcaacgacggcgccatctccgtggaggagtcccagaccatcttcggcatcgacatggacatcgtcgagggcatgcagtacgagcgcggctacatctccccctacatggccaccgacatggagaagatggaagcggtgctgaaggatcccttcatcctgctgaccgacatgaagatcaactccatccaggacatggttccgctgctggaggaagtcatgcgcgcccagcgcccgctgttcatcgtggccgaggatgtcgagggcgaggctctgtccaccatcctgctgaaccgtctgcgcggcaccctgaacgtcgtggccatcaaggcccccggcttcggcgatcgccgcaagcgcatcctcgaggacatcgctgtggtcaccggtgcccaggtcatcgacaaggacttcggcatgaccatggccgatgccacgatggagatgctcggcaccgccaagaccgtgaaggtcaccaaggacaccgcccttatcgtcgacggcgccggtaagaaggaggacatcgagaaccgcatccagatcatccgtgccgagctcgagcgcgtcgattccgacttcgaccgcgagaaggcccaggagcgtctggcgaaactctccggcggcgtggccgtgctgaaggtgggcgctgccaccgagtccgagctgaaggagaagaagtcccgcatcgaggacgccctgcaggcgacccgcgcggccgtggaagagggcatcgttgccggcggcggcgtggcgctcgtggacgccatcggcgccctggacgccgtcaaggccgatgacaaggacgaggaagtcggcatcgacatcatccgcaaggccatcgaggccccgatgcgcgccatcgcccagaacgctggcttcgagggctccgtcgtggtggagaaggtcaagagcctgccgaagggcgagggcctgaactgcgccaacggcgagtacggcaacatgatcgagatgggcgtgaacgacccggtgaaggtgacccgcacggcgctgcagtccgcggcctccgtggcggctctcatcctcatcaccgaggccaccatcaacgagatccccaaggagggtcccgatctgagcgctctggctgccggcatgcagggcggcggcggaatgtactaggccccaagcaaggaaaacttgcacgtggcttaaccgcacaaccagctaaatcgcagaagggcgcctcatcaggggcgcccttcctgttgtgcgcagatttttgctgtgcatcttggaaatcatgctttttggatcgctcagcttggaaaatgtgcttttttgttttcggaaaacacccattttgacctggtaaaactcaagaaataccaggtcaaatccctattcaaaaaagcacattttccaagctgtgctaacagccaattcgcggtcacatccttttctatgggcgttttcggcagtcgttcccaagaggggcgcgatctcctaagatagtgcgatacgcgaaaatggccccgaagcccaaggaggtttccgtggaattgttggaagagcgcattcgccgcgatggcgtggtgaaggcgggcggtgtgctgaaggtggacgccttcttgaaccaccagatggacattgagctgttctcccagatggccgaggaatggaagcgcctgttcgcgggcaagcccattaacaagatcctcaccatcgaggcctcgggcatcggcatcgccgccgtggtggcgcatcatttcggcgtgcccgtggtgttcgcgaagaagacccagtccatcaacctggatggcacgatgtattccacgcgcatccagtccttcacccacaaccgcatctacgacgtcatcgtctccacacgcttcctcgggcccgacgaccacgtgctcatcatcgacgacttcctcgccaacggttgcgccctgcgcgggctgctcgagatctgcgagagcgccggggccaccgtggagggcatcggcattgccatcgagaagggcttccagcccggtggcgacgagctgcgcgaggcaggttacgacctgcagtccctcgccatcgtcgaggctatggaccctgctaccggcgccattgagttccgctcatgagccgcaagagaaacgtggaaagcgagggcggcgtggcgttcgtcgacccgaagatgaaggcgctctcgtcccttgatggcgagatcggctggcttgcggccttcccctacggcctgcagcacgtgctggccatgttcgtggcgaacctcgcgcccatcgcgatcatcgccgcggcggccggccttcccgaggacttgcgggccacgctcattcagaacgccatgttcatcgccggcatcggcacctttgtgcagctgttccccgtctggcgcgtgggcagcgggctgcccatcgtcatgggcatcagcttcaccttcgtctccgtggcctgcaccatcgcggcgacccagggctacggggcgctcgtgggagcggtcatcgtcggcggcctcatcgagggcgtgctcggtccgttcgcccgctggtggcggcgcatcatcacacccattgtggctgctgtggtggtgacctctatcgggttctcgctgctcggcgtgggggcggcctccttcggcggcggttccggcgcggaagatttcggcagcgccacgaacctcatcctcggcaccgtctcgctcctggcgtgcctcgcgttccagggcctcgccaagggcgctaccaagcagctttcggtgctcttcggactcatcgtggggtatctggtggccattccgctgggcaaagtggacttctccggcttcgcttcggcgcagctcttctcgctgccgggagtgctgcccgtgacgccggagttcaacttgggcgccatcatcaccgtcacgctcatcttcctcgtgtccgccaccgaaacggtgggcgactgctcggcgctcacggccgccgcgctgcgccgcaaccccacggataaggagctctccggcgccgtgacggccgacggtctcgttagctcgctcgccggcgtgttcggctgctcgccggtcacctcgttctcgcagaacgtcggcctcatcgccatgaccggcgtggtgaaccgccgcgccatcgccacgggggcggtcgtgctcgtgctcgccggcttcgtgcccgtggtgagcctcgtgttcgcctcccttcccgaggccgtgctcggcggctgcaccatcatgatgttcggcaacatcatcgtcagcggcttccagatgatcgccaacgccggcttctcgcagcgcaacatcaccatcgccgcgctgtcgctggctgtgggcatcgggtttacccagatgggcgacatcttcgccatcttccccgaactggtgcagagcgtcttcgccgacaactgcgtggccgtggtcttcgtcgtggccattctggcgagcctgcttttgcccaaagatcagaaggtggaggggccgctcatcgtggaggagggcaacgattcggtggatgctgccgcagacgcgctagaatcttaggcccatggaaaccatcgcgcacatagccgggcacgtgctggagcattctctggccgacaccctgtacctcatcccgtttctgttcgtcacctacctggccatggagtggctcgagcacaagaccggcggcaagacccaggaggccatccgccacgccggggcggccgggcccatcgtcggcgcatttctgggcgtggtgccccagtgtggcttctcggccgtggcggccacgctgtacgcgggtcgcgtgatcacgctggggacgctgttcgccgtgttcctctccacctctgacgagatgctgcccattttcctggccgaggcggtacccggcaataccatcttgtccatcatgggggcgaaggtggtcatcggcatggtcatgggcttcatcgtggatgccgtgctgcgcctggcgcgccgcgacaaagagcgcctgcgcatccacgagctgtgcgagcaggaccagtgcggctgcaaccacgactgtcacacctgcgagcaggctcccgaacgcgcctacgagcaccacgacgacgtggagcacacccacgagcacgggcacggctggaagggcatcctgaagagcgccacgaagcacacggtgcaggtgacgttgttcatcttcctcatcaccattgcgctgaacgtcgtcctggaaacggtgggggaggacgcgctcgcccagtttctcggcgataacccgagcttctcggtgttcgcgaccgcgcttgtgggcctcattccgaattgcgccgccagcgtggtcatcgcccagctgtacgtggagggcgtgctgggggccggcgccatgctggccgggcttctggtgagcgccggcgttgggctgctcgtgctcgcccgggccaaccgcccctggaagcagaatgtcgccatcatcgtggtgctgtatgctacgggcgtgttctggggccttatttgcaatgggctgggtgtcgtgttctagcggccccgttgccgtccgctcggcggggccgtgctgcgccggggatcgcgaagtggttttcggcctcgttgccgttttgttaaatctgacggcccgtcaaaattgtccttgcgccgccttctcgttagtactacgctcgcaacgttaacttttctggtcatcaatgggaagaaggcgatggggttggcaggccgcggggaagtcatcgagcgacttcttgccgcccacgaggcatggttcgacgtcgatcgcgaccaccgcttcgccggacgcaccttcccaggttacgccgagttccattcctgcgcctcccagtacgtgctcgccaagcgcgcgaagctgtgggaggctgccagtcacgagcacctgttcttctgggacacgcctcgtctcacggccgccgagctggacgacctggtcggctgcatcaccggcgaggggctctccctcgtgcagcccgcacccgatcatatgacgacctatctgtcgctcgccatcgtcgccgacgccgtggacgatctcgcatgggagcgcgttcgccgcacccgcttccgcaagaacttcgcgctcggctggcggggatgggccgatctgcgcctggcggtggccgacctgtcgcgtgggcgcgtgacgaccaattcacagggaaaaccgctgggaaaaacgctccaggccaatgcgttcatcgacgacggcgctgctgtttgtgctgctggttgcggcggcgcgcgtgatgctgcgcgtaacaccgcgcgcggcgctgtacgcgatgggcatcggcttgacgcgtccgccccggcgttttcgaaagaaagggagggccgagcctgcgatggcacgcgccctctctttgaagcccagggcgagaagagaggaagtaagctatgaatgccctgatcatccttttggtagccatcgtggttctcgtatgtggctacgtcttttacggcggttggctcgccaagcagtggggcatcgaccccaaccgtcccacgccggcgcacgagttcgaggacggcaaggactatgtgcccgccgcgccctatgtggtgctcggccaccatttctcgtccatcgccggcgccggccccatcaacgggcccatccaggcggccatcttcggctgggtgcccgtgcttctgtgggtacttctcgggggcatcttcttcggcgctatgcacgatttcggcgcgctgttcgcctccatacgccacaaggggcagacgctcgcgacggttatcgcccagaacatcgatgacacggccaagaagctgttctgtatcttcgcgtatctgacgctcattttggtggtggccgccttcgcctccattgtggcgagcaccttcgccgtggtgccggtgccgttggatgacgccgccaaggctgcttcgaccgagtcggccaatatggccaacatgcgcacggccatgatctcggtactgttcatcgtggtggccgtcatttacggcgtggtcacgcgcgggcgcaagctgcccacggccgtcaacatcctgtcggccatcgccatcattgtggtcgtcgtggccctcggctacaacttgccggtcatcgcgctggacaacaccacctggatgatccttgtgggcctgtatatcctcgtggcttccgtggccccggtttggatcctcctgcagccgcgcgactacctgtcgagctatctgctctacggcatgatcgccctggcgctcgtcggcatcatcggcgccggcatcatgggcaacgccgcctcgctggacattcccgcattcacgggctttgccgccacagctggcacatccaaggtggccgcctcgggctttttgttcccggccctgttcatcaccatcgcctgtggcgccatctccggctttcacagcctcgtggcctcgggcactacctccaagcagctcgaccgcgaggccgaggcgcagcccatcgcctacggcggcatgctgctcgagtgtctggtagcggtcatctcgctgtgcgcggtggccttcgtgttctcgggctatatggatggcacttacgcctcgccgacccaggtcttcgccgcgggcctttcccagatgctcgcctgcgtgcccggactcgccggggcggagtccgtcgcttacgcgctgctcgtgctggcggtatcggtgttctgcctgacctcgctcgacaccgcgacgcgcctgggacgctacatgttccaggagcttttcacgccgcacggcatggaggcgagcgagcttaccggatggcgcgcggtgctcgtgaacccctgggttgccaccatcatcacggtggtgctcggcgtggggctggggcttaccggctaccagctggtgtggccgctgtttggtgccgccaaccagcttctggccgctttgggcctgctggccgtgtgtgcgtggctgggcaacgcgggccgcaacaacaagatgttctacttccccatggcgttcatgatggtggtgacgctgacctcgctggcgctgacggtgtgggccaagatcggccttctggcggccggcacggtggatgccgccacggtgctgcagctggtcatcggcgtgctgctcatggtgttcgccgtcatcttggccgtcaagggttgcaagaccatcttcgggaagaagcggaccgcgcagaatcgggtcgcgtagaatcgagtcgcgcagctgcaagcatcctgctgccgatctcctcgcattgctgccccagaacgggcacccgggaatcctggggctcgttttggggcatgatttcgagttgttagacataagggagcgcgctaacaggtctgtcgatcggtttggcgactgcgcgccccggcgcaactgggcaaaagcccaggtcgcaacctcgccactgctctgcagcgagattatgctacggcggaacgatcgttttgctcgacagcgagagtctaacaactcaaaattcttgcccgaaacaagggcgtggattgttcgagcactaaagtgggcatagagaattttgtttcgcaccccatagcgtgcagagggcttggcccgttatagtgtcaggaagcgaaaaacgaaacgagaggagacgcccatgaccgcactttccgccggcatgacccgcgaagaggccgccgagttgctcgccgcccacaacaaggatccgttccatatcgaccacggcgagaccgtcgagcagaccatgcgctacttcgcccgcgagtacgacccggaaaatgaggagttctggggcatcgtgggccttctgcacgacttggattgggaagagcacgacgacgagcccgagaagcacacgctgtacgccgcgccgctcatcgaggagacgggcggtacgccggaactcatccgcgccatccaatcgcacacctccgactacaacaccgatctgcccaagcccgaactgcagatggagaagatactcttcgccaccgaggagctgacgggcctcatcggagcggccatcgtcatgcgcccgagcaagtcggtcatggatttcaacgtgaagtcgcttaagaagaagtacaaggacaagcgcttcgccgccggcgtgagtcgcgaggtcatcgcctcgggcgccgagatgctcggctgggagctggacgagctgttcgcccgcaccatcgaggccatgcagtccttcgctcccgaccgcgacacgttccaaccggaggcgtagaagctgtcggacgtctagcaggttaaccgatcgagcagagtcgtctcgctgtcaggcggggcggcccttccgtttgcaaaaactttgcaaagaatcggtggcggcaggctggcaggtctacaatggcaggcggactttattcggccgcgctggcacctggcggaggtacggggcggatacgtgagcagaaaggacgcccatgtggtgcaagaagattctcgtggcctatgacggcagcgctccctcccatcgcgcgttggaggtgatgcgcgagatcgccgcccagaacccggcggtggaagtggtgctcgtccatgtcatgcgcctgttctcctccggttcggccgccgccggcatggataccgtcatggtggacgacgccatggccatacggcaagagctggaggccatcgccgccgacatggtgaatccgacggaagtgaaggtgctcaagggcacctcgccggccgacctcatcgtgaactgcgcgaaggaggagggctgcgacctcatcatcatgggcagccgcggccagggcggcgtgaagggctttttgggctcggtcagctacgccgtcaccaaggaatcgcctgtcacagtgctcattgcgaaagagggcgactgccgctaatggtctcgtctgctgccaaggtcgcccccgcgcctcgttgcgaaaggcccgcgcctgcaccgctctggacgcggaacttcgtcgccggcaccttcctgaacttcttcattgccggcaattacttcatgcttatggtggtcatgaccgcctatgcgctcacggttcaccaagcgccggccgccgtggccgccttctgcgcgagcgccttcatcgtgggcacactgttctcgcgcttcgccgccgcgccgatgatggagcgtttcgggcgcatgcccctgctcgttgtcggctgcattgcggaagtggcgctctcggcgctgtacctgctgaacgagccggtgggcgcccttatcggggtgcgcctggcccacgggttctcctacggcgtgtgctccaccaccatcgccacggtcatcaccagcgtggtgccacccgagcgcaagggcgagggcatcggatatttcatgctttccattacgcttggcagcgccatcgggcccttcgcgggcatctttctggcgaacaatttcggctacccggtggtgttcgccgtggcgagcgtgctcgtggcgctgtccattccggctgcgctgcttttgcgcccggcgcctgccacgaaggtgaaggggagcgaagcggcggccgaggctgaggtaaaggcggctgccgatgctgtggccggtgcggtggcggaggccccggacgaagaggcgcgcgaagatgccgccgccaatcgcgacgaggcgctggcggcctctacccgcgtgccctccacccacttggaagagaagatctccgccaaggtggagcattcgccgctcgcccgttttgtggaagccggtgtgctgcccatctcggtggtgtgcggccttctgttcttcggctattccagcctgctcacgttcctcacgccctacgccaccgagatcggcctggctcgggccgctagcgtgttcttcgtcgtgtacgccctggccatgttcgtcacgcgccccttcaccggccgcgccttcgaccgcgtggggccgcacccggtcatggtgccggcgttcgtgtcgtttgctgcgggcatggtggtgctcgcctttgcggccaacgattggatgatcctgggtgccgcggccctgctcggcttcggcgtgggtaccgtgcagtcgtgcgggctcgccatggccgtgcgtgtgacgagcgacgcgcggctgtcggtggccaacgccacgttctacatgctgctcgacgtgggcgtgggcatcggccccatcctgctgggcatcgtggcgccgcttttggggtacgcgaacctgtacctctgcatggccgtcgtgggcgttttggccctggctctgttcctcgtcgtcgccaaaaccgaaaagggcgcacggtaggggagggctctcgcgcccgcgtctccgtctctcggcagacaatgaaaaagccgccccgaagagcggcttggcgatgcaaaaatggctggggtactaggattcgaacctaggtagctggtaccaaaaaccagagtcctgccgttggacgataccccagtgccgtatcgaacgagaagtggtgggccctgcggggatcgaacccgcgaccttgggattaaaagtcccctgctctaccgactgagctaaaggcccacttctttacgcaatcgcatagtctaccgctccgtgcgattccggtcaatgagcaatcggcccacggggcatccccgtttttgtgcaaaacacggcagatctcgtaattggaggtgttggatgaggggtttgtgaaaagtatgacctgggaaaacgtgtcttcattcttgaagaacgtgcgttccgcactacgagaactactgtgttttgcacgattggaggcatcggaagcccagagcgtcgacgtgccggtgtgccggggcgtcgacgcgtcggtgcgacacagtgccgggatgcagggttgcagaatagtagcgatgccatggtgtttcgcgacgcgcaagtcgcaactggtaaacttaaccgcgaacatcagggatggcggggccgcatggccgccgcttcagggcgccgcgccgacgcccgacgcatttcgggaggcaactatgctgcacgcccacgacgaatcagttcgcgcccacctgctggagggcggtttcggcctggaaaaggaatccctgcgcatcgacggcggcggttttctcgcccatacgccggccgacttcgccgacgacgtgcatatcgtgcgcgacttctccgagaaccaggtggaggtgaacacgccggtatgcgccacgccggccgaggccatccaatcgctggagcactacaacggcctcgtgcagcgggccatcgcgaacttgccggagcgcgagcttctatggcccttctcgaacccgccctacatcttgaacgagaaggacatccccatcgcccagtacttcggcgacgatgccagcaagacggagtaccgcgagtacctctccgaccgctacggccgctacaagatggccttttccggcattcatcttaactactccttcggcgaggcgctgctgcgcgccgactacgaggtcgcccgtgcggagagccccgacgctcccgccaccttcgaggcctaccgcgatcagttctatgtgcgcctggccgagaactgcgtggcgtacagctggatcctcacggcggtcatggctgccagtcccgtcatggactcctccttcgtggagaagggcaagatcggcggcgatttgtttcaggggctcgctacggtgcgctgctcggagctcggctactggaacttcttcgcccccatcttggactacacgagcgcgaaggcctatgcggattccattcagagctacatcgacagcggcatgatccgctatccctccgagctgtactatcccatccgcctgaagaacttcggcccctacagcttagacggcctgcgtgagggagtcagccacatcgagctgcgcatggtggacttgaacccgctcgtgcgtgccggcatcgacgagcgcgacgtgctgttcagccagctgttcctggtgtgggccgcctcgcttcctccggcggacctcacggtgaaggaccaggtgcaggccgtgcagaacttcaagaacgccgcccactacgacctgaagaccgtgaagatcgtcatgcccgacggctccgcgcactccgtggtgaaggcggccaagcgcatcattgccgccatggaggagttctacgccgacttcggcgagtcggtgcacgactgcctcgccttccagcgccgcaagttcgaggagcccgagtgccgctacgcgtggaagatccgcgagcagtacggccagggcttcgtagcccgcggcctccaactcgcccgccaacgccaacgcgagtacctggaagagcggtaacgcgcccttgcgtcacctcacgccctgtgctatcatgccctcttgccgacaaggcggcagcgcttaggcagcgcaaataatacctggcggctccggttgatcactgagagctgcgcggctcgaccgcgggcctgacaagcaggtcattttcaaagccaaatccgctttttggttttttacgcccttgtgcgattttttcttcaaatcctcttgcctttttggtactatcttgcgttgctgctttatcagtccgttttggaggagcaacttttggctaaggaagatgtaatcgaactcgagggcacggtgctcgaagccctgcccaacgcgatgttcaaggtggaactcgagaatggtcacaccatcctcgcccacatttccggcaagatgcgcatgcactacatcaagatcctgcccggcgaccgcgtgaccgtggagctgtcggtgtacgacttgaaccgcggccgcatcacctaccgcttcaagtaatccccctccggcccggtagggcgcccccgcgcgaagacccggatccttcgcgcgcggtcacagctgagaaaacactcgccagcggctgggcgtgcacgtatagaacgatccgcataccgaaaggaaacgacatgaaggtacgtccctcggtcaagaagatgtgcgacaagtgcaagatcatccgacgccatggcaagatcctcgtcatctgcgagaatccgcgccataagcagcgtcagggctaggaagaaaggactctgaacaaacatggcacgtctcgttggtgtcgatcttccccgcaataagcgcattgagatcgccttgacctacatttacggcattggcctcactacggccaaagagatcatcgccgctaccggcgtcgatcccgacattcgcgtgaaggacctttccgaggaagacctcgcgaagctgcgcgactacatccagcagaacctcaaggtcgaaggcgacctgcatcgcgaggtttctcagaacgtgaagcgcctgatggagatcggctgctatcgcggtctgcgtcatcgtcgcggcctgcccgttcgcggccagcgcacgcacacgaatgcccgtacccgcaagggtccgcgcaagcaaatcggcggcaagaagaagtagtgaggtaagcaaaccgtggctaagaagcaagtacgtactacgcgcatcaagcgctctgagcgtaagaacattgccgtgggcgccgctcacatcaagtctacgttcaacaacaccattgtctccatcaccgatccccagggcaacgtgatctcctggcagtctgcgggcaccgtgggcttcaagggctctcgcaagtccacgccgttcgccgcgcagatggccgccgaggccgccgcgaagacggccatggagcacgggctgaagaaggttgccgtctacgtgaagggcccgggttccggtcgcgagaccgccatccgctccctgcaggctgccggcctcgaagtggccagcatccaggactgcacccccattccgcacaacggctgccgccccaagaagcgtcgccgcgtgtaactgaaaggatcgtacattatggcaatcaacagaactccggttctcaagcgctgccgtcagctgggcatcgatcctgtggtgctcggttactccagcaagaaggaatccatccgccagcccaagcgtcgccgcaaggagagcgagtacgctatgcagctgcgcgagaagcagaaggccaagttcatctacggcgtgctcgagaagcagttccgtgggtacttcaagcgcgccaagtccatggagggtcagaccggtgagaacctgatgaccatcctggagacccgtctcgacaacgtggtcttccgtctgggcttcgcccgcacccgcaaggaagcccgccagatggtgacccacggccacatctgcgtgaacggccgccgcgtggacatcccgtccttccgcgtgcgtcccggcgagctcgtctcggtggcccccaaggccaaggagcttctcgtggtgaagagcgctctggtttccaacgagcgcgttcaggtcccggcatggctggagatcgacatcgagaagctgcagggcagcgtgctgtccctcccgacgcgcgaccagattgatctggacatcaacgagcagctcatcgtcgaactgtactcgaaataatcgcgacttttttaggaggctacccatacatgacagagttcatgaggcctaccgttaccacggaggaagtcaacgacaccgttgcccgctacatcgtcgagccgctcgagcgcggctatggcaacacgctgggcaactccatgcgtcgcgtgctgctctcctcgctggacggggctaaggccaccgccatccagatcgagggcgtccagcacgagttcactaccgcggaaggcgtcatcgaggacatcgccgatatcgtgctgaacgtgaagggcttggtgttctcccgggtgtccgacgaggccgacgaggcgaccgcgcacgtgttcgccgagggcccctgcacggtgaccggcgccgatctggaggtgccgggccagttcaacctggtgaaccccgatcacgtcatcgccacggttgccgacggcggccagctggacatgaccatccgcatcggtgtcggtcgcggatacgtgtcctccgagcgcaacaagcgcacggaggatcccatcggcatcatccatgtggactcgctgttctcgccggtgcgccgttgcacgatgaacgtgacggacacccgcgtgggccagcgcaccgactacgacaagctggttctggaagttgagaccgacggctcgcttgcccccacggaggcagtgtgccgcgcggccaacatcatcaaccagtacatgggcgcgtttttggctttggcttccaccggcgaggaggaagagggcgaggctccctccatcttcgcgccggagggtcaggagtccaacgccgagcttgacaagcagatcgaggatctggacctttccgtccgctcctacaactgcctgaagcgcgcgggcatccattccgtgcgccagctcgtcgagttctccgagaacgacctgctcaacattcggaactttggtgcgaagtccatcgaggaagtgaaggacaagctcatttccatagacctcaatttgaagctttaggagacaaagagttatgagacacaacaagaagggtcgcaagctcggtaccgactatagccacactaaggctatgaagcgcagcttggtttccgccctgttcctgaacgaccgcatcaagacggtggagtcccgtgccaaggagatccgcccgcaggtcgacaaggtgatcacctgggccaagcgcggcgatctgcactcccgccgtctggccatcgcctacctgaacgacaaggagctcgtccgcgagatcttcgagaaggtcgcccagggcatgttccaggaccgtcccggcggctacacccgcatcatgaagctcgggccccgcaagggcgacaatgcccccatggtcatcatggagctcgtgaccgagccctgcgtgcccaaggccgagcgcaaggccgcggccgagaagaaggctgctgccaagaaggctgccccgaagaaggtcgccaagaaggccgacaagtccgaggagctcgccgaggatctgggctttgaggccgacggcaccgtcgagcagctcgaggctgtggacgccgccgaggccgttgccgagatgaccgatgccgagaaggttgaggccgtcgaggagaagaaggccgaagaggccgaggcgttccgcgagaccgaggagaccgccggcgattctgccgaggctgccaaggaggccgagacctccgaggtggagaaggccgaggaagagaaggccgacgtcaagagcgagtaatcgttcgactgggaacttcggatgcgccgcgcgcccgccagccgcaaacgcagggcgcggaagcatcgttctataccggagaagccgcctgagggcggcttctctgcgttctctccccgtagggggcgaccttggtcgccccttgccgcaagcacggcatgactcgcgatgcggctctgtgacggcaaagcaacgcgcgtccaaccagtgaattactatcggctcgctcaagtttaggttgctgcgcaggcccatagaatactccttgcaagggcaaccgatcttgctcctgcagtgtaagtacacgggtatcgcaccgattgaaaggagccggatcatggctgacaaggatacgctgatggaggagttcgttgcgaccgaggccgccaagaacgaagatgctgccaaggatctggagcgcgtcgagcaggagatcgtggccgaggccaccatgtccaccgagtacgatgacgcgctgggcaacgagcaggctgccgccgaggatgcggagactgccttcgagttcgagcaggccgagattgcggccgagcaatcgctctaaaactcgcatgcgagccgtgcggctcgccaatttgaggccggttcgctaactcgccggcttcgaaacgactccaccaagcctgggctcttccttaacaggagcccgcgggatggcttgacggaattgaaagaaggcgccccttgagcatgggggcgccttcttttgcgtccgtgcacaaaacacgagtgcttacgggagtctggccgatagggaaggggcggtatgcttgacggtggaagctctgtgggatactggcgacatggaaaaagccccgacatattctgccgcatccgagaaaggggatgcatgtgctgctcgcgctggcgctgcggaacacgcaggcggtgcgagatgcagcggcggcgaagctcggcgtgctgcgcgtatcggtgcgaaagggatgctgcgcgccgtggacgcccgcacgaagatcgggctgctcgtggcctattctgtggcgcttttctgcacgggaaacctcttgggcctgggcgtggcgactgcgctgttggcggcggtggcgttcgtcgggggcgtccccgtcgcacgtctgctgcgcgaaggagccttcgcctatcccattgtcggcttcctgctcgtctacaacgttgcagcctctggatggcttgcgggaatcgcggtcgccctccggctgcttctgctggtatgggcgagtcttttgctcatggcgctttccacgcccgcagagctttccgaggggctgcgccgcctgttctcccctttgggtcgcttgggcctgcccgtacgcgacttcgcgacgtcgctttccatcgctctgcggttcatgccgctgctttccgaggagctgagagccgtgagagccgcccaggcctcgcggggagctgccttcgaggacgcagggctcgtgcgacgcctgcgggcctacggggggctcatggtgccggtgctcgtagggctctttcgccgggccgatcgtctggccgcagctatggaggcgcgatgctacggggcctcgggagagccgacctcgcttgtcgagcgccgtttctccgccggcgacggagcggttcttctcgtcggcgttgccgcctgtgtcgctttcgcgctcgttccctaggggttcgcaacgggctcggcgtcgtcctcgttggctatcgggacgttgcgcgatcccaggatgccgagcggttcgttcgcctccggtcgcttctcgcgctttgcccgtgccggcgccagctcgcttatcagaatggccgcgaagatgaggacgaagcccgcggccatgcgccccgtgatcacctcgccgtagaacagcacgctggccagcacgccgaacaccgattccaaggacagcagaagcgagccttgggccggcgacacgtgggcgagtccgacgttctggaagagatagcacagccccgaggcaaacaccacgaggtagaacaggttgaaggcgaactccggcgtgagagccgccaggttcggcgccggctcggtgagtgcaccgaccacgagccccatgaggccaccgaagaggaactggtacacggtgagggcgaatacgttgaagcgctcggagtagcgtgagatagcgatgatctgcgccgcgaagaaaacggcgcacagaagcgtcatggcatcgccgaactcgaaggaaagggagctggtcgtgagcgacacgagcccgatgccgacgatgcacattcccgcagcgcccacgttggcgagggtgggacgcttgccggcgacgacccatagcatgaagggcacgatgacgcagtaggtggcagtgaggaaagcgttcttccccggcgtggtgtcggcgagtcccacggtttgcacccagaacgcgaggaaagtcacggcggcgagcaccagtcccgccttgaggcacggcccgttcagcgtgccggccagcgagcggtggaacacggcggccatgagaagccccgtcaggaagaagcgcacgccgatgagctgggccgggggcagcacgtccacggcgtccttcatcaccacgaaggcgaacccccaaataatggtggccgccaacagcatgagcttgtacacgaagcccgggatatgtctcttctcagtcacagcctgccattatagtgcggcctttcgcgtttcgccaggttactgccagccaacgggggcgcaacggaatcctgttgacgggcgtgggtgtgcacggtggccgcatgatggtgggtaagcgttaaacccgaccagagaggacgtgcgctatgtactattccagcggcaactacgaggccttcgctcatccgcttccgcccgagggcgtggaaaacaagcaggcctacattatcggcagcggcctggcgggacttgctgcggcgtgctttcttgtgcgcgacggccgaatgcccggcgagaagatccacgtcctggagcgcgacccgcgcgccggcggcggttgcgatggctgggagtacccggggctcggcttcaccatgcgcggcggccgcgagatggacaaccacttcgaggtgatgtgggatctgttccgcgacatcccctccatcgaggatccgtccgtgagcgtgctcgactactactattggctgaacaagcgcgaccccaactactcgctgtgccgcgccacggtggatcgcggccgggacgcccataccgacaacaagttcaacctgtccgacaaggcctgcatggaaatcatgaacctgttcttcaccccggaggaggagctgcaggacaaggtcatcaccgagtacttctccgacgaggtgctgaactcgaacttctggttgtactggcgcacgatgttcgcctttgagaattggcactcggcgctggagatgaagcgctacgtcacccgcttcgtgcaccatttgggcggcctgcccgatttctcggccctgcgcttcacgcggtacaaccagtacgagtccatgatcctgcccatggtgaactaccttgaggcccacggtgtcgacttccagttcaatacccatgtgaccgacgtgcgcttcagctgcgacgacgccaaagacgacaaccgcaagctggccacggaaattcgactggtgcacgagaacaacccggcggccatcgatactgccgaggggctgcccgaagacggcaagacggctcccgtcgccgatacgggccgcgaggagaccattccgctcacggaaaacgacctcgtcttcatcacgcccggcagcctggtggcccattcctccttcggcagccaggacaagccagcccgcttcgcacccgagctcacccctggtgacggctgggatctgtggaagaagatcgcggcccagtcgccggagttcggccgtcccgagaagttctgcggcgacccggagaagagcaactgggaaagcgccacggtgaccacgctggacgagaagatcctgccctacatcgaggccatctgcaagcgcgacccgctttccggcggcgttgtcacgggcggcatcgtgtcggtgaaggactccagctggctgctctcctggaccatcaaccgccagccgcagttccgcgcccagcccgaggggcaggtgtgcgtgtggctctacggcctgttcaccgacgtgcccggcgactacgtgaagaagcccatgcgcgattgcaccggcaaggaaatctgcgaggagtggctgtaccacctgggcgtgcccgaggagcaaatcgaggagctggccgagcattccgcgaacacggtgccctgcatgatgccctacatcacggccttcttcatgccccgcgccgatggcgaccgtccgctcgtcgtgcctgagggcgccgtgaacttcgccttcattgggcagttcgccgagacgccgcgcgacactattttcaccaccgagtactccatgcgcactggcatggaggcggtgtatacgctgctcgacatcggccgcggcgtgcctgaggtgtggggcagcgtattcgacctgcgcgtgctgctgaacgcgacggtgcttctgcgcgacggcaagccggcaacggacatgaacatgaacgtgctggagaagctgctgctgtcgcgcggcctgaaggagatcgagcataccgacatctacggtcttctgaaggagttcggcgtcattccgaccaccgacgagaaccgcgatgtgcccgtgcccgctacgggtgccgtgtggccgggcatccactaggttcggaaaacagcggcccagcctgttttatgcgccccgtgcggaatgagtccgcgcggggcgcttgcgcgtgcgtcgttcgtgctatgatggtgaacgctgattagaagcatcaaccaaccttcaaggaggcactacatgagcgtcatcatcgatgtgtacgggcgcgaggttctcgactctcgcggcaaccccaccgtcgaagtggaagttgtgctggaagacggcgccttcggccgcgcggcggttccctcgggcgcttccacgggcgctttcgaggccgtggagctgcgcgactgcgacaagagccgttatctgggcaagggcacgctggatgccgtggcccatgtgaacaacgagatcgccgacgtgctcatcggccttgaggccgaggatcagcgcatggtggatgccgccatgatcgaggccgacggcacggagaacaagggggccttcggcgccaacgccatcctgggcgcgtctttggccgtggccaaggccgctgcggaggctgccgagctgccgctgtacaagtacgtgggcggtgcgaacgcgcatcttctgccgacgcccatgatgaacatcctgaacggcggtgtgcatgccgacaacaacgtggacttccaggagttcatgatcatgcccgtgggcgctcccacgttcgccgaggccctgcgctggtgcgccgagatctaccacaccctgaagaaggtgctgcatgatgcgggccttggcggcggcgtgggcgacgagggcggattcgcccccaacctgaagaccaacgaggagccgctggcctatatcgtggaagcttgcgagaaggccggttacaagccgggtaccgacatcctgttcgccatggatccggcttccacggagttctacaacgccgagaccggcaagtacgtgctggccggcgagggccgcgagctgacgagcgacgagatggtggactactgggaggcgctggtgaacaagtaccccatcgtctccatcgaggacggcatggccgaggaggactgggacggttggaagaagctgaccgaccgcatcggcgaccgcgtgcagctggtgggcgacgacctgttcgttaccaattccaagcgcctcgccaagggcatcgagctgggctgcgccaacgccattctcatcaaggtgaaccagatcggctcgctcaccgagacgctcgaggccatcgagatggccaagcaggccggctacgcctgcgtcatgagccaccgctccggcgagaccgaggacgtgaccatcgctgatctgtccgtggcctgcaacaccggccagatcaagaccggcgccccgtgccggtccgaccgcgtggccaagtacaaccagctcatccgcatcgaggagcagctggagggccaggcccagtacgcgggcatgaaagccttctacaacattaagcgttagagggccgagcggggctcgcattccacaaggttcgccttgggaggcgagcgcacaaacgaccaaagaagggccgcttcatatcgaggcggcccttcttctgtttcgcggcagccggttgggatcgcttttgcccgttctcggtcgacgaacccctctgtttctgcacgaaatctcgtgttataagcgtccggaatatgcaacgggactcgcggctgagaacggcttttggaaaacgcctggtcagagcattgcgctcaggaggcgcattcccggctttcaggttgcaggcacccttcagacgctgataactcaagatctcgtgcagaaaacgggtagttcgttgaccgggatttcttcagaacggccctggggagcccaaaagcacgccggcggcgtcttcgcgttgctatgctatgcggagcgggtgcccggttgcgggtcgcgggggaggaaggagatttgcaggtacatatccatcccctccgctattttctgaagaacgcgtatcgatgggttgcgaattcctcgttctatgcgactgatttctgtttgggctataccgcagcgctcggccaattccttttgcgtgagattttgactttgccgggcctcgatcatagcgcgcatgagggcggcttcaggctgaaactcgtgacgggcctccgcgaattcagggtcaagacgttcttgctcctcgacgaattctctaagcttcattgctgtacctcctgacgtagtctttccggcgctcatccgctaggcgaagttcccgggctggagtctttctcgtcttctccctgaagccgtttgttgcggcaatgatgcgattctcgaaatagaagaagatgaacctcatcgtgtcttggccgcattggcagcgaagctcatagaggccatctctcaagtgcttcgtgtaaggctctcttaggtttgggcctccttcctcaagcacttcgaaataggtggtcgccttccttcgggctttcgcgggtagcgagatgaggaaatctgccaccggacagcttccggtttccgtttcgtagaactccaacgtgtacttcatggctaccgtcctttcctaggatatgagaaatatctcattttgtcaacactagaaaggaagaagctgcgagcgccgctgcagcttctcgggctgtccttggcgtctcgcgaagttaggaactgattggtcccagtcaaacgctttatgtcaattatagcataataatgagaacatatgtttgctaatttcgaattagaaaaagcagtctcatgcggcaagccctttgttcagcgtccctcgccttctaacctaaaagccccaaccccttggcgatgttggcgatgaagtcctggacgttggtgacgatgccgcggctggcgaggctgccgcgatccaccagcttgttcacggcgaactcggcgatatcgacgcagtagaagtacacggggcgtatggtgccatcggccagcacgcggtaggaaggggtcatgttccccgtggcgatggtgtgcagcatggtggccatgcagatgaccgtggtggcgctgcggatgtggtcgcgcatggcgtcctgggcctcgtaggcgttgccgtacacgccgggcagggggccgtcgtcacggatggatccggccagcacgtagggcacgccgttgcgcacgagcgcgttcatgatgccgtcgcgcacgccctcttcctcgatgaaccgctcgatggatccccagtaacgcacgcggttgatggtgtccaggtggtggtagtggccattggggcggttctcctgggtgtcgatgtcctggccgagggacgtgtggaagtaggcgccttccaaatcatgggtcgccagagcgttgccggcgaagaccgcatcggcatagccggcgtcgatgatcttcgcgaaggcgtcgcgcgagaatccgttgaaggtgaaggccggccccatgacccacacgatggagccgtggtcgcggtcgtggcgcaaaagctcgtagagttcgtcatagtcccgcgagaacgcggtctcgcgggagcggcccaggcggaaggcgaagttgtcgtggccgcccggatgcggggcgccgtcctcggccgtcgccagcccgcggaagccgtcggtgtagacgagaatgccctcctcaccgttttcggtgcgcccgcaggcgatgaggtctccagcgcggatgtgacggaactcgcgcacgaacacgtcgtcgccttccacgacggccacgcaatccatgcgggaatcgcgggcgagcgtccattggccgctgatcttcagatactccggataaatggacatggcgtggtagccctccggggccacgaaatccttcggcgcgggcacgagcgtcacgtcgggcgcggcgacgagatgggggagagtgaagtcgggcggcgtgtagggcgtgggcgtaaagggcatagtcaccttctttctctggttggctgaggccattgtagcgcttcggccgctggttcccaaggaatgtgaagttgcgcatgcaagagatctcatgcagggaggacggggagcggtgattcgccgaagggttgtgaaagcgtgatgacttcggcatcgaaattattcccagagggctagaatgggcctatggctactgctatcgacacatccaaggaaacacacgccgacgtcgccgccgccgaggtgctgcggcggttcgttggctactacaagccctacaaggcgctcttcttcgccgatctcgtggccgcctgcattttggctggggttgacctggcctttccgcagctgctgaacttcttcacccgcgagttcttcaccgagtcgccctcggtcatcttgggcagcctcgggctcatcgcgctgctcttcatcgcgctgtacgccgcgcgcacgggctgccagtggttcatcacctactggggccacgtcatgggcgcgcgcatggaggccgacatgcgccgcgatttgttcgagcagtaccaacgcctctcctttggctactacgaccgccacaacaccggcgtcatgatgtcgaagatcaccaccgatctgttcgacatatcggagctcgcgcaccacgggccggagaacctgttcatctgcacgctcaagatcgtcggctccttcgtgctgctgttcatgatcaacgggccgctcaccgccattatgctcgtcgtcaccatcgtcatggcagcgctgtccttcgcgctgaactattggcgtcgccgcatattccgcgagaaccgcgagcgcatggccggcatcaacgccgcagtgcaggattccctcggcggtatccgcgtcgtgaagtccttcggcggcgaggacgccgagcgcgagaagttccgcgcggccaacgaggcgttcctcgacacgaagaaccgctcctacaagttcatgggcgccttccacgggctgaactcgctgttcacggggcttctgtacaccatcgtcgtggtgggcggcggttacttcgtggccaccggaacgctcgccgtgaccgatttggccatctacgccctgtacgtgggcatcttcatggcaccggtagagcagctcatcaacttcaccgagactctgcagaagggctacgcgggcttccgccgcttcatcgaggtgttggccgagcggcccgacgtggccaccaagcccggcgcgcccaccttggccgaggcctgcggcggcgaggtgcgcggcgctgtggattaccgcgacgtgacgttctcttacgatggcacccacccggtgctcgacgggctcacgctttccatccccgccggcacctcggtggcgctcgtggggccctcgggcggcggcaagaccaccacctgctcgcttctgccccgcttctacgacgtggccggcggcgcggtgaccatcgacggcgtggacgtgcgcgacgtacagttggcaagcctgcgcgaggccatcggcatcgtgcaacaggacgtgtacttgttcggtggcacggtgggggagaacatcgcctacggccgccccggcgccacccaggccgaaatcgaggaagcggcgcgcaaggccaacatccacgagttcatctgctcgctgcccgacggctacgacacgctcgtgggcgagcgcggcgcgcggctgtccggcggtcagaagcagcgcatctccatcgcgcgcgtgttcctgcgcgacccgcgcatcctcattttggacgaggccacgagcgcgctcgacaacgagagcgagcacgccatccaggcgtcgctggcggagctctcccgcgggcgcaccaccatcaccatcgcgcaccgcctgtccaccattcgcaacgcgagcctcatcgccgtggtggaggacgggcgcgtgcttgagcagggaacccacgacgagctgctggcccgcgacggcgtctacgcccgctactaccgtatgcagttcggcgattagaacgggagccgagattcgcttgaggacgcgttcgcctttctagaaaacaaaatcatcggtttcgtgcaggaaaaagtgcgatcgtgcgagttctgagggatcaaatactcgcacgatcgcactttactctgcatgaagaagatcttcgggggttttcgactcgcacaatcgcacttttttctgcacgaagggggtatgagacggttttgcgggatgcttgcctcttgagggcggaagatgccgaagctcggttggcttgtcgcagacacggaaggggcgaccgtcgcgtgcccggcttggatcgaaggtgaaaacgtcgctctttttagtcgcggttatcctgcaatagttataatgattcccagtgaaatgacgacggttggattccgcggccgcggcattgctgcagcgcggtggtgtggtggcgtggaagggaaggaccgatcctgtgagagaaatgattccgctagaagaggcccgtgcgctcgtgtgcggggctgtggagaagttgcccgtggaaacggtggagctgctggacgctgtcgggcgtgtggtggcggccgaccagacaagcgacatcgacgtgtcgcccttcgcgcactcggccatggacggcttcgccctgcgcgccgccgagattgccgatgccgccgaggagagccccgcgatgctgcgggtcatcgccgaaatcggtgccggcgacgtgttcgagggaaccatcggggaaggcgagtgcgtgcgcatcatgaccggcgcctgcctgcctgccgacgccgatgccgtggtgaagtacgagatcgtgggcgtggtggaaggcgacggcaaacccggctcggtggtgtcgttctcggccccgacgaaagtggactccaacattcgcgccgccggcgaggaagcccatgcgggggacgtggtcgtggaggcgggcgatgtgctcaccgccgccggcgtcggctttctggccggttgcggcgtgctggaggtgcccgtctaccgccgaccgcgcgtggccgtcattgccacgggcagcgagctcgtgccgccctccgaggtgcccggccccggcaagatccgcaactccaacagctacgccatggccgcctgcgcccgggaggccggcgccgaggcccatatgctccccatcgtccaggacaccttcgaggccctgcgcgacgccgtggcgcaagcggcccgcgagtacgacttcgtcgtcaccacgggcggcgccgccaatggcgacttcgacttcatcaagccggtggtggccgagctcggcgagcttctgatgaccacggtgaacatgcgtcccggcaaggcccagacctttggcatcgtggagggcacgcccgtcttcggcctgcccggcaacccggcggccgcctacgtgggcttccaaatgctcatccgcccggcgctgcgcaccatgcagggctaccgcttcatggatcatcccgtcgtgaaggcgcgcctcactgccgacgagaagaaccgcgacccgcgccgcatctacctgcgggcgaacctgacgcgcaccgccgagggctatgaggtgacgccggccaagaaccagagctcgggattgttcggccccatccagaagaccaactgcctggccgtcatgcccgagggcaccgagcctcaacctgcgggctccatcgtcgattgcctgctgctcgatattccggaagaagtcgttctctaggagaagccatgaccatcaaattcgccatcatcacgtgctccgatacccgcactttggaaactgacgaggcggggcagaagctggagcagctcattgccgagcagggctgggagtgcgtccgccgcgttgtggaaatggacgagcgcccgttcatcgccggcgcgctcatcgacgcctgcgacaacaccgacgccgacatcgtgctcacctgcggcggctcgggtctctcgctgcgcgacgtgacccccgaggccacccgcgacgtggccgaccgcgaggtgccgggcatcgccgaggccatgcgcgcccacagtgtcgccatcacgcccttcgccatgctctcgcgcgccatctgcgcccagcgcgggcacacgctcatcatcaacctgcccggctccactaaggcggccaccgagaactgggaaggtatcgtggaggcgcttccccatgccgtgaagatgatggccggcgagggccatagcacgcagaaggatctctcggagaaactcgccgccgccgcggcccggggcgagctcgggtaaggcagcgggcgcgcaagggcctttggcttcgaagtcgcgatggagggttggctgcggatgtgcttgccgtatggctttccgggactgggttctcgcggtcggaagtctttgtcccgtgccaaaagagcgcgttcccgtgcgtcgggtctgcgctatacttcatgaggaacgtgttctagatgcggccgcgctcgatagggctcggctgtttgaggtggtagcactatgactgatcttcccaacgggttcacggggttttcgcaccgagatccgaacttcgtgtccgcgggcgacgccctgcgcggctcgcggtacgacgacacgccgttcgcggcgcgcaagcaggcccaggcccgcaatctggccgaggcttggtcgccggcccgcgccgagcgcgtcggcgcgggcgttgctgcagagggcggctccgatgcagtcgctcgcggggccggagcgcgccccctgtcccagctgtcctcggcggccagcgatgtgctgcgcttcgctgagcagggcacggcggctgccggcgctccgcgcttcgatccggacaagctcgcccgcattcccgaggtggatcggcgctgggcctgggtggagatcgacctgaacgccatccgtcacaacgcctcggccgtgaagcagcgcctgaatccgggtacccggctcatggccgtggtgaaggccgacggctacggccacggcgccgtgcagtgcgccaaaacggcgctgaactccggggccgagtacttgggcgtggccacggtggacgaggccatcgccctgcgcgaggcctacgtgaacgcccctatcctcattctgggcgagcccccggctatggccatcccgctgcttctggcctacaagatcatgccggcggtctacaccgccgagttcgccatccgctacgccgaggccgccgacgccttcggggtgtccgcgcccttccatatgaaggtgaacacgggcatgaaccgcatcggcgtgcgttgggacgaggtcgtggaattcgcgcgacagatatcgttccatcgggcgctcgatctggtgggcaccttcacccactttgccacggccgactgccccggcaccatcgatttcgagcggcaggtcaagcgcttctcggaagccgtgaacgccctgcgcgcggccggcatcaacccgggcatcgtgcacgcggcgaactccgcggccgccatccgctacccagaggtgcagctggacatggtgcgcctcggcatttcgctgtacggattctacccgtgccccgaggcctacccgatgatcgatctgaagccggccatgagcgtgaaggcccgcatcaccgatgtgaagacgctgccggtgggcgagggcgtcagctacggcctgaactaccgcagccccggcgccgtgaagatctgcaccatgcccatcggctacgccgacggcttccgtcggggcctttccggtcgcaccgacgtgctgctggccggccgccgcttccaccaggtgggaaatatctgcatggaccagtccatgttcgaagtgaacctgcgccagcgcaacgacctcgacccgcagatcggcgatacggtaaccattgtgggagagcagggcgaagcgtctgtcaccatcgaccagatggccgaaacgctgggcaccatccagcacgaggtggccatcggcttcggttgctcaagactgcccagactgtacgtgtagaaggcgctcgcccgaggcgagtcccaaaaaggaactcaagaaagaaggacgcccgatggagcacccctacattccgctagaagacctgcaagcccaagtggccgcctgccgccgctgccccttgtgcgatggccgcacgcagacggtgttcggcgtgggcaatcccgaggcccgggtgctcatcgtcggcgaggctccgggcaagaacgaggatttgcagggcgagcctttcgtgggcgccgccggcaagtacctcaacgagcttctggccatcgccgggctgtcccgcgaggacgtctacatcgccaatgtgctgaagtgccgtcccccttccaaccgcgatccgcgtcccgaggaaattcaggcctgcacgccgtttctgcgcgagcagacgcgcaccatcaacccggagtacatcgtcaccctgggcaacttctccacgaagttcatcctgaaaaccgatgtgggcatcacgcgcctgcacggcacgctgcagcgggcggggcgcttcaaggtgttccccatcttccacccggcggccgcgctctacgacagcaagaagcgcgaggccttggaaaacgacttcgccaccttaggcgagctgctgcgcggcgaggtctaaggcgacccaaaatcgcctagagccatctcttccgcttgaagaacagcaccatcaccacgatcatgaccagggccagggtgatgatcgtggccgccatataaggccaatcgagtcccggcagcacggtgaggttcatgccgaaccagccggtgacgagcgtgagcggcgcgaacatcaccgtgacgatggtgagaatctgcatggtggagttctgcttcaagtcgatctgcgtctgatgcagctcgtaaagctgcaggctgtactcgcgcagcatgtcggcgcggtcggacaggtgattcgcgtgggtggtgatgtgcccgaaggtgcgggcctcctcgcggctcatcaccttgttctcgttgtcggcgatgaggtcggccatgacgccgatctgctggtagtaggagcccatgcgcatggcggcgcgccggtagctcatgatggtctgcgacgagatgtcggcatggtggccgatcatggcgtcctcgaggctttccatggcgtcttccatggaggagaaccagctgaaatcgtcggcgatgagcgtcttcatgaaggcgtacagggtatgcgaggtggtgggcttcgtgaggatgcccgtggcggccactttgtccagggtcttctgcgcgatgtcgccgtcgtcgatgaggatgaggtggtcggcttccaggtagaacgacatggtgtccggatcgcccgtggggtcggatttgtccggcaccgaaaacgagccgatgatgtaggaggggtacagctcgacgaagttggccgccgccagctcgagcgccgccagctctgcccgcgcctccggggcgatatgcgtgagctggctgaactcgtgggaggtgaggatcttgaccaggggcggcttgcagctttcctcatcgcagggcgtcgccagcggattcggccggttcaggtcgtaaatggctgccatggctcctcctctcgtcgcgcggcctctcgtgcccggaacctagtatagaatggagccgtgatatgccccatcggttaccgggtttgtaagaaaacggtagccgcgttattgaaggagaacgtgccgtggaagatgcgcgccacttcgaccccgttgcctggataaacactccgcgctggcaggcctcgcgcctggggctctcgcgcatggtggatctgctggagcgcttggggcgcccccaggacgagttgcgcttcgtgcacgtggcgggtaccaacgggaaggggtcggtgtgcgcgtatgtggcctcggtgctgcaggcggccggctacaaggtgggcctgttcacgagtccgttcatcctctgcttcgaggagcgcatccgcgtgaacggggaaaacatcacgggcgaggagctcgcccgggccgtggcggcggtgcgcccggcggccgcggccgtggaggcggcgtgcggggatcatcctacggagttcgagctcatggcggcggtggccttcgagcatttccgcaccgtgggctgcgatatcgtggtgctggaagtggggctcggggggcggttggacgccaccaacgtcatcgagactcccgaggcgagcgtgatctgccgcatcgggctcgaccataccgatttgcttggggacaccctggccgccatcgccggcgagaaggccggcatcgtgaaggcgggagcgcccgtggtgagctggccccaggagagcgaggccatggcggtcatcgaggccgtggccgccgagcgcggttgcgaacttttcgtgcccgacttcggcgacttgtccgtggagccgctcgagggagcggccctgcgccggttctcgtggaaggggaggggattcgagacgcgtctcctcggcagctaccagcccttcaacgcggcgctggccctgacggcggtcgacgtgctgcgcgggcgcgggtgggccatctcagccgaggccgctttcgcaggcatcgcctccgcccgttggcccggccgtttcgaagtggtggataccgcgccgcttaccattgtggacggtggtcacaacccccagggggccgaggccctggccgcctcgctcgccgatcttctgggggaggaaggacgcgcctcggtcgattttgctttgggcgtgctggccgacaaggactacccggccatggtgcgcgccgtggcgccgtgggcccgcagcttctcggtgtacgccccgaaaagccctcgcgccctggcggtcgacgagctggcggcttgcgtgcgcgagattatggtggaagagggccgggccgatgacgtgcccgtgcgcacgtgcggcgctcccgccgatgccctgctcgcagcccgcgacgccgccggcccggaaggctgcgtcgtcgccttcggcaccctttacgccatcgccgacctcatgggcgcgttgtagcgagcttgctgtttgcgaaaacgacttgatgcatgaaaaagggcgcccccgaaagagcgccctccgaaagtacgaaaagcccgcggaccgacgcgtcccctagggccgcgtaccggtgacgtcctcggcttcctcggcctcggcctcgtcgcggatctcgtgcacgacgaactccgccacgccgccctcggcttccagcacctcgcgcacatcgtcgaccagatcctcgtcgccgcagccgagaaccacgtcgtcggccatgtcggcggcctcttccccggccgtttggcgcaccacctcatccagcgaggcggacacatacgagatgccctggcgctcggccgccttcgcctgcatgaacaggaacaaaaagccgatcacgccggccagaagcgaggccgacagaatgccgatcttcgcatcggcgatgagcacggcctcggggaaggcgaggtttgccacgaagatggccatggtgaagcccacgccgcccaggatgccggcacccagcatatggatccagttaacatgatcgggcaggttggcgatcttcagcttcaccgtcaagaagctgaagagcaggatgccgatgggcttgcccagaagcaatccgaagaacacgccgaagaacaccgggctcgagaccatggcgagaacatcgccgccaaggaagctcacatcggcgttggtcagcgcgaacagaggcagcacggcaaagtacacccacgggtacagcatatgctccaagcgcgtggccgggggtaccacctgacgagcaacactggagagccgggtgacggtgaacatgtaatccttctgaagcgtcaccggctcggtctccacataggcggcgcgcgcctcgcgaacccggtcgcccgaccaggtcatgaacttctgcagatcgacgcgcgaccccgtggggatcgtgaaggcgagcagcacgccggcgatggtggaatgaacaccggacatgaacacagcgaaccacaacaggcaacccaccagcatgtaaggcgtcagggcgtacacgtgcgcccggttcatcagtacgagcaccacgagaatggccgcagcgatggcaagccacatgagcgaggggctctggccgtagaagatggcaatgacgagaatggcgatgatgtcgtcggccacggccaaggtggagaggaacacgcgcacgccgttgggcacgcggttgccgagcagcgccatgatgcccaaggcgaaggcgatatcggtcgccgtcggcacgccccagccgtgggaggtctcagggttggtggcgttgaagatggagtagatgacgataggggccagaacgccgccgcaggccgcgatgatgggcagcgccgcctggcggatgttcgtgagctcgccgacggtcatctcgtatttgatctctagccccacgagcaggaagaacaccgccatgaagatgtcgttgatgatatgggccagcgacatctcgccgataaagccgccgacgcccaccactacatgggtgtgccagaactcctcaaagggctcgaagaacggcgagttcgcgataacgagggccacaatagccgccgccagcatgatggccgccgccttcgtggacgaactcgtaaattggatgactttcaaccagcgacgctgatgcccctggacttcatcaatgaagatatgatgcggatcgggattcttcgcagtgggttccatgccttacatcctcaatttctcttaccgactcagccgcctgcgagcaagacggcttcacagatatccgttaattgtaaccgctttccctttcgcttcagcgaaaatccctatctgtaaagtccccgtagcagcctttttcacacgaaaacgagaaccgttcgacttcaaaggcgctgcattccgaaaacagtcctcagacggcaatcgttttcttgcaacctcaaattgctcggtcaatctcgcgaaaagtgcgctatgctgttttttccagtttggaagggtgcgttttacgcatggtgcgctcaggtgccccagcgggctcgcgccttccacgctgattgtgcaagcaacgaggtaaaagaggtggaaatcatgacgatcaccgtgtccggacgcaaaatgcccgtcaccgacgcccttcgtcagtacgctgaggagaaggtcggtaacgcgatcaaggctgtggacgccgacaccgtctccacggaaattgttctttacaccgagaagaacccggccaacccgctgccggctatttgcgaggttaccgtccgcgtcaagggccacatcgtgcgcgtggaggaaagcgaagaggacatgtacgccgccatcgacgtggctgccgccaaggttgcccgtcagttgcgcaagtacaagacccgcgtgctggacaagaaggttcgcgccaccgagcgcatcgtcgactacgcccacgaggacgcccgtccggagagcgagctggatctcgaccgtctgatggacgagctgtccgaggacgagatcatccgccgcaaggagacggaattcacgcccatgaccgaagaagaggcgctcatccagatcgatctgctgggtcacgactttttcgcgtacactgatcgcgacaccaacctggtgcacatcctgtaccgccgcgaggacggcggctacggtctgctcacccaaaaggaggattagttcatggccactatcgacaccatcgccggcgttctcgagagcaacctcgacatcgaccccgccaccgtcacccccgaggcgaccttcgagtccctcggcatcgactcgctggacatggtcgagctcatctgcgacttggaggaggcctgcgaggtcgacttcggcgagcccgaggggcttgtcaccgtgggcgacctggtcacctacatcgactcgctgtaagcgcccgtcgcgtttcagcagaactggggccccgcagccatcaggttgcggggcctttttgttgcctagttccctgcgtatgtgccgaaagaggccccgtgtgggctcgtgccgctctgccggaggaaacgtgtctgagccccgttcgataagagcggtcgcgctccacttctatgggaaccgattccgatcggcctttccggtaatggccgcttcgcgcttcatctcgtctcgctcagtcggtgaaggcccctgtcgctgcatgagattgacggttatgagcgtctgaagggcagctatagtgattagaattaacgataattgacaatttcgagtgaacttagattctctagacgctcataaccgtcaatctcatgcaaaatcgtgggtcttcgttgactgcggttttcctgcttgacgaaaataccccctaggggtataagttttttcgagaatgaaagccggagctatgagcgaaggaatactatgaagaacgagaaagcatgcagcggggaagggacggcgcagacaatgccgaaggccggggcggcccaggcagcggccaagactggtgcaggtagaacgggccacgtgcccgattgcccctgccggcacaagaacacaccgcgcagcaccgagctgcaggcggatatgcagaagcggctgaaccgggccatcgggcagcttaccggcgtgaaggccatgatcgaggacaaccgctattgcggggatgtgctcacccagctggccgccgccgaggcggcggtgcggcgcgtgtcggagatggtgctggccgagcatatgcgcacctgcgtggtggaagaggtgcgcgccggcaacgacgaggtgatcgacgaagtgatggcgctcatgagccgcttctcgaagtaaggaaggcaagctatgtcccaacgagaggcaatccagcaggagacgatgcagcaggagacgactcggcaagagccgccgcagcacgacggggaagcgccctgggccaacctgcgtctggccatcgacggcatgcactgcgcgaactgcgcggccaacatcgagaagcactaccgcgccacgcccggcgtcgtcgatgtggcggtgaacctggccaacaacacggggcgcgtggtgttcgacccggcccaggccagcgtggacgacatgctcgccgtcttcgacaacctgtccttcacggccgagatcatccccgaggacgcgccgctggtggacgagaagcgccgcgctcgcgaggccgcccgggccaagcgcgatcgcaaggtgttcggcgtggcggccgtgctcacggtggttattgtggccatcggcatgattcccggctggcacatgggggtgggcgcggccctggcggggctgttcgtgaccgatcccacccatgtgcaggccatgttcgcggcgaacctcttgctgctggcgctcacggccccggtgcagttcggttgcggcgcacggttctacaagggcgcctggggctcgctcaaaggcggctcggcgaacatggacgtgctcgtggcgctcggcacctccatcgcgtttctgttctcgctgtggatcacgtttctcccggtgatcacgggggattgggaaagccatgcggcgctcgccatcaacgacggcatgccctatttcgagacctgcgccatgctcatcaccttcgtgctgttcggcaagatgctggaaagccgcgccaagggcgccacgaatcaggccatcgagtcgctcatgaacctcacgccgcccacggcgcgggtgatccgcggcggcgaggagcgcgaggtgcccctggcccaggtggtggccggcgacacggtgctcgtgcggccgggcgagaagatgccggtcgatggcgtggtgacagaaggcgccacggaagtggacgaatccatgctgactggcgagacgctgcccgtggtgaaggcccaaggcgacgcggtgaccggcggcacccagaacaccaccggcgcggtgaccgtgcgcgccctgcgcgtgggcgccgactccacgttggcccgcatcgtgcgcgccgtggaggacgcccagggcaccaaggcccccatccagcgcatcgccgaccgcatcgctgcggtgttcgttcccgccatcctgctgattgcgctcgtcgtgttctgcgcgtggttcttcgtcgtgccggccggccccgacgggcggctcgtgcaggcgctcatgccggccatcgccgtcatctgcgtggcgtgcccctgcgcgctgggcctggcgactcccacggcgctcaccgtaggtatggggaagggcgcgcagctcggcgtgctcatcaaggacggcacggtgctggagaccatgggcgccttgtcggcagccgtcttcgacaagacgggcaccctcacccagggcgagccggtcgttgtggcctgcgatgttcccgatgacgtcctgcgtctggccgccgccctggaggcgaagagcgagcaccccctggcccgcgccgttgtgacctacgcgaccgggcgcgacctggcgccgctgcccgcggccgagtccttcgaggccgtcgtcggcgagggcgtgcgcggcgtcgtggaaggccacgaggtgttcgtgggcgtcgggaaggccgccgccgacggggctgaagccggggcttcgggctcactcgtgtccatcgacggggtggccgcaggtcgcatccagttccgcgacgagcccaagtcggacgcggcggctacggtgcgcgagctgtcccgcgatttctccgtgacctcctacatggtcaccggcgatgccgcgcccacggcccgggccatcgccgaggaggtgggcctcgcgcccgaccacgtgttcgccggtgtgaaaccgctcgagaaggccaattgcgtgcgcgccgtgcggggcgccgccgatatcgccatgctcggcaatgccgccgccgaggcccgcgataccgagaaggacgacgagcgcattttggaaatggaagcgactgaccccgccctcatggccgcctccgaccccgacatggacattcccgccgagccggtgcccctcgagtcgcccacgagcgccgcccaggatgcggccgccggcgcgaagaccgtcgtggccttcgtgggcgacggaatcaacgacgccccggcgctggccgccgccgacatcggcgtggcgctggcctcgggcaccgatgtggccctggatgccggcagcgtggtgctcatgcgcaaccgcttgtccgacctcatcgtggccctgcgcctgtcgaaggccacgatgcgcaagatcaagcagaacctgttctgggcgctcatctacaactgcatcatgattccgctggccgccgtgggcatcctcgcccctgccctcgccggcgccgccatggcgctgtccagcgtcagcgtcgtcagcaactcccttctgctgaagcgcttcaagtaagacagtcggatcgtgacgccggaaggacgcctgtgtaaaatgcagggcgtctttccggcaagttttccgagcttttcggcatgacctgtttggcaatgtgatgagctgggctttttctatcggagaacggcttaacgaccagtaccgcacttcgaacaggacggtcgcgccagaaggtggtctgttctcgacatccacatatatccacatttcgtgcagcgcactttgacaaaatcccggctgccaacatagctcgtagcgtcaactacaagcgcgccgccgctgcgatcagagaccttatctacgtacctctgcgccctcttcgcaagtgcctgctcgggcatcatcttttcgcgtagaggcttcggggcgcccgctgcgcgtcttgctctgcgcacagaaatacggtccggatggcaagcagggcacacacacttgcctgccttgatgcgaggatacgtctcctcccactcgcaaccgcactccttgcatcgcaccttcacgggagacgtcgagttgtcgtaggtagcaacctcaattctttcgccctcgagtgccgcagaaagcgttttgacggctttctcgcgacgtttatcgggtctatcaccaggggcgacggcaacttcgctgatgacgaagtcgacctcgccaagtcgccagtccatggtcatgagatacgtcttgcgacctcttgcctcatagaatagctgctcagcatactgctcgggatgccgcgctgatgtcttgatttcgagcaccgcatcatcggtggaaagatcgcaaagcgccatgatgcgcatctcttcgttcaccgtgagctcttgggcgacaatttcctttccaccgaatatggtgctacggatgaactcgacgagcggcgttatttgctctttcattgcgctgagcgtcgcattgagctcacattcgcgctgcttgtcctcgtcgcgtttgacggtcacggttccatctgagttgaaggtcatgaatacggggcgtgtatcgtgcatcatatgcccaattggcttgttcttcttatagttctcacgcaagaagtcaaggttatcctgcgttttcgcacccagcataacgtctatcagatgttcgaccgtcacaccggaaaagttcctctcgaaccgccgaatattgtcgcccgaggcgttgaggcgatacacctccctcgactcgaagctgatatatggccgctcgtagaggcgggagaggttcggaaatgtgctgagatagctgacagggacgatatagtccgggtccaacgcgctgaactgccagttaaaagccctcatggttgccagcaagtaacgcccatcgaatgctttgaatagctgccactccagtttgcagtcgttcatgcccgtatgcacggatgaaacgccctcaatgccaaaggcttcgcagagcctatcctttgataaactgccatcagagaacttggtcgagcaaatcattcgtttgaaattgaagaagtgcatccgctcataccccgcaaggttgtgacgggcgaaatagtccctgatgaagcgctcgtcgagtcctccgtagtgaagaatggtacggcgatccagctcgaacgtggaaaatagctcgtctacatcggcctgtaccaagtgcgaccttcccttgaggtcgcgcttcgtgattccgttgatctcggtagtgtagacgtcgcgattcaggtcaagcgggaggaacctgtcgtacgtcttgccgtcatcgggcttgtagattgagacggaaagaagatcatcctccttacttttaagaccattcgtctcgacgtcaagcactacgtagttggctggtgaggtgctgatgctcgtcaatcccatcgcaatcacctaaacctagttatcgagtccgtcgaatgcgatcgacttgagctttccaccttccgctcggtagatcccgggaaagtcgagtctgccgcgcgtgcagcgcatgcccacgacgtatgacttgctaaccgggttttcgccaatgaacgtcatgggggctgcatgctcgaggttgtacacgaacgcagcaattcgcggaatttcctcgatcgggcaatctatttcggccgtagtcgcggaaagcgtgttgtaaatcgagagcgtccaatcgtcgtgcgggtgctcgctgatgaacttgttcagaagggagtgacctgcatcggatcctgctaggttgtctcctctccagataatgccaccccactggttcgactcttcgtatgctgcatgcatagacggctccaatccgaactgtttccttaccgtgcgcctctcacgttcatgctccataatgtcgtgcatcagcattgcttttgttgtgccggcctcgtcggcccacatgctaaactcgtcgtagtctgctgctgtcatcgagattaacatcttcttccgggcttgcggcttcggcccgcgtcggtgcttctcgacctcctgagttgagatttcgtccatggaaactttcctctcgacgtatctggatatctaaattatattttagcagaatagaagagatattaatttgagatatagaaaagacttcgctacctcaaccggtgaaatcatgaatcagggttgcggagccttattgcgtcgaccgatgccgtactgcagccactccacctgagatgcccgcttcgtgaggttcgcctcgccggttggctcgaagcatgcgatttgctggtgagttgctcttgcgtcgagtcccagctggccgtccataaggtgcgtcttgaacgaacctggcgacttgaaggcgctggtcccgatggcggaggagtcgtccgcgcgcctttcggcggccgactacggactggtgcgccggataggccggcgcatgggcatggacggggaattcttcgcgtggctctcccaggttgagagatggcaggcgagcccctatccaatttgcagcgaaaagttgatagcctcgggcaggcgttcgggagcataatggggcaggcggcttgtcaataaggagcgaagggggaaagaccgtgatttgcgagaaatgcggatgcgattatgcgcgcagccgcccggcgcgcccggaatgcgggacgccggcgcccggctacgagaaatgggcgacgggcggggagtggacccggccctcgcccgcggaaggcgggggctggcgccggttccggcgagctgacgcacctcgatcggctggtcgatcgcgggcctcctcgtcggcagctacctcgtcggctttgcgtgcatggcggcggccgcgcttctcggcaccggcctgcacgccgtctgcctggcgctttttgtcgtgttgacgcccaccatactctagcccatctcccaggagttcctgcgcgggtggttccaggcctatcctgcgatggccgtcctcgacggtcagcgtcgtcagcaactcccttttgctgaagtgcttcaagtaacaaaacgaggaatcaattcacagttaaatgcgaatcatatactctcttgtgctatcataaggacgtaaagctacgatgataggtggttgccatgtcgcctttggctcaggaagagaaagcgcatcagttctgcggtatggctgctggtggccagcgtgtgggcatttcggagttcgcacgggggaagacatggcgcaacctgcttgccgaggctggctgcgtggaagtgaccgatcgggcgggtaccatcggtttgctcttgacgcccgattacgccgaggacgtgtctgcctacattgctcagctggaatctgaattggagcaggcctatgtgcgcgccttgttcgagatgagggccgactattccgagccggtcggcggtgcaaagctcgcgaaggcagctctcgcggagttcgatgcccgggaggacaagataaggggtttcctcgatggcggtgagtagcgatctgcttcggtcggccatcgtccaaatatcttccataccttccatccgaatggctcccgaagcgctcgtggaggatgtaacgctgctagcgaaagtgtggcccgatgaaagtgactttgctgctgccgtagccagctgctgtcgagctttggagcaagtgtccgctgggaaagtgacgcccgatgcgcttgaggacgacctggacgggtggtggtcgtatcacttccagctgcatcgtgcccagggcgagaaggcggtgcttcgcgtcgtgttccgtccgcaagccgatttcgtggaagtgaagggcttcggtcaccgcttcaagccgtcggacatctaccaccgtcttgtgcttgggaaggacatacgcctctaggctacccctccacccagaagcgccaggcgcagttgcaggtgttgtcggtgacgtcgggaaagcagctgacacattcgcagtggatgcggtcatccaaggcggcggcgaagccggcgtactccagttcgcccacgctcttgcaggggtggaactccatccccttgcgcgcgcgggcgttctgcacgcggcagtcggtgatgcggaacacgagcgcgtcgtcttcccggcaaatctcccattcgtttgccagtgaggtgcagcgcaaaggcagcgcctcggcgagtccctcaagtccgcatctatccgaaaggtcgagcagcttcttcaagcgtcgggcctcgctgggcacgaagcgtcgccaggcagcacggtcgtgctccatggccgtgtccatgccctgctcgcgttccagcgattggaaccatgttccgtccagcgcgatgaggtccttcgcggtgatttccaaaagctcgaccagctcttcacgggtcaacgcatccaatccttgggccatggtcgcctcctttccctagtgtcgacctgctcgattataggctccttgcgctatactaggccaattggaaatgggcgcgaacgagcgcacgtatagctatagaaaggcgtttcatggaaactgctgcgattattttggccgcgggggccggtacccgtatgaagtcgaagaagccgaaggtggttcacgaggtgctgggccgcccgctcgtgcggtgggtcgtggaagcggccaaagaggcgggcgccgatagggtcgtcaccgtggtggggcatatgcgcgaccaggtgatccctttggtggaaggcgataccgaggtcgtcgtgcaggaggcccagcgcggcacggctgatgcggtgctggccgccgccgatgccctggccggcttcgacggcgccgtcgtggtgctctccggcgactctccgctcattcagcccgagaccattcgccagatggcggctctgcgcgaggagcacaacgcggcggtcatcgtgcttaccatggagcttgaaaaccccttcggctacggtcgcatcgtgcgcgacggcgccggggaggtggcccgcatcgtcgagcagaaggacgcgagccccgaggaagcggccatcaccgagtgcaactccggcgtctactgcttcgacgcccgcgcccttttcgacgcgctttcccaggtgaactccgacaacgcccagggcgagttctatcttaccgacgtgctggccattagccgcgccgccgggcggcccgtgctcgcctataagacgagcgatgcggagcagtgcctgggcgtgaactcccgcggtcagctggctgaggcggcccgggtcatgcagcggcgcatcaacgacgcgcacatggccgccggcgtcacgatgtgggatccggccacggcctacatcggccccgaggtggagatcgcccccgacgtggagcttctgcccaacgtcatgctgctggggaagacgacgatcggcgaggacagcgtcgtgggccccgacagccgcctgaccgacacgcgcgtcggtcgcggctgccgcatcgacgagaccgtggcggtggaagcgctcatcgacgacggcgccacctgcggtccgcgcgcctacctgcgtccggcggcgcacttgtgcgagggcgccaaggccggcacccacgtggagatcaagaaatccaccatcggcaagggctcgaaggtgccgcatctgtcctacatcggcgacaccactatgggggagggcgtgaacatcggcgccggctccatcacctgcaactacgacggcgcgaacaagcacgccactatcatcggggacggcgccttcatcggttccgacaccatgatggtggcccccgtgaccgtcggggcgggcgcgctcgtgggcgccggttccaccatcaccaaggacgtgacgccgggagcgctggccctcgggcgcgccagacagcaggagatagaaggctgggtggcggcgcaccccatcgagaagaagaaatagtcggtcgcgccgcttcagcccgcatgaagcggcgcgccgtactacaataaccgaagctgaaagacccgtcgcagaagggacgcaccctatgaccgagatgaccaagcgcatgatcctgttctccggctcggtgaatccggagctggccgaggagatcgccaagtacctgaacgtgaacctcggcaacatcaagcacgagaagttcgccaacggcgagatctacgcccgctaccaggagtccatccgcggcgccgacgtgttcctcatccagtcggtgtgcgcgagcgagaccttcgacgtgaacgacgccctcatggagctgctcatcatggccgatgccgccaagcgcgcaagcgcccgctccatctcggcggtcatcgcgcactacggttacgcccgtcaggaccgcaaggccgccccgcgcgagcccatcacggccaagctcgtggccgatctgctcgaggtctccggcatcgacaacatcatcacggtggatctgcaccaggatgccatccagggcttcttcgacatccccgtgaaccacatgacggccatgcccattttcgtggactacttccgcaacaagggtttcgatcccgagcgtctgtgcgtggtctcgccggacgtgggccgcgcgaaggcggcgaagaagttctctacggcgctcgattgcgacatcgccatcatgcacaaggatcgcccgaagcacaaccaggccgagatcaccgcgcttatcggcgacgtgaccgacaagatctgcatcctgaacgacgacatgatcgacacgggcggctcgcttgtggccgcggccgccacgctgaaggccaagggcgccgccgaggtgtacgcctgcgccacccacggcctgttctccggcccggcctacgagcgtctggagaactcctgcatcgaggaagtggtggtcaccaacgccgtgcccgtgccgctcgcgcgccagaccggcaagatcaaggtgctctccatcgcgccgctgttcgcgcagaccatcgatgtggtgtacaacaacggctctattgggaaattgttcgaatagctgcttggctgtccggcccgagtccccggggaggaagcccgtgctcaaacagcattgaagtgcgggtctctccgagggtctcgggccttctttctttgcacttcaatgaactgcgcgcgggccccctctccggggactcgggcctactcttccaaaggtgaatgacggaaataggtgacaagttgtatatgatcgcgggcctggggaatccgggcgaggagtacgagcacacgcggcacaacgccgggttcgatacggtggatgcgctggccgatgagctaggcgtgcgctactggaagaacgagggcggggcgctcgtggggaaggcgagctaccatggccacgagcttctgctcgtgaagccccagagcttcatgaacacctcgggaggcccggtgagcaagctcatgagggcctaccatggggatcccgaccatctcatcgtcatccacgacgagctggacatcgatccgggcaccatccgcgtgaagttcggcgggggacatgccgggcacaacgggctgcgctccatctgcgacaagctgggcacccgcgattggttccgggtgcgcatcggcatcgggaggccgccgggacgaaagcccgtggtcgactgggtgctctcgcgcccccgcagcaaggacgataccgaggccttcgagcatgcggtggcgcagggcgctgaggcggtgctctcgctcatcgacaacgggttggagaagacccagcagcggttcaactgagggctggaaactcccatgcgtctttccgagaaggggcacacctacgtcctgttcgccatcgtcgtcatcacctgtgcgttaggatcgctttcccaaaccgctacgaactccatgctcacgggcatttgcgcggagttttccatcgatgctggcgaggggcagtggctgaccacggtctacatgctcgttatgggcattacggtgccggtggtgacgttcctcgcccggcgtatgtcggtcaagcgcctggtgtgtctggccctcgggctctttctggcgggctcagccgttgatctgattgcccgaaccttcttcacgctcgtgctgggacgcgtgctgcaggcggtggctacgggcatcacgctgccgctcgtgcagtcgctggccatgacgcgctttccgagagagcgcacgggcacgaccatgggcatcgcgggcattgccatggggttcgcccccaatatcggccccattatcggcggtgcgctcgtagactcctggggctggcgcagcttctacgggctgctaatcggcattttggtgctgctcgcgttggcctgcgctctgttggtgcgcgaggagggggatggcagcgccggcgctgtgttggacgtgccgtcgctggcactttccacgctcggtttcggcgggctgctcttggcggcatcgaatgcggcgaacatgccgctgtccagcgagggcgtgtgggttccggcgctgagcggtgcctgctgcgtggctgcgttcctcgtgcggcagaaccgtatttctcatccgcttatttatctgggcgtatttcgcgcccgccagtaccgggcggcattcgtggcccagaactgcctgttcgcctcgttcatgggcatcacgctcatcgttcccttgttcgtgcagggcatctgtgggctctcggcgctcgatgccggcatcgtgttcgtgccggctacggtgatagccctgttcctgaatccgctagctggcctgctcaccgatcgggtgggcgcacgcgcggtgacggtgacgggcgccgtgctgctcgtcgttggtgcggcctccatgatgttcgtggatgcagcgactccgctatggctgctgacggccatgcaagcggtacgcgctttgggcgtgagcacgctcgtggggccgttgaattcctggggtctttcgggcttgcttcccgcgaacacgatggacggcagtgtctttttcgccacggcccgccaggtgtgtgcctcgctcggcacggcgctcatgatgctgctcgtggtaagcgtgcccgcatcgctggctctgacaggcatgggcggcgcggaggcggccgtgtggggctatcgggcggcctttgctctgtcggcggcgctttcgctggcggtgctcattgttgccgtttggaaaatccgttagcgtataatctgctccgaaacgaatggaagtgaaaggcggccttggtggcgtttcttctcggttgtgaaaaagtgagcgtggaattccccacgaagacggtgttcgaggggctgtccctcggggtggacgagggggctcgcatcggcatcgtgggtcagaacggcgatgggaaatccacgcttttgcgggtgctttcgggcgatgtggaagtggacgacggccgtgtcatccgcacccgcggcgtttcggtgggcgtactcggccagagcgacgatttgcgcgacgcggacaccgtggagcgggccgtggtgggggatatccccgaatacgagtgggccggcgaccctcgggttcgcgccattatcgcgggactgctcgaggatgtggaatggacggcgacggtgggcaccctttccggcggccagcgtcggcgggtcgatctggcccggctgctcatcggcgactgggacgtgctcatgctggacgagcccaccaaccacctggatgtgcgcgccatcacctggctcgccgagcacttgaagacccgctggcgccgcggagcgggggcgctgctcgtcgtgacccacgaccgctggttcctcgacgaggtctgcgaggccatgtgggaggtgcacggccgccgcgtctggcccttcgagggaggcttttccgcctacatcatgcagcgggtggaacgggaccgtctggaggctctggccgagcagaagcgccagaacgccctgcgccgcgagctggcgtggctctcccgcggcgcccgcgcccgggccacgaagcccaagttccacgtggccgccgcccaggcgctcatcgccgacgtgccccccttgcgcaacgagctggagctcaagcgcatggccatggcgcgcctcggcaagcaggtggtcgaccttaagggcgcatcgctgcgcttcggcgaccgcgtcatcctggacaacgtcgactggatcatcggccccggcgaccgctacggcatcgtgggggccaacggcatcggcaagacgacgcttctgcgcatcatccaagggctgcagccgctcgattccggccgcgtgaagatcggccagaccgtgcgcttcgccgtgctgtcgcagcatttggacgagctgcgcaaactcggcgacgaccgcgtgcgccaggtgatctcgcgctactcgcggcgcacgatgctcgacggcaaggagatgacgccgggccagctcttggagcggctcgggttcacgaaggacgaccagaacgagccggtatgcgacctgtccggcggccagaagcgccgactggcgctcatgctcattttgctggatgagccgaacgtgctcatcttggacgagccgggaaacgacctggataccgatatgctggcggcggtggagagcctgctcgacggctggccgggcacactcttgctcgtcacccacgaccgctacctcatggagcgcgtgaccgaccaccagtttgccctcatcgacggcaaggtgcgccatttgcccggtggcgtggacgagtatctgaagctcgccgaagaggccgaccgcgaagccgcgaagagcgccggcggcggccgcggaaatgactcttgggtcggctccgtagggggcgaccttggtcgcccctcgctcgcgacctccagcaatcccgggaatgcggccgcctcttgcgcccccgtcctctccggcggcgagcagcgtgccctgcgcaagctcatgacctccaacgagaagaagatcgagaccctgaagggcaagatcgagaagaagcagctggaaatggccgccgccgaccaatctgactatctggtgctcaccgccatgcaagaggaaatcgccgacttcgaaacccaaatagaagccctcgagctggaatggttcgaagccgccgagaagctgggggagtagtggccgcatacaaaaccatagccgctcgtgccgaggccgagatcgtcgagaagaagagccgcttcatcgggcaaatcgcgccggtcgccactgaggaagaggcactcgctttcatcgccgaggtgaaggcggcccatcgcatggcgcgccacaacgtgtacgcttacgtgctgcgcggcggtcgcgtgcgctacaccgacgacggcgagccggccaaaacggcgggcatgccgacgctcgaggccatccaacatgcgggtttggaagacgtggccgtggtcgtcacccgttacttcggcggcatcctgctcggcaccggcggcctggtgcgcgcctacaccgacgccacgaaggcggctatcgaagcggcggatgtcgtcacggtgtcggtctgcgtcgacatcatcctggaggtgccctacagcctgtacgagcagctctgtcgcatcgctgaggcggccggcgcgaagcttgccgagagcgacttcgccgagaacgtcctgctcaccttccgcatgctcgacggcacccagccccccttcctggaaaagctcaccgagctcacccgcggccaaagtgaaatcatcgtgaccgcccccttcgatgccgcgttctagcaaaggggcgctctataatggccccaagcgttgaaaggatttgcatgtacggattgaagacggagagctcgttcgatgcctctcattttttgaccgattatcatgggaagtgcgagaacctgcatgggcaccgctggcgcgtggtggcttatctggaggtggagcacctgcagacggagggcacctgcaaggacatggtggtggatttcggcgagttcaaaaccgagctgcgcgcgctgaccgagcgactcgaccaccatttcatcgtggaggagggctcccttgcccccgacaccttggcgtgcctcgagcgcgagggtttcgccctgttcattgtgcccttccgcaccacggcggagaacctcgcgaagtggttcttcgacgcgctggccgcccgtgggctgcccgtggcccaggtggaggtctacgagacccccaacaactgcgcctactaccgggagcagcgatagcccatggtgcccgaggaggagaacgacggcctgctggatgccgagcggcaccaggcgcgccataccatcgccccccgtgcccagctgttccccgtggcggagaaatttgtgtccgtgaacggggagggcctggcggcggggcggccggccgctttcatccggttcgccggctgcaatatgtggtgcacctactgcgacacgcgctgggcgaaccatccgttggtggaagtggaagggtggagcgtgcccgatctggtggcctgggtggccgagaccggcgtgtcgtgcgtgacgctcaccggcggcgagccgcttctgcagccttatctgcccgatctggtgcagactctgctcgcggtggacgacccgcgccctttgcgcgtggaaatcgagacgaacggttcgcgcgacctgagtcccatggcgcacttgcgcgaggcgtgcgccgaggcggggcttcccggcagcctgcacttcacggtggattggaagacgcccacggccggcgaggcggtttccgccgccatgcgccgcgagaactacgatctgctggatacgcgcgatgccgtgaagttcgtcgtgggcgccgaggacgatcttgctttcatggaacgctgtgccgatgaagcggggctgtgggatcggtgctcggtgctggcaagtccggtatggggcgctatcgagccggccgagattgcagcctacctgatcgagcacggcctcgaccgcgcccgtctgcagttgcagctgcacaagatcatctggcccgatgagacgcgcggggtctaaggatctggaaggataggaaccatgaccaacaacaaagccctggtgctgtgctccggcggcgtggattccacgacgcttttggcgcgggctgtgagcaagtacggagcggaaaacgtgtatgcgctttccatcagctacgggcagaagcacgttcgcgagattgaggcggcccgcgccgtggcggcccattacggtgtagagcagcgcttcctcgatttgggcgccatcttcgccgacagcgactgctcgcttctggcccattccgatgcggccatccccgagtccagctacgccgatcagcaggccgaaggcgacggcggtccggtgagcacctacgtgcccttccgcaacgggctcttcctctcctcggcggcctccatggccctctcgctcggctgctcgacggtctattacggcgcccatcatgacgactgggccggcaacgcctaccccgattgctcgctggagttcgtggaggccatgaatcgcgccatcgtggagggcaccggcggcgagctgtgcttggaagctccgttcgtcacctggtcgaaggccgacatcgtgcgcgaggggctggcccttggcgtgccctacgagctcacctggtcgtgctacgaagggggagaggcgccctgcggccgttgcgccacctgtctcgaccgcgccgccgccttcgccgccaacggcgtcgaagatccggctatgagataatcaagcagagttgagtgtagcgggatgtggggtattgctcaccaagcgagttccgagagcgttcgaaacaggactaaacgtcctgtttcgccgagcgagggctgtctgagcgactgagcggtaccccgcagcccgcccccaaggagttgctaaagaagaggagctgggaatgaaaccaatggacatggctgaagcgctgtttggcagcgacgatgatgcaatcgg

SEQ ID NO: 10507 - DNA, 37995 bp, Unknown
  gut microbiota DNA sequence
gataatatcgttcctgcctgccgcttcgagacactttgtcccgaggcgggactttcaaaggcatcgttgttgtcccacccgaacagaggtataatataggtgtaatgtgatagggaaggaggaacaatggcacgcacaaaaaacagagagtatcagcaggttctttccccggcttacaccttttcccgccgctggaaaatgggcggttacatccgtctttccaaggaagatctgaaaaaagccctcaatggcaaggatgacagcaacagcgtcaaaaaccagcgggacctgctcaatgacttctaccgcaaatatcaggaggaatttgaaagcatcactgaatatgtggatgacggccacaccgggacagattcggaccgggaggcgttccaacaacttctggccgacgtaatgagccgcaagatagactgtgttgtggtaaaagacctttcccgctttgcccgcaactacagcgacgcgggtagtctgatcgacaacctgtttgtgcagatgggtgtccgatttatcagcctcgcggaaaacgtagacagttacaaggacccggacagcgtttccagtatcatcgttcccattaccaacgtaatgaacgatcaatactgctatcagacctcaaagaagatccggcaggtgtttgactacaagcggcgcaacggccagtatatcggctccaacccaccttttgggtatgtcaaagatgcaaaagaccgtcaccaccttgttatcgaccccgatgccgccgagattgtccggctcattttctctttgctactcaagggaacatcgaaacggggtatcagtttctatctgaacgagcacggtattcccagcccctcggtctacaagttggaaaagggcatgacggtttccaacaagccggacggcaacaccctttggtcgggacgcatgatccatacgattctcaccaatcccatgtataccggtgatctggtgcaggggcggtttcgtgtaaaaagctacaaggtacatcagatcgagacggtgcctgaagaggaatgggtacgggtagctgatacccacgaggccattatcgacaaggccacttttgagaaggtgcaggaattgctgcttcgggatacccgaacatcgccacaggggcgcaccgtccacctgttcagcggttttctcaaatgtgccgactgcggcagagccgttacccgctgttccggcaagaacaacgtgtattacgcctgcgctacctataagagccgttcaagaaatgcctgcacaatgcactctatcagtcatgcccggttggaggccgccgtgttgtacgccatccggcagcaggtgcatcttgctgtctcctattcagaagtcatcgcccaaatcaattcagcccctatcaaaaaaaaaccagtctttccgactggacgatacgattcatgcaaaagaacgtgagcttgccaaagtgacccgttataaacagtctctttatcaggactggaaagacggggagatcacgcagcaggaataccgggatatgaaggccacttatgaccgccaaatcaatgaggtgtccgatgtgctggccagactaaccgctgaacgtgcggagctggcaaacggcgttgacaaggaacaccctgcgctggtcgctttcaaaaagtatcagaatatcgatgccctgtcccgtgagttgctgatcgagctggtggatcatatcaaggtctatgaaaatggcaatatcagcgtcaagttcaagtttgccgatcagcttcgccgcatcgcggagtacatcgacgtcaataccgctgaatcccctgcatgggcggtttgatttcgcactacattccctgtgtcagcgtgttttcctaataggacgtgaacatatggcaaagcggttgagcgatcaccccacgttggaagagctgaacgacttcttcggtcacgaccggttcgccgagcacgcgggctgtcgcatcgtggaaggatcgcgcgatcacgccgtgtgcgagctggacatcaaggaccaccaccgcaatgcgctcggcaacgtcatgggcggcgccatcttcactttggccgacttcgccctggccattgccagcaataccggcgagaacccgagcgtatcggtgtcgagcaccatcgaatatctcagtgcctcgaagggtacctgcctcgtcgccacctgcgacgcggacaagtccggccggcgtctcggcttctacaccaccgacatcaccgacgacacgggccgccgcatagcgagggtcgccgccacggtcttccgagagagcgagtagcgccacgcgatacgagacagcaaaagggccccaaccggggcccttttcaattatgaaagagggagtcttgctggacgatccgtaggggctgaccttggtcagccctttcgagcggaatggcattcccgggttgagaggggcgaccaaggtcgccccctacggaaggggtggccagcgaggactgtctgagcgaatcagaatgccgcgcgtctccccgccgggagagccgcagccaggttactcgaccccgcaggccgcccgcagggcgtcgacgcggtcggtcttctcccaagtgaactcgggaagctcgcggccgaagtggccgtaggccgctgtcttctggtagatggggcggcgcaagtccagttcgtcgatgatggcgccggggcgcagatcgaacacctcggacacggcgcgctcgatatcctcttccgggacatggttcgtgccgaaggtctccaccatgacgctcaccggcttcgccacgccgatggcataggcgatctgcacctcgcagcggtcggccagtcccgcggccacgacgtttttggccacccagcgcgccgcgtaggccgccgagcgatccaccttggtgcagtccttgccggagaatgccccgccgccgtggcgtcccatgccgccgtaggtgtccacgatgatcttgcggccggtgagaccggcgtcgcccatggggccgccgatgacgaagcggcccgtggggttcacgtagatctcgcagtcgtcggcgagcgccaccccttcggcctcgaacaccgggcggatgaccgtctcgatgacggcctcgcgcagcgcgtcctgctcgatgtcctcggaatgctgggtggacacgaccaccttctctaccgccgtgggcgccccgtcgatgtagcgcacggacacctgggtcttgccgtcggggcgcagaaactccagcgtgccgttcttgcgcacctcggtcaggcgctcggagaggcgatgggccaggtaaatgggcatgggcatgagcgtgctcgtctcgttgcaggcatagccgaacatcatgccctggtcgcccgcgccaatcgtctcgtaggggtcggccgcggccgtctcgtcgcgctgggcctcgaaggactcgtccacgccctgggcgatgtcggaggactgctcgtggatggagctcatgacggcgcaggtgttgccgtcgaagccgtacttcgcgcggtcgtagccgatggagcacaccacgtcgcgcgcgatggactgcacgtccacgtaggcctgggtgcgaatctcgccggtaacgaagacggtgccggtggtgacgagcgtctcgcaggcgcagcgcatcttcgccgggtcggccgggttgccgtctggcgcgatgtagccctcctcggccagggcgatctccttggccaggatggcgtccagaatggcgtcggaaatctggtcgcagatcttgtccgggtgtccttccgtgacggattcggacgtgaacaggtacgatgagtgcttttcagccataagagtcctctcttatcggtgttggccggaccaccttggcactcaggtgagggacgcgtcaggttggtgtcgggatcatcgagccaactctctaccccgactctggataataacaagccgtgcgcccggataaagcgcacggctgttcatgctaacggttcgcacgggcgcacgcaaggggagcgaggcgccctacgcggtaacttcatcggcagccaacggctttccaacgcgttgcccgcgcttcgcggcggtcgtgctacacttagccaaatgcacaaaagcccaagggacggagccctcatgccaagcaatgccgattacacccgcgagtacttccagatcatcgacgagctggacggcgacatcgagagccgccgcgccgcgttcaactacatgcaggactccacggccatcgtgcaccaccaggtggtggcctcctccttcgtgccgcgcctgttcaaccgcaaaacctacgaggtcatgaagcgcacggccgagacgagccaccgcatcctctgcaaggtgatcgagcgctaccgggccgacgaggagtaccgcaagctgttcgatttcgacgagcgcctcgtggagctcatactgctgccccgcgactacgactcggtgctgcccttcgcccgcgtggacacgttcttgaacgaggacgactaccgcatccacttctgcgagttcaacggcgacggcagcgcgggcatgaacgagaaccgcgagatcacgaactccatcgtgggctccgacaccttccgcaccttcgccgagaaccacgccgtccagggctgcgacttgttcatgccctgggtgcgcgccttcatggacgtctacggcacctaccgcttcaaggtggagaacccccgcgtggccatctgcgactatctggagaacggcgtggtggacgagttccacatcttcgccgagaagttccgcgaggccggcgtggaatgcgtcgtggccgacgtgcgcgagctgtccttcgacggcgaggtgctgacgacacccgacgggctgcccgtgaacgccatctggcggcgctcggtcaccaacgacgtgctggagttctgggacgactcgcaggacctcatcaacgccgtgcgggcgcggaaggtggcgctcatcggggcgttctccgggcacatcgtccacgacaagcagctgttcgaggtgctctttgcgccggagacccaggccttcctcaccgaagaggagatcgcgtttgtggaggagaccgtgcccatgacggccttcctcaacgacgatcaggtgaacatcgaccagatccgcgccaaccgcgaggagtggatcatcaagcccaccgaccgctacggcgccgacaacgtgtacgccggctgcgaggtgagtcaggaggagtgggagcgcgtcatcgacgagttcgccaacgagcgcgccggctaccccttcattgtgcagcgctacatccgccccttcaagaccgacacgctgccgccggaccgcggcatcaacgaggcgcccgacggcgccgtggaaagcgagccggtaccttacaacaatctgaacgggctgtacctgtacaacggccacttccaaggtgtcttcagccggctggggccgcatccgacgatttcgaagaccaacgacggcatgaccgcggccactatctgggtcgattgcgacgtgcccgatgggctggagctgtaaatgggatccgatagcattctcgccggcatcggcgccacggtgctcgccgtcaccctgctcgtgtgcgggttcgccgcctgctgcttgccggtgaccaccgcctcgcttgccggcgccgtgagcacgggggcggattcgccctacacccacgagcagctggtatcgctggcgcaggagacccgcgcgttcaccgtggacgcccactcgagcatggaagaggcccgcgagtctttggccgccgatgtggtggcggcggcgcgggaggcctcggccgagggagctcccaagtactcccagtggacgcagcaggccaagcaggttcttggcgatgcggaaggggagggcggcgcgttggccgcggacggtggcgcggccggtggcgcggccgctggtgccgatggcacggcgcttgagaccatggacgcgctggcgaaggtgtccgaccgctacgccctggacgccgatgcggtgagccacttggaggactgcaacgggctcatcacgggcttgagctcctatctgggcatgatcggcgtggcggcgctcatcatcgcgctggtgctcggttttcgcaagcagttcgcagctttggccttcatgctgcgcatggggtcggcgctgcttctggcggtgctcgtcgtactggggctgtggggcgttatcgacttcaacggcctgttcgcagccttccactcgctgttcttcgtggacggcacctggacgttcaattacgactcgctgctcatctccatgtacccgatcgacttctggatgggcatgggggcggtctgggtcggctcggccatcggcgtcgggctgctctgcttcgccgccggctgcctgttcgcgtggaaggcccaggtgcagcaccgcgagttggaagaggccgccgcggccgacgccgcccgctccaagaagcgccgcaagaagggccgcaagtagcctatgtaggggctgaccttggtcagccctccccaagcgggatcacctcgcttgagcctgccccccgtaggggctgaccttggtcagccctcccaagcgggatcaccttgctcgaggaggggcgaccgaggtcgccccccacgggatcaacctgcacatcgttcaagaaaggcattctgatggcgcgcgcccccaaggaccacaagaccaacgccctgcgcgagctggacgcggcgggcattccccacgaggagctgttcttcgacgccgagcccacgatgaccggcgaggagattgcgctctcgcagggggaggatcccgacgccgtcttcaagacgctcgtgacccagggcaagtccggcggttactacgtgttcctcgtgcccgtggccgccgagctcgacctgaagaaggccgccgcggcggccggcgagaaggccatcgccatgatcaaggcccgcgagcttctgccgctcaccggctatgtgcacggcggctgctcgcccatcggcatgaagaagcgctttcccaccttcgtggatgagacggcccagctcttcgatacgattcacttctcgggcggcaaggtgggctgccaaatccgcatgaaccccgacgacctcggccgcctcatccccttccaatacgccgacctcacggtgtaggcttgcggtatactggcgggcatgaacattgcctcggtcatagtcgacattcctacccaagctctcgacaccccctattcctacgcggttcccgacgagatgctcgtcggggaaggggggcgaccagccgcggtgggctgcgccgtgctcgtgacgctcggcggccgcaaggccgtgggctatattgtgggcctggaagaggtcgttccctccccggatgagggcaccgacctgtgggggacgccccagtcggcggccgatctcaagcaggtggaagcggtgctctcggcgccgtttttcgacgaggagggggcggcctgcgcgctctggctcgccgaacgctacgccgcgccgctttccgaatgtgcgcgcttgttcacgccgccgcgggccgtgccgcgcatcgtgcggggccgcgacgggcgctggcgcgtcgaggagccggccatcggggaagtggacgaccgctgggtcacgcgcgggccggccttcgacgcgttcgttccccgcaagaacgccgtgaagcagcaggaggtgctggccgcggtgggcgccggcgacgtgcgcgtggccgagctgtcgcgggggttcggcgccgtgggttccacgttgaaggcgctggccgccaagggggctgtcacggtggagcggcgccggcgcatgcgcggcatggaagacggggcctcgcgcgcgggcgcgccggccggcggggcggctgctccggcccccactgcggccccgcagctcaccgaaggccagcaagcggccgtggccgccatcgaggccgcccgggccgcaggcgacgggcgcgtggtgctcgtggacggcgtcaccggttccggcaagaccgaggtgtacctgcaggccatcgagcgcacgctcgccgaggggcgccgcgccatcgtgctcgtgccggagatctcgctcaccccccagaccgtggcccgcttccgcggccgcttcggcgacgccgtggccgtcatgcactcccgcatgagcgacggggagcgctacgaccagtgggacttcatcaaaagcggcgcggcccgcgtcgtcgtgggcgcccgcagcgcgctgttcacgccggccgccaatgtggggctcatcgtcatcgacgaggagcacgagggctcctacaagcaggactcctcgccgcgctaccacgcgcgcgacgtggccgagtggatgatggcgcgtgccgggggcgcgctggtgctcggctcggccaccccttccatcgaggcactctaccaggtgaacaagaacccgcgctggacggcggcggcactgcccgagcgcgccaacgggcggcccatgcccgccatcgaggtggtggacatggccgccgagttcgcctccggctcccgcgccatgttctccggacggctcgcccgggcgctgggcgaggagctcgctcagggtcgcaaggcggtgcttctgctgaaccagcgcggcttcgcgaagttccttctgtgccgcgactgcggctttgtgcccgagtgcccgcattgttcgacgtcgctcacctaccacgaacagggggccaagctcgtctgccaccactgcggctacgccgtggccgcgccgcccacctgccccgaatgcggcagcccctacctgaagaagttcggcgccggcacccagcgcgtggaaaccgagctgcgccagctcttggacgggttgcccggcgtggggccaacggttcccatcatccgcatggacgccgacaccacccaggccaaaggcgcccaccaggaactgctggaatcgttcgccgccgccgatgccgccgtgctgctcggcacccagatgatcgccaaggggctcgatttcgacgacgtcacgctggtgggcgtcatcaacgccgacacccagctgcacctgccggactaccgtgccggcgagcgcaccttccagctcatcgagcaggtggcgggccgcgccgggcgcgccgagctggacgggcgggtcatggtgcagacctacgaggccgacgacgtggccatccgcgccgccgccacctacaaccgcgggatgttcctgcgcgccgagctgcccaagcgcaagcttttaggctacccgccctacgtgcggatggccaacgtgcttctgtggggcgccgacgagcacgccgtggccaccgaggccgagcttctgcacgcccagctggccgagctcatccgcaacgaggtgggagatcgctggcaggtgctgcccgccgtcccctgcgtgctggcgaagctgcgcaacacctaccgctaccacatcgtcgtgaaggcgcctttgggcgacgacctctcggccccgctggtgcgcctgttccgcgcccgcaaagtgaaccccgccgtcaacgccgccgtcgacatcgaccctgtggacttgctgtagtagttaatgtacggaagatgatgattggaagagtgcgacattttggtttatgacatcacggatagcgatgcggctcggaagacttttgtagcgatgctcgatgagcctttagtcgatcaagtgatttcgggacttgcgagcgatgattctgtcgcagagatgttcgacggtttcagaataaaaggtatgcatgtaactacttgcgatgataattgtgccagcatcatatcgaacggaattctgccattgtgcgaggttttgtctaggggttgtgctctaggtaagttcttggaggggcatctagagattgatctgcgagataacgctcagttactcgacagctcttctttaaaagctttacctccgttgattagaagcaagctacgatctgacaatagagtgagtgcatatctttactcagttagcaaggatgaaggctattacgaaagacctgagattttgcatgattgcgtatcgcaacgtccttttgaagcgcaacgagtgatcgagtcaaaatggcgagaaggaaagagctccttttgcgtttattttgaagtgccgtttcagaatgtatcaactataagttacgtttatgctgctgatgagcaggaaggtggtcgcaacgcaaattggctctcctctgtcatttgcgagctgctgtgtctagcgcgaaaagttggtgaaggggaagttgattcgagcattgtaatgacgttgaagcctggattgatcgttagtccggaattcattacggacgttgcaatatgcccctagcactagtgttaaagccagacctaaatcgccaaagcggtcgagagagcattttgtcctgaattcgtgtcattatgggattcaacttgtatcgtgggcgacggattgatccctttagaatctagtcagctccttcccgtcagccgttgacgctcaaattgtcctctcacctggggtgcaatatttcgataagaaatccctaaggaaaaatgaaccaaatacccatggaggttccatgctcgcgcgcgtagactttctttccgagggagggcccgacttccgcttcgggccccgaacaagaagaggaaaggggagtctatgggaaagactgcgcaaaccttcggcaagatcagccgccggtcgttcctcggcctggccggggcgacgggagtcggcgtggcgctgaccggctgcgcgccggccgccaagcaggaggagccggccgcagacagcctgcccgccactggcggcgatccgctcgattacgacaccgtcagctggtctgcatgccatgtgaactgcggcagccgctgcccgttgaaggcctatgtgaaggacggccaggtcgtgcgcatcgacattgattctgacggcgacgacgagttcggccccggcaagatctaccagatgcgctcctgcgtgcgcggccgcaccaaccgccagcgcatctacagccccgaccgcatccagaagccgctgaagcgcgtcgagggcaccaagcgcggcgagggcaagtacgaggagatcacctgggacgaggccatcaacctcatcgccaccaccatgaaggagatcaaggaggagtacggcaacgacgccttctacatccagtacggcaccggcgtactgggcggtacggtgtcgaagtcgtggcaccccgaccagaccatgttcgcgcgtctcatgaacttgtggggcggctacctgcgccagtacgccgactactccaccggtcagatcacctgggagatgccgctcttcaacggcgacgcctggtcgaacaacgaggtgaccgatctcgtgaactccaagaacatcgtgctgttcggtaacaacccggccaacacccgtatgtctggctcggccatgcagtacctgcttacccaggtgcgcctgcagaatcccgaggctaccatcgtggtggtggatcctcacctgtctgacaccgccgtgggcgtggccaaccgctggatccctatccgccccggcactgatatggcgctcgtggccggcatgatccagtacctgttcagcgctggcaagctggacgagcagctcatccgcgacaagttcgtcggcttcttctccgacagcttcgccgacgatgtgaaagcggccgagcccacaagcaccgccttcatggggctcgacaagtctggcgcgctcaccatcgatgaggatatgtcctacgaggcctacctcgctggcaccggcgcctatgcgggcaccggcgagaagacccccgagtgggccgccggcatcaccggtgttccggccgataccatccgcgagctggccgacctgtacatggacggccccacggccaccattcagggctggggtccgcagcgccactccaacggtggcaacaactcccgcgccatcgcgatgatcgccgccatcaccggcaacgtgggcatctccggcggcggcaccggcgcccgcgagggcgtgggcggcgttcccttcgccacgcccacggctatcccgtgcttccccgagaagaacacggtgggggcgtgcgtttcgttcttcgactggtatcaggccatcgaagactacacggtcatgaacgacgccacctggggcatccgcgccatcgatgagaccggtgtcaccagctacgccgaggagcccggcaccctgaagcttagggcccccatcaagttcatttggaactacggatccaatgtcatgatgggccagcacgccgacatcaacgactcgctccgcatctacaacctgcctgatgaaaaggactccggcgtgcgcatgatcgtcaccgtggacccgtggatgacgccgacggctatggcctccgacatcatcctgcccggcaccacgcccttcgaggaggacgatctcaccactggcggtaccgcttggaccggcttcatctgctgcgagtcgaaggccatcgagcctctgttcgaggccaaacccatctacgagatctgcacccttctggccgacgcgctcggcatcaaggacgagttcaccgagggcaagacccagctcgactggatcgagtggtgctacaacgaggggaaggcggccggcgacgacttgcccgacaccttcgaggagttccgcgccgcaggcctcatcaagcagactgacgaccacacgccggccatcgccgcgccggagggcccgctcgccacgccctcgggcaagtacgaggtgttctcgaagcaggcctacaacctgtcgcgccagtgggacctcaccggcggcgggtatgtgcccgacgacggccgcgaccagatcacgggcctgcccatctggtacgagaacttcgagggatacggcgacccgctgcgcgaggagtatcccttccagctcatcggccaccataccaagacgcgcacccactcctcctacggcaacgtgccgtggatgagctcggtggccccgcagcagtgctggatcaacgagggcgacgccgccacgctcggcatcaaccaggacgacaccgtcattgtgtccaccgagcgcggccgctctcagatgaccgctaaggtgacgaaccgcatcatgcccggggtggtcagcgtgccccagggcgcctggtacgacccggagactcgcgacggcgctaccatcggcgaccccagcgtgctcgatttgggcggctgcatctcggtgctgacgtcctcgcgcccaacgccgatttccaagggcaacggcgtccattccaacctgtgcaagatcgagaaggcctaaagagggggatagatcatggaacagtacggatttttcgtcaacaccgacatctgcaccggctgcaaggcctgcatgacctcgtgcttcgaccgcaacaacctggaggtgccgcaaaagttccgcaaggtgtacgagttcggcggcggcgagtggaaggccgacgatgccggtgcctttaccgccacggcgttcacctactacgtatcgatgacctgcggccactgcgagaacccggcctgcgtggccaactgccccaccggagccatgcagaaggatccggaaacgggcatcgtcaacaacgacaaggagaagtgcatcggctgcatgacctgcgagaaaagctgcccctatgggcatcccgtgcagctggacgacggcctgtcccacaagtgcgtgctctgctcggacgagaacccggagggcgtgccggatccgacctgcgccaaggcgtgcccggtgcgcgcgctcgagttcggcaccctcgcggaactgcgggagcgtcatcccgagggcgtgagcgccctgggcgagctgaccgatgagacggcccccgctgtggtgttcgcgccccatcgcgacgcggccaaaggcggcgtgctgcacaacccgcaggaagtaagccacgaggcctgagcgccaacggcttaagaacgggacactagctttacggcggctggtagggtataactcctaccagccgcatcgggcgttagggagggtgcatggagaagaaggcgagccggccgcgcgctgcctggaagcaggcgcgatagagccatgacgatttttgggcgacagaggaagatcgggctgcggacgaagcttatcgggcttctcacggttgttctcgtgctgatatcggcggtgttccttgcgttcacctacgacgatcaatcgcgccgcgccgagaccgatcttctggagaagtcgcgggtgctcgttaccgagatggatgccatgtgggatttcatctcgctgaaccagaacgtcatcaactatacctccgacggggggtacgactacaagggactgcattgcgccattgcgggcaagtcggtggcggcgctgttctccgagaagacggattactccatccgcttcatgaacttgaacccgcgcaacatctacaataccccggacgcctacgaggccgccgccatcgagacgtttctggcggataaggacaccgacgaggtatggggctaccagaccgagggaggcgatcaggttttccgctatgtgcgggccatggacgtctccaacgactgcaccgagtgccatggccagcctgccggcgagttggatgcgaccggttacccgaaagagggctggagcgtgggagatgtggccggagcggtgtcggtggtggtgcccgcagatggcgccatgaccaacatgcgcgacgccatcatcagcaacatgatgttctttcttgccgtggtggcggccatggcgcttctcatctacgttgtcatcagccgactcattaccgagcccttgacggagcttcgagcttctttctcccgcgtagccgagcccgatgcgcacgcgaccgagggggaaacgaccactccgagggtctttgggccagcagccgtcgatgcgaatgagcccgcgctcgctccaggttgcctacgtggcctgccggcgcgaggttccctggccacgaccgaccgaggcgtgctgtactcgtcccgcgagatagacgacctcatcgagcagtaccattccatggcccagcgcttggaggagctttacggaagtctggagtcgcaggtggccgagcgcaccgagcaactctcccgcgctaatgccgagctggagcgtcaacgtcgtcgagtggaggagatcaatgcccaactcgcccgagacaaccagtacaagtccgatttccttgccatcgttagccacgagctgcgcacgccacttacttccattttggctttcgccgagctcctgggcgagtccatcgggcccggccggcccgaggcgcgccgccagttggaggagattggcaaaaacggcgccattttgcttgagatggtggacaacgtgctggagtgcgcccgcattcaggcgggctccgagacgttgaacctggagctggttgatctgaacgacctcgtgggtatggtagagtcggctatggcgccggtggccgccaaaaagggcgtagcctttaccacccgggtcgacttcgacgtgcccctcatcatgggggattgggaaaagctgcgtcgggtgcttgcgaatctgacgagcaatgccgtgaagttcaccgatgccggcggcgaggtggctgtgcgcgtttgctgcgaggcggacgaggatgacgctcgcaaagtggtgatgcgcgtgaccgataccggcatcggtattccgaaagaggcccaggagcttatcttcgagcggtttcgtcaggagaacatgtccacggtgcgccgctacggcggcagcggactggggctctcgttggtgaaggatctggtggccatgatgggcggcaccgtggctgtggcaagtgagccggggcgtggctcgacgttcaccgtcgaattgcccgtagaggaggaagatcatgactaaggtgatgctcgtcgacgacgacgcgtctatgcaggtgctcatcgagcagattgtacgccgcggtggctacgacttctgctgtgcgggcaacggggccgacggcctggagatgctgagggccgagcgccccgacttccttattcttgatgtgatgctgcccgatatcaacggtttcgaaatctgcgagatcatccgaggtgagggacgcgaggtgccgatcatgtttctcacggccaagggcgacattgtcgacaaatcaatcggctttaaggccggtgccgacgactatcttgtgaagcccttccagcccgaggagctgcttttgcggctgaacgcgcatttgcgccgtcgagaacgcgatcgcgagcgccagcatgagggacgcgaccgccgtcccgaggcgttctcggtaggggatttggagatacgcttcgggaagtacgaggttcgaatgcgcggagaagtcgtggcgctgtcctcccgggagatcgagcttttagagctgctcgcctccgatccgggcgccgtgttcacccgcgatcagatcctcgaggcgctttggggaagcaaagaggctgccgaccccaactccatcaccgtcatggtgcgtaagatccgcgagaagatagaggacgacccttccaaaccacgctacctcgtcactatctggcgcgtcgggtacaagttggccgagacgatataggccgttcttctattgggactgattttcctttgaggttcgccgaagcaatggggcaactgctgcagcggcatggagcctttcttccatggaggttccatggataatgcgtttgtcattgcgcttaaacttccggccggttttctcttgaaggggtcttctctttgtagtattcttctctgctgtatctctgcgccagaattgtgtttctatgcccaaaatcgggcgcagacgccagagaaaggactatcgcgtggctgatgctgcaaagaagaatcctgagaacgaaaccgaagagatcgtcgtgaccgaggacgtcgaggagatggatgacctggatgacgacgacatggacaacgcggaacctcccgcgaacgcgacgaacgacactgcttccgacagcctgaccgaggacaagatcgaggccggcatcgactccgaagaggatctgctcgacggcattcccgaggaggagctgaaggccaccgttgaagcggctgctctccccaaggtcactccccgtaccaaggcccgcgcccgcaatcgcgccaagcgcaacgccgatgccggcgtgaccatgctcacgggcgatccggtgcgcatgtatctgaaggaaatcggcaaggtgcccctgctcaccgctgccgaggagatcgatctggccatgaagatcgaggccggcgtggccgccaccgaggagctggagaaagccgaggccgacggcatcgagctggagcgtcgcgagaagcgccgcctgggccgcatcgagcaggtgggcctggatgccaagcagcagctcatcgaggcgaacctgcgcctggtcgtttccatcgccaagcgttacgtgggccgcggcatgctgttcctcgatctcatccaggagggcaacctgggcctcatccgcgcggtggagaagttcgactacaccaagggcttcaagttctccacctacgccacctggtggattcgccaggccatcacccgcgccatcgccgaccaggcccgcaccatccgcattcccgtgcacatggtggagaccatcaacaagcttgtgcgcatccagcgtcagcttctgcaggagctcggccgcgagccaacccctgaggagatcggcgaggagatgggactttccgccgagcgcgtccgcgagattcagaagatcagccaggaaccggtaagccttgagacccccatcggcgaggaggaggactcccagctcggtgacttcatcgaggacgacgccgccgtggtgccccccgacgccgcctcgttctctatgctgcaggagcagctggccaaggtgctggagggtctggccgagcgcgagcgcaaggtcatcagcctccgtttcggcctggaggacggccatccgcgcacgctggaagaggtgggtcgcgagttcggcgtcacccgcgagcgcatccgccagatcgagagcaagacgctcgcgaagctgaggcaccccagccggtccagcaagcttaaggactatctcgaggactagggaacgacccgacagacccgatgcccgcggcctcgctgctgcgggcatcttcttttgcatgcaaaaacttttataaaaatggtcacaaagtcgagttctgggttttcgcaatgactcaaattcgtatttcttgcccgtctcgactccttctacgggcaaattggggcgtaaacgtcgccgcatcgcgaacaatgatggttctgaaaacccaaaaatcgattttgtgaccagaaatttcaaaataattgcaaggaaggcagtgagggccctatgaatgagaccgtttatgagttcttcgccacgtgcctgccgggcgccgagaagctcctggcggatgagctgcacggactcggcgtgaggaaggtgcgtccgctgtccggcggcgcgtcgtttttcggcgcgcctgaggacgccctgcgtgcgtgcctgtggtcgcgactcgcggggcgcgttaatctcacggtgggtcgcgtggtggcgcgcgacgccgatgccctgtacgccggcgtgcgcgagcttccctgggaggcggtgatcgccgaggaggcgagcatcgccgtgcgggcgagcggcaccaacgccgagctgcgcaacacccaattcgtcgccttgaaggtgaaggacgccatctgcgatcgtttggccgaggttcgtggcgcgcgacccgatgtgagtccccagcaacccgatgccctccttgaagtgcgtcttcgagaggagaaggcgacgctctcgctcgatctgtcgggccgctccctcacacgtcgggcgtacctcggcgatgaggccgcggaggaggcgcccgcggtggtgtcgcaggcggcgacgttgctggcggcagttggtgcggtcgagctgtttgcggagggaacgacgtttctcgaccccgtcgacgacgacagcatcctcgcccgcgaggaagcggaggtgcgcgaggaccgggcaccgggcctcttgcgcgaacgatgggggttcacgggctggacggcgtttcccgaaaaagcctgggacgctctgttggacgaggcggacgaacgctgcgaggcgcgcatggcgctgcttgccaccgcgccggtgcgtcccgatgccccccggctcgtggccagcgtcgcctcggcctttcgggccgacgacgacgccgaggccgtggctgcccgggctgcctgcgtggccgcttcccgcgaggcgccggccggttctcgcttcgccttcgccggtttcgagggcatggccgcgaagttcaaggaggagccggcggcgcgtctcaagcttggccgcgggcgctccgagacgacgatagaggtgttcgacgagccgccgcggcgtcccgccgttatcgccgtggccaaccccgccgggggtgccgacattcccgtcgaggtgaacgacccggcggccgtccagttcgcgagtcgtttgcgtaaggtggcccgcgagcggcgcaaatgggcggcgcgcgagggggtggcctgctatcgtctctacgatgccgatgtgccggagtacgcctgcgccatcgacctgtacgaaggggcggccgcggccgagggcgagctgtacgcccatgtggccgagtacgcgccgcccaaatccgtcgaccccggtcaggcccgcgcacgtttcgaggacgtgctcgccctggtgcccgtcgtgctgggcattccgccggagcacgtgttctccaagtcccgcctgcgcgcgaagggcggcggccagtaccgcgacgccggcggtcgccgttttgtgacccacacgagtgaggacggcttgatctgcgagatcgatttgggcggctatcttgatacgggcatcttcctcgatcaccgcgtgacccgcgagatggtggggaagatggccgccggcaagcgcttcctgaacctgttcgcctacacgggcgtggcgacgctgcatgctgcggccggcggtgcgaaggagacgacgacggtggacttgtctcagacgtacctggactgggcggcccgcaaccttgcgtccaacgggttcgccttcgaagttgccgacaagccgaatcggagggatcgaacgggcggaggctcgtcgaggggtcggcggggaggggcggccaacaagctcgttcgcgccgacgtcacccgctggatcgccgaagcgcgccggcgccgcgattgctacgacctcattttcgtggacccgccgaccttctccaattcgaaggccatgggccggcgcacctgggacgtgcagcgcgaccacgtggagctgctcatcagtgtctcgcgtcttttggccgacgggggcgtggcggtgttctcctgcaacttgcgcacgttcaagccggccatcgaggagctggggcgctgcggcgtggagcttgaggacatcaccgcccgcaccatcccccacgactttgagcgaaaccctcgtatccacaagtgctatctggtgcgccgaaaataaattttcgcctttgggaaaatagggtcttgcaaagcgaagccccttcgttataatactatcttgcgcgtcagggcaaaggttctgaaagcgacattcctcggtagctcaacggcagagcatccggctgttaaccggagggttgtaggttcgaatcctacccggggagccagaattttacgagtccgcttcggcgggctcgtttcttttccagtgccgttcccgtggagcaatcacctcatgagaattgtgacctcgcattctgggtttctttgctattattaaccaatccggcaagctgttttgtcggcaaccgcagaagtgcgggcgtggcggaattggcagacgcgccagatttaggttctggtgggcaacccccgtgaaggttcaagtcctttcgcccgcaccatttcccgcccgtgttccgtttgggtcgtgcggccgtgacgcgccttgtcagaggcgcgcgaagacaaaggagaattaccttggcagtccccgcagtatttaggaagtacaacgagatcagcctcatcaagcgcattctcgttggccttgccgttggcatcgtcttggcgctgctcatcccgaatgcgcagccttggaccgacatcatcacgcttctgggctcgctgttcgttggcgcgttgaaggccgtcgcccctgtgctcgtgttcttcctggtcatcagtgccctttgcaacgcccatggcgccggcaccatgaagaccgtcgtcgtgctctatgtcatcagcacgcttgtcgcggccattgtcgccctcatcggcagcgagatcttcccgacgtccctcacgctcgacacctcatccatggtggagcaggccgcgcccgagggtatcggagaagtgctcaccacgctgctcatgaacatcgtggccaacccggtggacgcgctcatgaacgccaactacgtgggcatcctcgcttgggccgtggtgctcggcatcgccttgcgtgccgccggcgagcgcaccaaggaagtgttcaccgccatctccgacgccgtctccaaggccgtgcgctgggtcatcaatttggcccccttcggcatcatgggcctggtgtacgcctcggtgagcacctcgggcctggagatcttcaccgagtacggccacctcattctggtgctcgtggcctgcatgctcatcatcgcgctggtcaccaatcccctcatcgtgtggatctgcacgcgcaagaacccctatccgctcgtgctgcgctgcttgaaggactccggcctgacggccttcttcacccgcagctctgccgccaacatcccggtgaacatggagctgtgccgcaagctcggcctgaacaaggacaactactcggtgtccatcccgctgggcgccaccatcaatatggccggcgcggcggttaccatcacggtcatgaccatggccgcctgccagaccatcgatctggcggtcgacccggtgacggccgtcatcctgtgcgtgctggccgccgtgtccgcctgcggcgcgtcgggtgtggccggcgggtcgcttctgctcatccccatgtgctgcgcgctgttcggcatcagcaacgatgtcgccatgcaggttgtcggcatcggcttcatcatcggcgtcatccaggattcctgcgagacgggcctgaactcctcttccgacgtggtgttcacggccaccgccgagtaccgccagctcatcaaggagggcaaggaagtgcacctgggcaaggactccttcgcctaccacgagctttcctaacaagctgcgtgcaccgcgcatttcgaatcacattgcggaagggagcctgcgggctcccttctcgtttgcccttgtttgtatccgacggccgaggtggtgccgacctgccggaacgagcgtaccagcaggtcgggttcgactgcgttcgatggccccggccaagaggggtctcagcggggacgtctcgccttcgccttgtcttgctcggcgcgcggcgcggcggtttccacgaggtggcgggtggtgagaaggcccgctgccataaggaggccgagagcgccaaaggaaaggcgcatggcgtcggcctgggcggacgccttcacgtccacgagcttgtcgacctgcgcggcgtcggccccccaggctctcgcctcgtcggaaaaggcgctgtcgctcatgagcgtcgaggcggtttccgcagcgggacccacatagctctggtcgatgcccgccgaggcggcctgggacgcgaatcctcccgccatggtgaggagaaggaaggtcccggcaagcgcggtgccgagggcgagccctatgctgcgggcggctccctggattccgccggactgctcggcctcctcgcgcgtcaccgcgcaggcgacggcgttgttggcctgggagttgacggcgcccaccccgaagccgccgagcgccatgccgccaaacagggccgtcgtcaccccgtgctgctgcacgcccaaagccatgagtccgcacgcgcaggcgatggcgataaagccgacgcggatgatgagccgggatgagaggtgcggcgcgagcttggggagaaaggtggccagaaggaacatggggatgcccgacaggagcgagagcattccggtctgcagcgccgtgaacccggtgacgagctgtaggtagggcgtggccaggatgccgaccgcccccatgtagaagaacggcagggcgaccgccgacaggcccgcgcgcacgctgggggaggtgacgaacgcgcgcggtatgagggggttgccgcggcgctgggcgcgccgctcggtgggaacgagcagtccgaggagcaccagacccacgacgatggcgggcagggtgggggggcagcccgcacaaggtgaaggggcagagcttctgggggctagcgatgccccaatccgacaggtgcgccacgccgaacagcacaagtcccatgccgagggcggccacgacggtgccggcgacgtcgaagtgcgtgtggccgccggaggcgggcgtgcgggggatgagccgcgcgcagcagagcactacaacgaagtaggccgccatgatggcgaaggtgagccggaagcccgacgagtccatgacgatgcccaggatcaggggcgagagcgtcgaaagggcggccgcgccggcgatggtgccgaacgcgatggcgcgctgccgtccctggtagagcgccgcgaccaggccgagcaccgagggcgtgaccaagcagacgccgagtcccgtgacaacgcgcccgccccaggtgaacgagaagatggcgggggagagcgccgccgtgatctctcccagcgcggccagggagaggccgatggccagtgtgcgcctcaggccgatcgtcacgccgatgagcccgccggcgatcatgaacgcgccggcgatgagcgagaacagcgtggtcgccatctggatgtcgtcgagggtggcgcccaaagtccccaccaggctcgccgtggcgaggttcatcgccgcgctgtcactcgaggtgccgatctgggcgagagcgagaacgaccaggggcgcgtacgtcgctttcgccgttgtttccgttcgccgagttgcgccctcggcggtgaggatcgttgtcgccatagtgaacctctcaactcgccgcggcgccgtctggcgccgtctcgatatcttgttgtctcgtagggaattttcccccgaatgcgcccctcgtccttcgtgtcgcccgaaatctcgtgcaactgttgccatcttgccacggtatcgtcgcccgcgactgttgcgggcgggtctacactagcgaggggagacgcgctcgcgtttcccggatgcgtgtgaggaggagcgatgaacagtagacagggggcgcttttgagggcgctgctcgaggccagcgattaccggacgtccgccgattacgctcgacggctcggctgctccgatcgcacgatccgcactgacgtgaaggccctcaacgcctttttcgaacacgagggatttgccacgcgggtgggccggcagcgcggcgccggcctgcggctctcgctcgtgcccgacgaggagaaccgccttgtgcggctgctcgaagagagcgagaccgagatgcacccgcgctacgagcggctgtgccaggagatgatcgcgctgacatgccatccggggccccataccgccgagagcctggcgcggcgcatgttccgcaacaagcagcagatccagtccgatctgcgctggtggcagggcatgctcgaggtgagcgggctctcgttgtccgtcgggcgccagatcacggtcgagggccccgaatggaccatccggggcttcgtcatgtccatgctgttctcgttttccaccgccgcagtgcgccggcgcatcctgccgtcgctgttcgggacgatcgacccttacgaccggcagtttctggagcgctgcatcgccgagatgcagcgcgatctcggcttcgagttctccagcaacgcgcagtggcagttcggcgtgtacctgtgcatcatggtgacgcgcatccggcttggatatgggctcacctcctggcgcggcgcggacggggccacgccgtttttcgcctacctgaagaagcggctggagcgtcacttctcgcttgcggtgagcgacgcggagatggggcttctgcgcgacatggcccattgctgcacgtggcagtggagcctggccgccatggaggcctacgagccgggcgagcgggcgcgcgcggtcaccgacgacatcgcctcggccctcgagaacgcgttcgggctgccgctgcccgaggatctgcgcaagcctctggccatcctgttcgagagcggccttgcgcggcgcacgtgcggcctggtcgccccgaaccccaacgaggaggccgtgaagtacgagaccatagacggcgcctgccttctcgcctcggtgctctgcgaggtgccctctcttgtcgaggccgacctgttcagcccggattacgcccgaatcgcgctcgtgctgctcgactacctcgatcaggccggcgccctgcgctgctaccgcgtggggcttgtggtgaactgcggaatcgatctggccctgtggggcgcgcaccgcatcgagaagctgacgagccgtctcaaggtgaccgacgtgctgacggaaaacgaggtgctcgccgccgtggcgcgtccgaactcgacgctgctcgagcgcttcgacttcctcgtctcgttcgagccgctggatgtcgatttccccagcgtgaccgtgtccccgggtgtcagccgcagcgacgtcgaccatatcatcgcctcggtgccgctctggcggcggggccgggaggtgcacaccgcgtgggagcgggagacgctttcggtgggatcctccccggagagcctgttcggctcgctccacgagcgcctgtcggcggacgggctcatcgacatgccgcctgcacgcttcgagcggctcgtgtggacgctgtctgtcgtgaaggatcgcacgctcgtgttcgcctggtgcggtttgggcgtccggagaacgggcatacgcatctatcgcctggaagagggcgagggcgccgagtgcgggcagtgcaccatggccgccgtgctcgtcgcggcgcccggggaccgggcggacctcacccccctcacgcagggattcaagcggctggtggaggactacgccgacacctctgacttggtgagcgacgacggcttcttcgtctgtttccccgagccggagtaggagcgagaccggggcggcccggaagggagtcggctgattcggcgcgggtgcggcggcctgctcggagggcgcttgcgggccacgggccggatggcagaaagaaagggaggctcgcgcctccctttctgcttcggtcggtttcctcgatcgatcggctgccgctactttgcgtcgcgctcgtagagggtctcgccctccttgatggtggcgagcacctgaatgtcgcggatctcgcgcgggtcgacggccaaggggttgcggtcgagcaccacgaggtcggccagcttgctggtctcgagggtgcccttatcggcctcctcgccgtactggtaggcgccgttgtaggtgatggcgtgcatggccgcatacggcgtcaccttctggtcctcgtcgagctggacgccggccttggtgatgcggttcacggcgcaccaggcggcctctagcaggttcgggcgcagcaccggggtgtcggtgtgcaacgtgaagggcagccccgcccgctcggcatcgccgcaggcgctcacgcggccgccgcgcaccggtccgaggttgcgcaggtgggcgtcgccccagtaccagacgtgggaggcgaagatcgaggggatcatgccgatctcggccatcttctcgtactggtcggtgcgcgccgtctgggcgtggatcatcaccgggcgcagggccatcttctccgggttgtccgaagcgtcccgcgccgcttcgtagacgcgcaagagctggtcggcagctgcgtcgccgttgcagtggcacagaagctggtggttggagtcgatggccatcttcgcgaaggcgatggcgtcctcgtcggtcatggtgctgtaggccacccagtccttctcgccgtcggggccggccgtgtagggctcggtcatccaggcggtgagcccctggggggagccgtcgaggaacatcttcaggccgccgaagcggaagtgcccggtgtagtgctgactatcgaactcggcattgtcggcgagcgtggccatcacgtccgagccccacatggggtagctcacgatgtccatcttcagaaggcccgcctttgccaggctcaccaggacgccggccatgtcgggggcggtggcgccatcctggcaggtggtcacgccgtgctccaggtagatgcgctgcatgtcgggcaccatggccgcgaagtccagccccagacggggggtcgtcacggcgtagagcgggttcatggccgccggctcctcggcgtagccgtccaaatcgcccgaaccgttgatgcgcccgtagcggccaccgtccggatcgggtgtcgtcggcgtgatgccggccagctcgagcaggcagtcgttggccacgcccatgtggttggacacgtgcgtgatgagcacgggcacgtcggtggacacggcgttcgggatggacttgtcggggtggcgctgctcgacgaggttgttctggtcgtagccgttgcccatgatgacgccgtccgggccgatgttgcgctcggcggcgaacttcttcagcgtctcagtgatctcgtcgaaggaggtgcactcggacaggtcggcgtacagcaggtactgcagcgcgccggtgaagtggctgtgcgggtcgatgaggccgggcagcaccgcggcaccgcccagatccacctcctcggcgccgtcggcgagacggcgggcctcctcggcgtcgccgatgtaggcgatgcggccgtcgtcgacgaggagcgcgtcggcggtgtcgacgtcatcgaccatggtgacgaaggtggcgttggtgaaaagccgtttcataaatttcctttcaaacacgcgcgagttacatctcgcggtcgactaccggctcgaagggcatctcgtcggccgtctcggccacgatggtctcctccttgccgtcctcttccttcttgaagatggtgatccagcgggtcgtgaacaggccgagcaggattagcacgccggagaccacgtaggaggtgatggtggactgaatgcgggcatcggagttcagctgcaccagctcggcgcgctgggcatcgtccatggggatgtcggcgatggtctgctcgaactgcgcatcgcccatgagcgagatgttgcgctcggccacggcggtgcggatctcgggagtgatgacggggctgtcggccatggcgttgtcgatgttggcggtgatgccgaacaggagcaccgcgccgatggcggccacgccgatggcctggcccacgttgcgcatggtggtctggatgccgccggactgcgaggcgtcgcgctcgttgacggccagggccacgatgttgttggcctgggcggagacgatgccggcgccagcgccggccacggccaggcccagccacatgaggccgttgacctcagagccgtgcagcgagaaggccatggggatgaaggcgcaggccatcacgatgtagccgacctggatgacgcggcgcgggttggcgttgggcataaacttcggaatgcccagcgagaagatgaaggtggggatgccgacggccagcgccatgacgcccatgagcaccggggaccagccggcaacgagctgcaggtagggggacaggaggatagcctgaacgcccatgaagaagaaggtgatggcgcttgccacgaggccggcgcgcacctgcggggtcttcaagaaggactggggcagaagggcgatgccgttcttctgctcgacgcgcttctccacgggcaccaggatcacgagcaggatcaggccgagaatgaccatgggcagggccggggagatgccgaagatggtgaaggggcactcggcgaagggctcgatgaggccccaggcggagatgcgggagaggccgacgaggaacaggaacaggcccgtggcggcgatgccggtgcccagcccgtcgaacttcagcttctcagcgggcttctcgatggccggcagcttgaaggacagcagcagcaccagggcgaagtacacggccagggcgccgaaggtcacgcggaaaccgccgaactgcatgacgatgcccaggaacagcggcaggaaggccgacagtcccgaggcggcgccgatgcagccgaaggccagcacgcggttcttgccatggtagatgaacggaatgaggccgagcaccgaggggatcatgaagctggcgccgaagccgacaaggatgcggccgccccagatgaagatcgtcatgttcggcgacagcgccatgaccagctcgccggcggcgcacagggccgcgccgaggcggaagttggtgcgccagccgatgatggtgcccaccaggccgcccgctgccatgaaggcgccggccatcagcgagtacaccatgttcgccagctggatgtcgggggtcgtcgcaccgagcacgtcgaccagctgttggttggccagtccgagcgcgccgttgtcgcccgacgttcccatctgcgccagaatcaacacgataatgggcagcacgaggaacttctcaacacccccctcgggatgtgtcgctttgctcttcgccattatgtcctcctttaatcttggatgggatgtctacgccgaaaagggtagtctcgtcggctcccttcgttattcggcggcgctcattgtagaaagattgcttccttttcgcacatgaagcatttccgttgcaacggaaatgcttcatgtgcgaaaaggaaacaccggttcctatactgctcgacggtcaatttccgcgcggcccttctcggcaccccgacaagatgcgagggggcgcggtttgcgaacgagcatggcaagaagaaaggaatcacttcatggcaaagacctccaagaccccgaaagcccccaagtccttcaagtcctacgcgctgaacaagtgcctcatcggctacggcgtggtgaacggcatcatcaacgcggccatcttcgccggcatcaacgccggtgctcccgatgcgatgttcggcatgcacgacatcgtgcacgacctcgccttcaccggccttctcctcggcatgctgctgttcgcctgcgtcgtgccgctcacccgcatggatctgcgcaagggcgttttctccctgcccggtgcggcgggcggtgcctttccgctcgtctcctcgtcctacgcggtctccattctcggcgtgggcgcgctcgccgcggtggtcatgaccggtgccggcgcccttctttccttggcattgccggccgccggcgctaccgtgaccggcatgatgttcctcaagggcctggtgtgcgctttgggcggcgcggtcgccggctggttcaccatcagctttgtggtgcgcggccagcagaaggccgacgaggtggcggccgccatggcctccaagactgccgaggcagcgctctagggcaatctgcttggatctgcgcttgcgcccgtcgagatcggtcttgcgagaggccgttcccggcgggcgcgctttgtttcgagcgaggcgcgggggctgcttgtcgaaacaggtcgggaacgaatcggtggctcgcctatggcaaggttgcccctaaggttcctccgtgcccacccttccgtaacggcattccgggttttcgccgatggcatcagcgcgatgcccataatgaggcgcgccgggcgacttcggcaagttgtgccagcagacgaagatcccgatgaaaggaatgctcatggcaaagtcaatggctggctcggcgcccgcggcgccgacgcggtccgctaagccgttcaattcatacttgctgaataagtgcatcgtcggttacggcatcatcaacggcatcattaatgcggtcattttctatcttatgcacctgtccgagcccgagctcctcttcagcgaggccgacatcttccatgacttcgcgcttacgggggttctgctcggcattctgctgttcgtcatcgtggtgccgctcacccgcatggatctgcgcaagggcgttttctccgggccgaatgtcgccaatctcggcggcgcggcgtctctcgtgccggcgagctacgctccggcattgctcgtggcaacggttgccgccaccgtctcgctgatgggcgtcggcgctttcgcctgcgtgcttctgccgctgccgcttaccgtgacgggccttatgctgctcaagggccttgtgtgcgcttgcgccggggccgttgccgggtacatcacgatctgctacgtcgtgcgctccggcaaaagcgaggcctaagcggcggtctgcagagtcccggtgccctgcttgggacgggcggggatcgccagagtacgtcgaatcgacgctcctgggagacgcgggatgccccgcgtctcttttttgtgtcatggtgtcggtgacgtgtagccactgtgggagggttgtggcataatagcgaaccgtgcgcttccgcggcggattcccgtggcggatcgccgaggaagtgttcgcgcgggcgataagcccgtaacgtgtcaagaaacgatggaggaactattcgtggaaactaaggttgagtccctggagggcaacaaggtcaaggtcaccgtcacggtggacgccgctgatatcgacggccgcatcaagaaaacctacaaggacttcgctcgcaagtacaacttcccgggattccgcaagggcaaggccccgcgcccggttatcgacaacgccctcggcgccgaggcggtcgtcggcaccgtcaccgaggagctgctgaacggcacgtggacggccgcgatcgacgaggccaagctcgccccggtgggcggcccggtcatggagaccaacgagatcgtgaaggccggcgagccctacgagtactccttcaccatcgagctgcgccccgaggtagagcttaccagctacgagcccgtggccatcgagatgcctttcgccgaggccaccgatgccgagatcgacgagcaggtcgaggccatggccgagcactacaccgactatgaggacgcttctgccgccaccaagatgaagccggagaactacgccgacctcaccatgaaggccaccgacgccgacggcaacgagatcgccgcgcttacgagcgagtcccgtctgtacggcccgggcactggcatgttctccgaggccttcgacgaggagatcctcggtatgaagaagggccagaccaaagagttcacgctcgagattcccgaggacgagacggccgtgcttctggccggtcaggcgggcaagcccgttaccttcgaggtcacctgcaacgtggtgaagaagaaggtcacgcccgaggtcaccgacgagtgggccaaggagaagatgggcttcgagtccgtcgaggacatgcgcgagcgcatcaaggagtcgctggatatgcagaagagctcgctgatgccgcgcatcaaggagaacaacatcatggtcgggctgcgcgaccgcgtcgagggcgacgtgcccgagtccctggttgagcaggccgagacgtcgctgctccaggacttcttcggccagctgcagcaggccggcatgaccttcgacgcctatctggccagccagaacatcacgcccgatcagttcaaggccgacctgaaggcccagtctgccgaccaggtgaaggaagagctcgcgctcgaggcctgggctcgccacaacaacatggagatcaccgatgcggacgtcgccgccgagttcgccaagaccggcgtggaggatcccgcggcgctggagcaggagtggcgcgacgccggccgtctgcacctcatccgcacgggtcttttgcgccagaaggccatcgaggatctcatggagaacgcgagcgtgaccgaggtggacttcgccgccaaggccgctgaggagaagaaggccgccaagaaggacgagaaggccgaagaggccgccgagtagctttccggctagcacgttttcgaaggggcgggtctcaccgccctttctgctattttcgctaggagtcttgcgctgcgaacggatgtatagcaatatgatcttgaactatgtggaggccgctgcgagcggccctatttacgaaagcgaggtatctatgggcatcgaacgcgtgaacaacgccctcatcccctacgtcgttgagcagtcgccgcgcggcgagcgcagctacgacatctacagccgcctgctcaacgaccgcatcatcttcctgggcgagcagatcgacgaccacgtggccaactcggtcgtggcgcagcttttgcacctggaggccaccgatccggacaaggacatctccctgtacatcaactcgcccggcggctcggtcacggccggcctcggcattctggacaccatgaacttcatcaagtgcgacgtgtccaccatctgcatcggcgagtgcgcctccatggccgcggtgctcctctcctcgggcaccaagggcaagcgcttcgtgctgccgaactccatggtgctcatccaccagcccttgggcggcgcccagggccagcagacggaaatcgccatcgtggccgacttcatgctgaagacgcgcaagcgcctgaacaagatcctgtccgagaacaccggccagtccatcgagaagattcagctcgataccgagcgcgacaactacatgaccgcggaggaggccaaggaatacggcctcgtcgacgagatcatctaccatcacggcgccatgcccggagagaagaagagcgaataagaccccatgaaccatcgtcacgacaattacggccccactgacaccaattatttctgcgccttctgcggcaagaccggagaccaggtcaacgccatgatctccggccccaacggcatctatatctgcgacgagtgcatctcggtgtgcgccgatgccatgatgcgggacatgggctacgccatggcccaggaggtggagatgctggaggacgatccccgccgcatgggctggatgaacccgccggccgcccaggtcgagcgccaggccagtcccgtggtcgacaacgccccctcgccggccgaggtgctgggagatttgccgacgccccacgagctgtacgcgcgcctgtccgagcacgtcgtcggccaggaggaggccaagcgcgccctttccgtggccgtctacaaccactacaagcgaatctccatgggcgccgccgcccaggagggcgacgtggagctggccaagtcgaacatcatgctcatcggccccaccggctcgggcaagacgcttctggcccagacgctggcccgcacgctgaaggtgcccttcgccatcgctgacgccaccacgctcaccgaggcgggatacgtgggcgaggacgtggagaacatcctgctcaagctcatcaccgccgccgacttcgaggtgccccgggccgagatcggcatcatctacatcgacgagatcgacaagatcgcccgcaaggccgagaacctctccatcacccgcgacgtgtccggcgagggcgtccagcaggcgctcctcaagatcgtcgagggctgcgaggcgagcgtgcctccccagggcggccgcaagcacccccagcaggagctcatccccatcgacacgacgaacatcctgttcattctgggcggtgccttcgtgggcctggccgacatcgtggcccagcgcgtgggcaccacgtccctcggcttcgccagcgagctgcccgcctccaagaaggagtccgaggccgagcttctgaagaaggtgctgccggaggacttgaacaagtacggcatgatccccgagttcgtgggccgcatcccggtcatcacgtcgctgaacgagctgtcggaggaggatctcgtccgcatcctcgtcgagccgaagaacgcgctcgtcaagcagtacacccgcatgttcgagttcgaggactcgcgcctcaccttcgagccggcggcgctttccgccatcgcccatgaggcggtggaacacggcaccggcgcccgcggcctgcgctccatctgcgagcgcgtgctcatggacgtcatgtacgacttgccggagcacaagggcgccacctccgtcacggtgcgcgcgagcgatatcgccggtgagacgcgccccgagatcgtcgagatcgccgacggaagcgctcaggtggctctttctgcgtaaggcagcgggccttctgtgcgataatcgcccaaggcaatctggcgggcggccgcgtgcgtgccgcccgccttgttttataccgagcaatcagggaaagcgagggcaagggcctatgtccgaggacaagaagaagtccaccgactacgccgccatggagcggcccatcttcgaggcgtggaaggacgccggctacttccaacgcacgccgggcttcggcgagcatgccgacgaatcctacaccatcgtcatcccgccgccgaacatcaccggcgtgctgcacatggggcatgccctgaacgacaccatccaggacgcctgcatccgccgcgcccgcatgcggggctttaaaacccgctggatcatcggcaccgatcacgccggcatttccacccagaccaaggtggacaagcgtctggccgagcagggcatctcgcgcttggaaatcggccgcgaggcgttcatcgaggaatgctacaagtggcgcgaggagtacggcaccaccatcgtgaaccagatcaagggcatgggctgctcctgcgactactccgacgagcacttcacgctcgagccggcctacgtgcgcgccgtgcggaagctgttcaccgactggtaccacgaggacatcatctaccgcggcaagcgcatcgtgaactggtgcccgcactgcaccacggccatcgccgacgacgaggccgagtacgtggacgaggcggggcatctgtggtacctgcgctacccgctcgccgagccggtggacggcctggagtacctggtcgtcgccaccacgcgtcccgaaacgatgctgggcgacaccggcgtggccgtcaatcccaaggacgagcgcttcgggcacctcgtcggcaagacggtgaagctgccgctcgtggaccgcgagattcccatcttcgccgactggcacgtggataccgaattcggcacgggctgcgtgaaggtgacgccgtcgcatgaccccaacgactgggccatgggggagcgcgccggtcttgagcgcatcaacatcttcgacgagacggcccatgtcgtggaaggctacgggaagttctccggcatggaccgcgacgaggcccgcgaggccatcgtggccgccttcgacgagctgggcctgctcgatcacgtggaggatcacgaccattccgtaatgacctgctaccgctgccataccaagctggagccctgggagtccgagcagtggttcgtggccgtggacgccctgaaggagccggcggcccgcgtggtggaggacggctccatccagttccatcccgcgcgctggaagcaggtgtacctggactggctcgccaacctgaaggactggtgcatctcccgccagctgtggtggggccaccgcattcccatgttctactgcgacacctgcggctgggaggacgcctcggtggaggaaatcgaggtgtgcccggtctgcggcgcgccggtgcgccaggacgaggacgtgctggacacctggttctccagccagctgtggccctttgccaccatgggctggaccgaggagggcatggacgccccgcagatgcgcgacgcctacccgacccaggtgctctccacggcccgcgacatcatgggcctgtgggtggcgcgcatggtcatggcctccatgtactgctgcgacgagaccatccccttcgacgacgtcatcatccatccgacggtcatggccgccgacggcaagcccatgtcgaagagccgcggcaacggcgtcgatccgctgcgcctcatggaggactacggcgccgacggcatgcgcttcggcctgctcatgcaggtgaccggcgcccaggacttgaagttcaacgaggcgaagctggaaagctcccgcaacttcgcgaacaaggtgaagaacgcgagccgtttcgtgctcatgaacctggaagggtatgagcccggcgcgcccgagcccaccacgccggccgaccgctggatcttctcgcgactggccaagatcgtcgctgcggtggacgcggcctacgataacttcgagttcggcgagatcacccgcgagctgtacagcttcgtgtggaacgagttctgcgactggtacatcgagttctcgaaggcgcgcctgggggccgacgccgatccggccgaccgcgtcgtgtgccagcgcaacctcgtgttcgtgctggggcagatcctgcgccttctgcatcccatcatgccgttcgtgaccgagcaggtctacggtgagatgcccaaggatgccgatgcggctccgatgctcatcgtggccgcgtggcccgatgcgggcgagctcgccgcctatgtggacgaggacgccgagcgggccattgccatggtgtgcgaggtggtgggtgccgtgcgttccacccgggcgcgctacggcatctccccgaagacggcgctgcccgtggccgtgaaggtggccgacgagaccgatgccgcgctgcttctgggccaggaacatctggtgcgccagctcgccaacgtggaggagttcgacgtggccgtggaggcttccaagcccgccgagtccgctgtggtgctgggaagcggcctggaggtgtacatcgtgctggcggggcatgtggacttcgccgccgagcgcgcccgcctcgtgaaggagcgcgagggcgtggccaaggatgccgccaagttcgagaagaagctctccaaccccggcttcctggcgaaggcggcccccgagatcgtcgtgaaggaccgcgccaagctcgccgacctcaccgacaagctcgcccgtctggacgcccagatcgccgagctggggtaagctttttcaattccgcattactcgtgatttgatccgtagggggcgaccttggtcgccccttttcagtttcgtgaatctcccttttttgggag

SEQ ID NO: 10508 - DNA, 5826 bp, Unknown
  gut microbiota DNA sequence
atcggaataattgatgattcaataggtctaagcgatgcgaaattgattgtagaccaacaatattgagaaattgggtaataaaagaaacaatatctaaattttgtccgtggaaaactgccattccatccttaagaatcagaagtaagtcaggaggaatgaaattccaataggctaaaaagtaaaacttgagtaaacaagtgcgaaaggggttcatccatgagtgtctaccaggaggcctaccatctgcccgagttcacctacgactacgagaagctgaagatcgagcagcgcggtccggtctacatctgctccttcaatgatgcggacaacctgaacgccatgtcctacgcccagatggccgagttcaacgacttcctcatcaaggtgcgcatggacaaggactgccgcgtcatcgtgctgaccggcgagggccgctccttctgcgccggcttcaacctgaacgacctcgccctcgatccgcccgaggacatgggccgcatccagcgcgacttctacatcatgcagcgcatgtgctccgaccagatcatcaacatgcgccgctgcgagcagcccatcatcggcgctctgaagggcttcgccgtgggcggcggcctgtccatctcctgcgcctgcgacatgcgcgtgctcggcgagtcctacaagatgaacgccggctatctgtccatcggctacaccggcaccgacatgggcggttccttcttcctcccgaagatcgtcggctacgcccgcgcctgcgagatcctcatgaacccggcccgcttcgatgcccagaagctctacgagtggggcttcgccaaccgcgtggtggccgacgacgacgtgcttgagaccgccgtggccatggccgaggagatgtgccgcgagaccgccccgttcggtctgcgcctcaccaaggaggccctgcagtgctcgctggacggcaccagcttcgagaactgcatcaagatggagaaccgcaaccaggtgctggcctccaacaccaacgacggcatcatgggcacgctgaagatgaacccgaagaaccgtgccgacgtgaaggagaacccggagaagtacgccttccacaacatgtaagagaggatcggcaaaaccgaacctgctatctggagccccgcagcccacaaggccggggctcccttcgttggaggggagaatgcccatgaaagtgctgggaatcaatgggagccatcgggccggaaaggggacggcggcacttctgcaggcggcgctcgacggcgcggccgagcaggggacggcgctcggagtgccggtgagcggcgagctggtggagctctcccggctcgatatcgggttctgcatcggctgcaaccgctgcctcgcacagacgagctgcacgctcgcggacgacatgaacgacctctacgagaagctgcgggacgccgacgtggttctgctcgcctcgccggactacttcggcacggtgagcgcgcggatgaagaacttcatggatcgcacgcgccccttccatatggtggagaacgtgctgacgggcaaggtgggcggcgcgctttccacggccggcctcaacaactgcggaggggaggggacgctcgcgcttctggacagctggttcgccacccagggcatgctcgccgtacacccccgcaccccgggcgcgccgctggccggcggcgtggtggccacggggtttgcagggctgaacgagaagggccagcctcagtggcgctcggtgaagggcgacgaaattggttttgccctggcacggcagctgggccgcgaggccgtctcgctggccgcgcgcctgcggtagcgattttctcgcggtgcaaatcaaacaaatcggtgcccaatgtgacgaattgttgacagggtttcagagttcctacatagttcgcgcgcaaagccaacaagcgcctgttgactggcagttaccactgtctggcgcgctaaagtccagctatcaggtaatcgttcgagccacttgggcggttcgatagctcggcaggctgatccttcaagcgactcccggttcccttactgtgacgcgttagaaggaggctcatcatgacccgcacatccgattctgttcccctgaatggcatctctcgtcgtacgttctgcaaaggggcggccgtgctcggtatctggggcggtctggccagcttcggtctggccggctgcgcgccccatagccgcgccgaggagctggccgattccgcgccgtggaaggcgggcacctacacgaccgaggtgacgggccacaatgccccctacaccatgaccgtcacgttctccgatgacgccatcacggccatcgacacctcggcgaaccaagagtcgcttggcgtcggcgccgatgctttgaaggccctgcagcagcaggccatcgacaaccagaccatcaacatcgatgccgtcaccggcgcgacgctgtcctcgctctccctgcagaccggtcttgaggactgcgcgaagcaggctcaggccttcgaggtgctctcggaggcgcccgtgcccgagaagccggcggtggaagaggtctacgacgccgacgtgtgcgtcgtgggcggcggcggctcgggcctggcggcggccatcgcggccgtgcaggccggcgcgagcgttattgtgcttgagaagtgtggcattaccggcggttccaccaacgtctccgagggcgcgctgaacgccgtcgatcccgagcgccaggagccccagggcatcgaggactccatccccaccttctacgagaccaccatgaagggcggccacaacaccaacaatcccgagctcgtgcacttcctcacggacaacgcgctggattccgtccactggctcgagagcctgggcgtcgagttcaaggacgagatcggctcggccaccggatcgctcggccagcgcagccattacccggccacgccgtcgggcaacacctacatccgctcgttccagcagttcatcgacgacaacgccgatgccatcatgctgctcaacgacatgcaggccaaagagctcatcctggatgacgccggcgcggtcgtgggcgtgaaggcgctctacgacggcgagcaggaggtcaccgtgaactgcggcgccgtggtcatcgccaccggcggcttcggcggcaacgtggagtaccgtcagaaggtgaatacgggcgtgtggaaggaagtcgtgctggacgattccatcggctgcaccaacatcaagccctgcgcccagggcgagggcatggtgctcgccgagaacgccggcgccgagctcatctgcttgtccgacatccagctgcacccctgcggcaccccgggcacgggcctcatggaggacatccgcacctccggccgtaaccgcatcttcgtgaacaccgatggcaagcgtttcgtgaacgagggcgccgagcgcgacgttctgtgcaagaacatcttagcccagcccgatggcacctactggattgtcgtgaacaccctgcgctaccccaatcccgacgagccggacgccaacggcgccaccatcaacaacatgctggctctgggccacatcgtcgctggcgacaccgtggaggccctggccggcgagatgggcgtggacgccgcgaacctgcaggcctccatcgacgcctacaacgccgtggtggaaggcggcaccgacgagttcggcttcgtggccgacaacaccgccgatgcggccatgaccgagggcccctggtacgcctgccgcaaggtgcccaccgtgcaccacaccatgggcggcatccgcgtgaacgtggagtccgaggcctgcaacgccgacggcgagccgatccccggcctgtacgccgcgggcgagtgcaccggcggtatccacggagagaaccgcctgggcggcaacgccatcgccgattgcatgaccttcggccgcaacgccggcaccaacgccgcaaagtacgccctggcataatccttccaggcacagccttcttcccgccacgggaatagaaagcgggcccctcaccgtgaggggcccgctttgctgtgcacttaatgggtaaagtgtttctgcagaagccgacctacctccgtaccgccacggcgacggttttgccgctggcggcgatgccgtatcgcaggacggggtcgggaccctgtgtcgtctgcggcacgtaggccttgtcctcgatctgctccagggcgctgcgggcgaggctctcgagcgcgtttctgtcagctttcttggcaaacttgagttccaagatgatcgtaggacgctcttgccctgcctgcggtagcacgcagatgtcgaagcgcccgcgcccgctctcccggttggagaggggatcttggtagccctccatgccgaacagcagaccgagcaccaacatatggtaactgttctcactcgcaagatcgaagaagctagccgagtacaagaggatgttctccagctcgtgcgcgacggcagccgcgtctcccgctgtcagggcctcgtggaaggcgaacaggcggtcgcgcgagccggcgatggaggagaatcgctcgatgatctccgtgcggtacagctcgcgaatctcggcgttggggatgcgcagggcgcggcggatgcgggtgttgttcggcgtctcgatgtcgttggtggtgaggtagcccgccagatagagcatgctccacagcgcgcccggggccacctcgctctcgtcggggaagaccaccgagaggttcagcggctcgcgcaccaccccgccaggctccataagggcgtagagcttctgctccgttgccgcgtcgcgacggcggacgagatcgccgagcaccgagttgctcgaggtgttgccccagtagacgtcggccacgcatcccttctggaagtagttgacgacgctccacgggttgtagacgtccacgttgccgaaccggtagccgtcgtaccatgcgcgcacctcgtcgatggcggccgacgcatccagataggccgccagggcggtaatctcgtccccggtgaagccgtagcgctcgtcggagagcacgttcagcgaggtgttgacgtccaggttgttcagatcggagaagatggactccttcgatattctctgcacgcccgtgagcacggcgaaggcgagggccgagttgtctttcagggcgccggtgagccacattttcatgaacgtcacggcttcccggtagtaatggttggccgacgcgctcatgacaggggcgtcgtacccatcgatgagaatcaccgtgcgctgcccgtggtgctggaagagcaggcgggaaaggaggagcagggagttggtcggcagctcgtcctctccgtggcttccggcgatgcgggagaagagcgccctttcctcttgcgagagcgcggtgctctcggcgaggtagccgtgccgcaggtactcgcccacgatgttctcctcgatggagcgacgcccctcgtaccaggtctgggccttggtgttgttgaaggagaggtggatgaccggataggcgcggtggtgcttgcggaatgccccggcgtcctcgtcccagatagccatggatgcgaagacgtcgttctcgggcgcttcggcgggagaatcggccggcgccatctcgaaatagcagtgcagcatgctcaggttgagggacttgccgaaccggcgcggccggcagaagagcgtggccttcgagccgctgcggaagaggtcggcgacaagcagcgacttgtcgacgacgacggagtcgcgcacggcagatctgaaatcgctgtttcccaaggggagcgttcggctgcccgacagatcgaggacgcgaacgtttcccatgcggaaaacgccgtcgcggtagagactgtcttttcggatgccca

SEQ ID NO: 10509 - DNA, 16778 bp, Unknown
  gut microbiota DNA sequence
aagcccactacatagaccaaatcctgctcagcaaaatagcggtagattatatcgaaggggtctacaacgactttgcgaaccgtgtcgccgaagcgtcgcttgattgaagtgggcagtatcctcgaccccatctcgggcgcaaactcaagaagggataccgcataccatatctcctcgcgctttgagtccatgtatacctgggtcatatcctcaacaaagccttcagagacctcgactttagccacgaccaagcctcttttcgacttcggctcttgcttccgctacgccatggaatacacgcccggccgcaaaatcggcctctcccctctcgagcacttccataactcttcgctcgtacaacgcctcctctacagcacgcgctttttcttgcgctaaaacatcctcggagcaaaagatgtaagcagcattgccgttctcggtaatgtggaccacttcttcagcagccctgtctttaatttctctttgcttggttttcaaggcggcaaaggagtagataggggtagcccttggtgcctcatatgcaggaactggcatggcaatctccttaaagttcttagttaggtatctatatagtactcaaaatcgataccttattcaatatcaaattcagttccatagataaacggattctgatttgcgcttctgccgcttcttcggtctcaccgatggctactggcttcgcgcccaagaagcctacgacctggaaatcacaaggcgcaagctcgcccccgagctcaagcgaatccgtcccttcaaccaagctgcctgcctgtaggaatctagaatcccatcgccttcaaccgctccaaagcgggcgcggcgtggcgggcgccggcttcgggatacagctcggaggcaatcgcgatgccgaggcgaacatcttccgccgcctttccaagcacttcgcctacgacgcgagcaggcaggccccatgatcgggcctcagctacaatattctctcgctcgatcctatcgatgcgaatgcggccatcgatgcgcaagcccatgaacagcacgttcggcgtaatctcaagggctggcacgacgtcatagagcggcgcgaggcgcacctcgtcgcccccgtggagcagcgcgtagttcttggcgtgagcgtcggtatttcccagaacggtgttcacgaagagatgccgcagcagccgcttgcgctcttccagcgagtcggcggcatagcgggacagcagctcggcaatgcccttgtaggtcggatcgcttttcgtgggcgtcgctgttgccgcgtacttgcgtcccggttctatgccgagagcttgcgcgcagtcttcttgatgcagccgaacgagccccctttcggtttcaactcggtcgaagcgttccacaaccagcgtagacggcgcttcgagcaaatcgagaatggctgagccagccgtctccgtcacatgtcgtgcgacctccattccccatgcttccgcttcgaccaatcccgcaagccgaccctggggctgcagcttcaatatatgcgtcgaaggagccccgtccaaaggaagcgccgcggaacttaaggccctgtggcctggctcagccgcagcccagtcttctgatctcgcaatcacgcacagcttctcctgaaagccgccaagcgacacccgcagagaagatgcgtcatcgtaagggtgcgacggcaatgccgccagacgtgccgacagttcctcgggagtcaatcgcttctcgcgcggcagctcctggctcgcacgcgccaacgcccaatcttccgagggcatcacctcaacggcgccggcgcactcccaaccaatctgggcgagcaatccaaaatagtcgccctcggcaacaccgtagaaccgctgcagctcatcgagcctcgcgtcttcgggcaaaagccccgagaaccaggaaaacgtccgctgggcatcgaagggttcctcttgaacgcagagcgccgttgagagcagaggcgaaaagggatgcgccgaggccacctcttccgagaacgcgaaacgagcgccgttcttcgtgcgagccagttgcccaatcttttcgccgccgaggcgaacctcaaggatctcagaattcactgttgacccccttcttggcgcgagcgcagaagcgacaccaccgatgcaggggcatcgtgcacttcggcctgagcgcccttagggagcaccaccagcttcaagcccaaatcgctgatggcgcgcatgagggtctgggaactgacgcccttgccgttttcaagagccgaaagggtggcgtgggaggcaccgatgatctcggcgaactcatcttgggtgtaccccttttccttgcgggttttctggagaaacgacccgagctggtcaaggccgtacacattggtccacttcatcgtacatctcccatcggatatcaatttttcttgatattagccgatattgggaaaatgtcaaatattcttgatagatcggaaaacgaggtgattgtcaaatatttttgacagttagcccttgagcaggtcgcccagaccctcgttgaagccctcggcgaaggcgctggggatgacgacggtgcccttgccctcgcgcagcgactcgttcagcaggtgcatggtgcgcaggcgcgagaccgcctcgtggtcgccgatgagcccttccatttcgtccaagatctcgtagatgtcgtgctccgcctccatgaggatgatgcgggccttcttgcgttgctcggcctgggcctccagactcatggcctcctgcagctccttcggcagcagaatgtcgcgcacctccaccgaaagcacggtcacgccccagggcgccaccttctcctccagcacccgtttgagctcccgatccagctgctcgcggcggatggccacctcggcggcgcttgcccggccgatagcgtcgcgcagggccgtttgggccgccatctccacggcgcgggtgaagtcgcccacttcggtgcaggccgcggcggcgtcccacacgtgccagaacagcacggcgtccacgttcatgggcacgagatcggccgtcagcgtctcctcggcgtagaaggtggtcacccgggtgcgcgtgtccacccgcatggtattcgattcgatgacgggaatagtccagaacagccccggccccgacacgcggttaaagcgcccgaggcgaagcaccaccacgcgctcccactgctgagcgatatgacagcaaccgatggcaagaagcgccaccaacgcggctacgatgataagtcctagggtcacgcggccggtcgcaagcgcgccaacgcccagcacgcaggccagcaccacgacgaacagcacggcggagaacagcagcacgcccgccgaagaggcgcgctcccccaccacttccgtagacacatccggcgccacgcggaagcggcgctcgtcggaagacttctctttgccgaacatgggaactccttcagatcgggacttgcgggacggcgtcattcggcgcagtcagagacgcaaacaggggcgggagacgcgagctgtcacgcccccttctcggcccgcacggcgggcttctcgaaatcgatgatgcgggcggacacctcgccgcgctcacgggcctcatcgtacttcaggcgcttgatctttcggctcatggcgcgctcgatgtcgtctagccccatgcccagctcgcggcacgacgcgatgcactcgtctagcaccgcatcggcctcaccctccccttccgcacccatcttcgcacccaaatcggtcacgaacacgccacgaccccgcgtcgattccaggtacccgtcggacacaaggctcaggtaggccttgttcaccgtgttgtagttgatggagatctccgaagccaggccgcgcaccgtgggcagcttgtcgccgggcgccagggtgccgtcgttgatgaggtaggcgatgcggttgcgcagctgcacccacaggggcaagtcgcttgtcggatcgacttcgaagggaaacatggacgacctttctctcaaggactagaagggaacggaaacaacgggcagcatcccggccgccactacgaccgcgcgcaaacaggcgccgccaacaagaacgcaaccggcgctggcgagcaacgcgcgcgaggcgagagacgcctcggcgacgtccttactcgcattgcaacgcgcgaggacagcctctatcgcaaaaggagcaacaaggccaacgagcacaaggccgccccagaacggcagagagcacgcaccgttcaatacggaggccaccgatgccaacgcggccgcatcggtaggcgttgcccccgaggaagccgagccgccgtgttccagccacgctgcaccgagccacagcgccacgacgaccgcctccagggcaaggagaaccatatcggcgcgaacgacttgccgcatcgttcggccgaaaaccgtcgccattcccgaaaatactgccaccatgcccacaagcgccactccgcacgagagagccgagatcgcgaacagccccggcagccacgggccgaaccacaacggcaccgacggcatacccgacagcaacagtcccgtatagatcaccgcgacgaaagacaccgccgcaagcaagacagcgagcgctctgaatagaggcagagacaccgacggcaccccgagccacacaagaagcatggctgccgccaacgtgccacaaagcaaaagtgcccagaatcctacgaccagataattcgaaggggatgaaaccgccagcaaaaggatgcgatcgaggcgccccacatcagccgcaaggcacagggtccccagcactaagactaccagcgaggccacgagtatcggcacgaacagtcggcgataggcagcgcttccgttgtctctgaagcgcacaaccactccgcggctcacggctctctcgtcagcgaggagcatcagcactgcggcaatcaagagcgcgcccgcccctgtccctcccagaaagaggtaagcaaccaccagttcgctgaacacgactcctcctcttgccctagacaatgcctacggaacccaccgaccccgcattccggcgttaagattatcataagacaatcgaagaagcgatgcgtccgtcaggaaagattcagggagagcagcaccaagaatttcgagttgttagacatccaacgcgctcgcaggtgattgcctgcttccatcttgtcttctcatatatcgtattttattacttttcttacacattttgttctgccacagtttttgagcgaaccatcgcgcgtacctaaagtctaacaactcgaaaaaacagcccgaatccgacggcaagcttttccgagaaggccttcgttcccgattcgcacggttaattcacgttgaaatcgcgccgcttttgcgtcggctacagcagcaccttcacgccgaagtaggcgagcaccaccaaacctacgatgatgcggtagacgccgaacgccgtgaagtcgttcttcttgatgtagcccatgaggaacttgatggggatcaccgacacgacgaacgccgtcacgatgcccaccacgagcacggcgatctcggtggccgtcatggccagacccacggccatcagatacttgatgagcttcagcacgccccagccgaacatgacgggaatcgcgagaaagaacgtgaactccgccgccgccgtgcgcgagcagccgcacagcatgccgccgatgatggtggagcccgagcgcgacgtgccggggatgatggcaagcatttggaagcagccgatcttcagcgacgtcttccagtcgatctcgtccacggtgcgcacgcggaacagggccatctcggcgtcgtcgccatcgtcgcccggatccacctcgggcacgggacgcgcatgggcgccgcggggacgccgaggggcgcgactggccaggtaggctgcctcgcgccgacggttgcgccgctccagcaggatgaacacgacgccgtagacgataagggcgatggccgccgtccacgcgttgtagaagtactcgttgaagaagtcgtccagcgtaagtccgatggccgccgccgggatgcagccgatggccaccatgccccacagccgccacgtgccgcgcttctcggccgacgtcttcttcggcgagaacggattcagcttatggaagtacaggatgagcacagccatgatggcacccagttggatgaccgccaagaacagctccaggaactccgccgacacgttcagcttcacgaactcgtccacgagaatcatgtggcccgtggaagagatgggcagccattcggtgatgccctccacgacgccgatgaagaacgccttcagaacttcgatgaacatgtccacagaaactgcctccgtacgatttgcttgcctgtcggcccaagcggcgagcggcaacccaggccagagcacgccgccaacacgaggaaaagcgcacaaggggcactccctctttcgagcctcggaaatgctatcacggcactgcgaatcgtcaggattcctacggagaaagtccacgtttgtcactttggtctaccgaggcgccggccagcccagcgctcgcagcgcgcgacacaacccgtcgtgtcgcgcgtgccgcccattccaccacggcttgtgcacgtagccgatttcatgtcagatacaacatagcaagcaggttcgttttccctactcaaatcctcttttcgaaagcaacgatgcgccaacgaacaccaagcatcgtggtaataaaactatcgaagatcgcacttttaccaacgatgtcagttccattggggtatcatgggacacccgcgagagaccggaagcgaaatgtttttccggcccggcaaacgcagctttcaactcaacaggcctcgccctcttcctggcgctcaggcgcactgcggcacaacccgcggcgcacggacgtccttgcctcatcacggatgcgcccaccaaccgaagggtctcccccttccgacaaaaggatactatcatgctgaaagctgcccaccccggcggtctgatcccgcccatcctccatccctccccgctcaaccgcgaaaacaccggcgagcgcaccgaccggacgggcgcgctcctgttcgcaggcgccgtggcttccttcgggctagctctcgtgctcatcggcgctgccgtttcgttcgccgccggagcgccagcgccggcgaacctcgaccagtcgaccctcgtgttcggatccttggcagcggcctgcgccctggcggcactcggcatgatgctggccttgcgggagagaagcctgcgcacgcagcaaatgcgccgcgtcacccgtgccgagcagatccagggagagctggacagtctgggcctcacgcccaaggagatgcccattgccaagctcatcctgcagcatcaaagctatgcgaccatcgccgccgagcggcacctggccgtgcgcacggtgcaattccatgccacgaatatcttccggaaggcctatgtcagcaatcggcgcgatttcgagcgtgtcatcctggccgacgagcgcaacgacgaccggagcgacggcggccgtcgcgacactccctgctgccgcagcaaccaaacgacaccgcccgacggccgaggcgccgcgcgccccggatgcgccctccgcggccaaaatacctgcttgcccgggggcggctccgacaacccggcgacgggcctccccgcgcaaaaccctggcagcgagcaagagcgcggagatcccgaccgtcccgctggcagccccacgaccctccgcagcagggcggccctgcgccacggcaggcaggagggaggacggccatagccagcgccgttcgctagcgcgcccgcccatctgctaggcggcgccggcactcgcaggcgcgtccgcgagaggtcatcattggggaaacagacgcccgcgcgccgccttcgtcgtggtgcccgcgtgctaccgtgaacccatgagcaacttcgccgacatagcgtgccctgcatcgccgcaactcgaaagcgcaacgaccgcctcccctgacggccgcccgaaagactcggcaacatttgcgggaagccgctctcgaaagacgcccgacgtccccgaaggcgagatgcacggccacggctccggcggccccaaggacgtctggacgcacaacgtggaagccaccgcgtccctcctcatcgccttcggcaccctcatcaccacctgcagcgcccagggccttttcaccccctcgaccgccagtcggtggattctcgagtacctcgttcccttccagctgccgattttctacttctgcctgggctttctctaccagcgctaccgcacgacgcgcacccctcgcgcctggggccagaacctccgccgcgagctggcgctcatgggcatccccttcgcggcgttcaccgtgctcgtgctgctcacgaactcggccgtcggcgcgaagccgcctctgtcggtcgccgatctcctccgcgcgctcttcatcgagcccgtcattcccgtcggctacttctatacctgcctcatcatttacgccatcacccccactgtgaagagccgccgcaacgccagcggcctcctgttcgccgccgtcgcagcgaaagcggccatcgtggcgctcgcttcgctgcccgccaccgccgagatggccacgcgcctcccctacgccgtcacctccgtggccgagaactggatctgggtcgccggcggcatggccatggcgctctaccggggcctgcccctcgtgcgcggatccgagaaggcctgggccctcggcgccctgtgggtggccaccagcgtgatcgccttctacgccggctggaccggcgagacgtcccacgccgttctggacgcgctcggcgtgctgtgggcgacctccctgttctccaccgtgttccgcagcgggcggcagaaccgcttctacggcttcgtgacccgctacaccatggccatctggctcttccacggcatctgcctcgccctgtacttccatctttggaaggcggccggcatctccgtcacagcagcaccgtggatggcggccgtgggggcggcgctcgtctgctacggcatgccggtgctgatcatggccgccctttcgcgccttgggaaggccggcatcatcgtgtatccggcccgctatctgccacccgcgccggccaccatgctgcggaagacgccgcactaacgtatactgaggcccatgaacaagtcgcaaacatcttttctggcggggggcgacccgtatctggcaccgttctcgtccatgaccgacgggcagctgcgcgaccccaagcagctcgtgggcctggcccgcgccatcgacccggagggcgcgccggaacgcttggcgtcgggcctgttcgtcgctgagtccgtgaacgtcatcgaccgcgcccttaacgccgggtgcgtccccttcgccgtgctcaccgacaggcgctggctcgccgcctccgaagcgctcttggaaaaggtgcgcgcggctaatccggccgcccccgtggccgtggtctcctcggaggagatgcgctccatcaccggctacgagatgacccgcgggcccttggccgcctttcaccggccgcccgagcccgacctggccgccctgcttaccggcgcccaccgcgtcgccgtgctggaggacgtcacgaactacaccaacatcggggccatcttccgcagcgccgccgccctcggcatcgatgcggtgctgctcacgccggcctgccacgacccgctgttccgccgcgcgtcgcgcgtttccatgggcacggtgttccaagtgccctgggcccgcatcggcagcgcgcgcgattgggcgtgcgagggcgtggcgcgcctgcgcgaggccggctttgtcacagccgccctggccctagccgacgacgcgctttccatcgccgatacgcgcctgaaggcagccgacaagctggccctcgtactgggcacggaaggcgacggcctggccgcctccaccatcgccgcctgcaactggaccgtgcgcatccccatgcaccacggggtcgattccctgaacgtcgccgccgccagcgccgtcgccttctgggaaacccgctgggaagactagcgtcgcgcagcctcatcccgtaggggctgaccttggtcagccctcatcaggcaaggttatccctcttgtgaggggcgaccgaggtcgccccctgcggatggagcggaagctcggccccctacgagccggtcggaagtcccatggcgttcgcgatcgccatcgtcacgcccacggctatcacgcccacgacaaccagcgcgatgcccaagattcgcaaacgagctccctgcagaaggcgaagcctcggagccgcccgacgtaaaacgcggacgtcggtcaaaatgaaaagaaagcccgtgaagaacggaataccgaacgtccaatactgaaaggcgagcagccagaacggccaggtggcgtaacgttcgtcgggcgtgaacggcattgcgatgagaactgccatgaacagcagccacaccaccaagagggcgacatcgaccacgagccctgccgtctcaccggaggagagcgtcgagaaagcacgccttacccgagaaacgactacgccatgcggtctgtcatcgatcggagctgcggcactcaccgccgtcgcggcccaatccgcaggggaaacccgacccgcgccggcgacctgggtcacaacgacaccccggtctgcaggagaagccccggctggggcgagcgccgcgaggaacgccgccttcaggtcgcgcaccgtctggaagcgggccgccggatcaaaggcgcaggcgcgctggagcacggggcgcagcgcgaaaggcacttccggccccgcgaaccccgccgcagccaccgacggcgacggatcgcgctcggccagcaggtagtagagcagcattcccagcgcatacacgtcgctgcgctcgtcggtctgcccgtagccgaactgctcgggcggcgcgtagcagcgcgtgccgaaatgagccgtatcccccgcagccccctcgcgaaaggcccgggcaatgccgaagtcgatgatcgtgagacccgcatcgctcaccacgatgttcgttggcttcaaatcgcgatggatcaaaggcggcgagaactgctcgtgcaattccatcaccccgtcgcaaaggagtggaaaccactgcgccgccagggcgaccgatccgtcgcgttcgtacacctcgtcccgcagcgtgcgtccctggatgtattccatgaccaccaccagctcgttgccagtggtatgaacatcgtagatacgcggcaaatgtcggaagcgacgcccggcgcgctgcgcttggaacaagtggccgtaggcgtctcccatggccgcatcaaccgcgatgcgcttgcgaacgaacggtccgagctccgccgcgttggcccccacaaagtacaccacctcggtcgtctcgtggggcgccgtcttcaatacctcatcgacgcgatagcacacgtcgcgggcaagggcgtcaaggtatgcggcaagagggtcgttttccataaatgccatggtaccaaagttagctaatggtcgcctcgccgaaccggtaaagctcctcctcagtcttctgcagcgtatagccatggctgatggcgaagatgacaatggcatctcgccgattcttgcaatacagctcgttggcgcctcccgcctgcagaaggcggttcgtctcgcgcaacgagcatcccgtagcgaaggcaagtttcagcaagttatcccgcgaggcgcgccgagcgccggtgaaaatctggtagccgaaggtctcgttgataccggcctctctcaccaccactgagcgcctcagccccttctctagcagaagggcgtccaggtactccgccaagctgcgctcgcccacctcgcgccgtttgatgaacgcccgcggatccggcgcgtccaagagctcggccagcatatcctctgtcagcggttcctccacgcgcttctttctccttcgacccatatcacgaagcccctattgtagcgcctcgagcgcccgccttcggagacgggtgcccgagacgtgcgccatcgggcacgctagctcagcgagaacgtctgctcggccaagacggcgtcgctgaagctcaaaagctcctcgacctcaaccgtgatgtcgctcatgtcctccagggcgtagcccatctccaccgtcgtagaggaaccaggcttcacatcgctcgagtacttctcggaatcccaatcgctgccgatggctgtgcccagctcaacgccgttttggaacactttgggataaagcgccaccatgaagctggtcgcctcgtcggaattgttcgtgaaggtgtaggtcaccacggcagccggatttccctggtagtcctcagtcacccggcagccgtcgatggtcacgccgtaagcggccgcgtccgatgcgctctgctcggccgcctggggctcagtcgcagatccggaatcttcgaccgctgcgccctgcgccgtcgccgtgtcaagcccactctcctccatggcctggtcgagggcggcgctgaaggcgctctgcattacgagcacgagaatgaaggcgatcacggaaagcacgaggccggcgatccctaggcccttgccgctcttcttccccttcgaaatacctaccaatccaatgatggcgaagacgatgccgagaatggccaaaaggaaggagaggttgttgataatcggcagaatcgacgtgaccagtgccacgattcccaatatgagagaagccacggccatagccgagcgaggttgcgtttccatagatgattcccttcttctaaacgcgctattcctaacggacaaggaagaagggtatccgttctcgttaaccgtttcattagctgccagctaaggcggccgcaaattttccctagctcaggtcgaccttggcgcgcacgaggtaggcggacagggcgacaccgccaccggccacggcaaggttcaccaccgtctgcatgatggacaccacgccgagcataaacgacgccgtgcccgtgtcccccaccatggccagaacgccgacaatagagaacagaagagagatcacccagccaattcccacatacagcgccacggccgcagccaccttatgccgccgcgcccaccaagcgcccagcgtcaacgagaggaacgccagccccacggtgtaggcggcggacacgagggcattcgccacgcccatgatcgacgagaccaccccgccgttgcccgtcagcgccgaccagccgcccaaaagcgacagcaccaccgacaccatgtccccatcgccgtcggtgatcgcgagcatggccagcgaggcgagcgcgcaggccataagcgtgaacgccgccgccagcaaaaaggcagcccagaacttcgccgccaccagcgtgcccgcgcgcaccggcagcgtgagcgtgagatagccctcgtcggtgaacatcgtgcggtagaagcgcatcgcgatgaacacgtagaccgccacaaggctggcccacacgagaaagccgcagaacagcgcggccattacgaacaccacggtcaggttggaggcggccgatgcctcgttgacgtaacgggaggcgaatcccgccgcgcggctcacggcgtcggtggcctcgatgcagccgatgcccaccacgccggcgacgaccataacggccagcatgatggccgcgggcttccaaagcgcccgcatttcctgggcgaagagctttcctagcatcggaactcctctcgaaagaacgcgtccagcgtcgtgcccttctcctgggtcacgtaggccacgggcgcgtgcaacaacatctggccatagcgcagcaggatgaagtcgtccagaaacgcctccacatcgcgtacgagatgggtggaaaggatgatggacgactgcggccgataggcgcgaatgaccgtttgcagaatgtaatcgcgggccgccggatccacgccgccgatgggctcgtccagcaaatacagcgccgcatggcgggccataacgagcgtgagctgcaccttctcaaccgtgcccttggaaagcgccgaggtgggagcgtcctcgggcacgccgagccgggcgagcatgtcacgcgccaaggcggcgtcgaagtcctcgtagaagtcggcgaagtaggcgatcatctcgcgcacgcgcatggagcgggagaagtagggccgctcgggcaggtaggagacgagcgccttcgattccgggcccacctcatagcccgccacgcgaatgtcgcccgccatgggatgggccacgccggcgatcatcttcagcagcgtggtcttgcccgagccgttcgggccgagcagccccacgatgcggccggcgggcaagctgacagtaaagcgatcgagcgccaccgtggcgccatagcgcttagtgaggtcgcggcactcgagcaagggcggtggcgcaacttcggggacaaaggcatccatgggaagcctcctcatcggtcggaatcactggccccatcctagcacggacgccgatctccaagcaggaaccccaccgaatgagcgaatcgctcccgctagcctcgctcgaaggcccagaggttggcgcactgggcgagcacacgctcggcatcccacgtgcgagcgctgttggcggggctgttggggtcgtgaatgaccagctcgccgttgtcggccacaccagccaccacgagaaagtgccctgtgctcgtgaaatcgccggggcgcatgctgcagatgaccggatgcccctgggcgagctcctccttaagccgccctgcgtctgccggcacctcgtgggaggaaagccccagatcggccgcgccgtcggtcatgaatcgccaggcggtgagaccctcttccacgtagccttcggcctcgctgaaggcggccatggcggcgggatccttgtcggtcttccccgtcagcgcgatgtagaccatggccaggctcgtcggcccgcatccggcctctcccaccgtggcgccggcatagggcgcgtcgcggtactgggggtcggtctggtagagaaagggcagctcgccgccgcgccactcgtcgcgcggggtgctagcggcctcggctccgccacccgcgtccgcagcggccacagaggcgtcggccgtgggcgaggcgatgcccggccccgcgagccccagcccttcggcgtacaggttcgccatctggaacagcgcgactacgacgaagacggaaagcgccgccacgcccagcaccgaccacagatgccagcgtcgccgcccgatgcggcggccccgcgcggcgcggctcgtgcgaaccagaccgcccagcatggccgccaccacgcccggcgtagcagtcggggctacggccgacccgcgagtctgcctccgctgcggcgaggagctccgggcggtcgttgatcccgcaccattgcccggccggccccccgcgccctgcggccgcacccaggcatcacgcccgaaagggttgggggcgacccccgaaacattccgaacacccgaagcaccccgagcatccgaaacatctgaaacatccaaagcgtccactctcccagtgcggcttaggggcgcatctcctccgtaaaagttcccctcgtcaaaacggtaggcagcagtgtccatgggtttcctccttacgttgcacctctaccttaccgacgagccggcttacgcgtcccatagcgaaatctgacatttccggcagggcaccttaacttttcctgaagctgtcacgggatggcatgcccattggcaaaacccggggcgaatcgcgtacaatagcccttatggaaaaacgcgctcacatactggtggtggacgacgagcaggccatcgccgatctggttgtcaacctgcttgcggccgagggcatggacgcgctggcctgctacagcggacaggcggccctcgacatgctcgcccgcacgccgttcgacctggccatcgtggatatcatgatgccgggcatcgacggcttcgagctgtgcgttcgcatgcgccagatgcgggacattcccgtcatcttcctctcggcgaaggacgaggaggccgaccaagtcgtcggcttcaccttgggcgccgaagactacgtcaccaagcccttccggccccgcgagctggtggcccgcgtgaaggcgcgcctgcgccgacgccaagcagcgccccaggcttcctcgaccctgctttccgccggcgccatcgaggtggacttgcgcacgcatctggccacgctccacggcgagcctttgcacctcacccccaaggagttcgccattctggcgattctggcccagtcggtcggctcaccggtctcggcggccgatctgttcgaaggggcccggcacgagcgcttcgacgacgcggcggccaacacggtcatggtgcacatccgtcgcctacgcaagaagctcgccgatatcgacgcttccacgacgttcatcgaaaccgcttggggcgtcggctacaagctgcgcggcgcgcccggcgacaccggccatggcgcttaaaagcgaacaggcccgcgtcctgcgccggcgcgtgctcggcggcctcattcgcaacctgctgctgttcagcggggccttcgctctggcctgcttggcgatcgagaccttcatggtaccttcgatcgcgaactgggtggccgactcgacctcgtcttggcgcaccctgaactcctccgagcagttccagcagatcctcaccgaccaggggctgctcgacgatgccaacctcttcgacctctgggtcaacgaggccgtcgagggcggctacaccaacgatgcgggcactatcaccgagatccaaggcgaagtgaacgagatggaagatgccctggcggaatacgc

SEQ ID NO: 10510 - DNA, 43733 bp, Unknown
  gut microbiota DNA sequence
tcctcttcgacctctgggtcaacgaggccatcgagggcggctacaccaacgatgcgggcactatcaccgagatccaaggcgaagtgaacgagatggaagatgccctggcggaatacgcgagcatgatggccgactcgcccgagaacgccgaggctgccgcggcccacgccaaggagcgggccgaaaagctcggggcggatgtggccgtcgcctcgggcaccaacgccgcggccatcggcgacgcgagcaccttcatcgacgacgcgaccgccctcgatgccgagaccgacagcgccccggccgacaagaccgcccgggccgttcccctccttccctatcagaccattctgaccgccgaggccattcccactgacgacgcgagcgccgcccaagccatagcggccctgcgcgtgtcggcgtccctgcaggagctggggctctcgctgcccgaggcccaaacgttcatgccgccggagaccacggtggatgcggccacgcgaatcctcgtcagcgccgccgtcctgggctacgaccagccgacgctgaacgaccttctgcaaagcgcctttcgccaatcccaggagcaagcctacagcgcctggctcgacctgacctccgccgaggaggcgcgggcgctgggcgtctccgacgagaacccggtctggcaaatccagtacggcgaggacggcgtctaccgcatacgcgatgtcgccacctacacgttcgtcaagtcgttcaagctcccgctggccctgctcgtcttcgtggccggctggctcgccatcatcctgagagccctgaaccggtcgctgcgctacttcgacgagctgtccggggctgtgggaagcctgctcgccgacaaggacgcccccatcgagctgccggccgacttgtccatcgcccgcaacgagctggcggttatccgctcgcagtcgctggccgacgagcgcgccgctcacgccgccgagcagcgcaagaacgagctggtggcctatctggcccacgacatccgcacgccgctcacctcggtgctcggctacctggacctgctgcgcgagacgaccgatctgccccgggagaccctgcgcaagtacgccgacatcgcctattcgaaggccgagcgcttggaaagcctcatcaacgagttcttcgagatcacccgctacaacctgtcggccattcccatcgagcgggagaccgtgggggtgcgcctgttctgccagcaggtggccgaggcgttcttcccggaggccgccgcccgcaacatccgcatcaccgtggacgccgccggcgcgggccagttcttcattgatccggacaagctcgcccgggcgctgggcaacgtgctgcgcaacgccgtggcctacgccgacgcgaactccgtcatcgccatcgccgcgcgccaggacgcccgcacgaccaccatcaccgtggccaaccgcggccgcgagatatccgacgcccatctggagaccatcttcgagaagttctaccgcgaagacggggcgcgctcctcgaagaagggcggcgcggggctggggctcgccatcgcccgggaaatcgtcgtggcacaccacggcgacatcgaggcggcgagcgagcggggcgtcaccgtgttcaccctgcgcattcccacccagggggaggagatcgaaggggcagccgccgcgccgcgcatcccgggcgcgactgagggcgtccagcggctggttgcgcccgtgccgccccgcaccgtgcgaccgacaagcacgcgagcaacttccgcgccgccttccgcaacgacgcgtcgcgggccctccgcccgtccgattccacaacgccccgtcggcgaacggacgcaagcgccgcgccaaggtacctctccgttaaatcctcgtaacgctcgccatggacaggttcccgcgcgcaagacggtacgcgataatgatgcgacaccacggcggcgcggcctgtcccgctagcttcaaaaccaaagcaaggcatcggccccgaagcaccgctttcccacttagcgaacacccaaggaggcaccattgaaccccatccgcatcggcattctcggctatggcaacctcggccgcggcattgaactggccgtcgccgccaacgacgacatggaattggtgggcgtgttcactcgccgcgacccagccagcgtgcacccgctcggcgagaacgtcgccgtctggcccgccacggagctggccgcccacaccgacgacatcgacgtgctcatgctcgccggcggctcggccaccgacctgcccgagcagaccccggcagccgctgcgctctacaacgtggtcgactccttcgacacccacgccaacatcccggcgcacttcgccgccgtcgacgcggtggcccgcgagacggggcatgtggccgtcatctcggtgggctgggatccgggcatgttctcggtctcgcgcgtttacgccaacgccatcatgcccaacggcgccgactacaccttctggggccgcggcgtctcccaggggcactccgatgccatccgccgcattcccggcgtggccgacgcccgccagtacacggtgcccgtgcccgaggcgcttgaggccgtgcgctccggcgccaacccggagctgaccacgcgccagaagcacacccgcgagtgcttcgtcgtggccgaggagggcgccgatacggccgccatcgaaaaggccatcgtcaccatgccgaactacttcgccgactacgacaccacggtcaccttcatttctcaggaagagctcgaccgcgatcacgccggcattccccacggcggctcggtcatccgcaccggcaccacgggtgccgccggcgagaacacccatgtgatcgagtactcgttgaagctcgattccaacccggagttcaccggcagcgtgctggtcgcatgcgcccgcgcctgctggcgcatggcctgcgcgggcgagacgggctgctgcaccatcttcgacatcgccccggcgctgctctcgcccatgacccccgaagagctccgcgcgaagatgctgtaaggccgcgcgcccgacggcaccagcgaacacgcacgctcatcaacaagcggaccgcccaccgggtggtccgctttttcatcgcccgagacattttcatcgctcgagacaacttgcccctcggttttttccaagaaattgcgattgttagcaaacgaagaatgcccaaggggacgaggacgacgcgaagcggagcaaaaccagctcattgcgcatcgtctttcctttaaaatgctctatcttcccatcaaaagatcccgtttcagaacaagacagagtatgagccatcccctcgtgctaacaatcgcaatttttgcgaaaatagagacatgcaaattgtcccgagagcatccggccgccgtagcgcgaggcgcaacgcggggcggccggaaagccggatatcctgctagaacctcgcaaagcgttcctggcgctgggctacgagctcgtcgggcgtgaggccggccagctccttgtaggcctcgcggacgtagtcgcgcacggcggcgatggcggcctccgggttctcgtgagccgggccctccccttccgagatgaccgcgtcgatgatgccgccggccaaaaccgaggcggcgtccatctgcatggcctcggcggcctcgggcgcgcgggtgcggtccttccacaggatggaagcgaaaccctccggcgagagcaccgagtacaccgcatgctcctgcatggccacgcgattgcccacggccagcgccaaggcgccgccgctcccgccctcgcccagaagcacgctcaccacgggaacgcgcaggccggccatggcgaccaggttgtcggcgatggcgttgccctggccgcgctcctcggcctcggtgccgcagaaggcgccctgggtgtccaccaggcagagaatcggccggccgaacttctccgcctcgcgcatgaggcgcagcgacttgcggtagccctcaggctgggggcagccgaaattgcgggccacgcgatcggccaagttcacgcccttctcctgggcgatgatcgtcgccggatggccggaaatccagccgatgccggcaagaatggccccgtcgtcggcgaaggcgcggtcgccgtgcagctcgatgaagccctcgacgatgccgtcgatatagcggcgcgccgtgggacggtgcacgttgcgggcgatctgcacgctctcccacgcgctgccggccggagcctccaaactcaccccggacttgcgggcctcgcggcgggcgtggcgctccaattcgcggcggcacgcctcctcggcctcctcggggctttccgaccgcccgataagctcgcccaccaccggcactccagccaagctgcgccacaacccggcggcttcctcgtcgcgaatgcgctcgcccaccgcctgggcctcaggggccacatccaccgagccgtaggcgcccgggccgacgcgcagggcgtccatgacgctgtggtaggtgacgatgcgccccatatcgtcggcgggcgcgtgcagcgcgagcagctgcgccagaacgctgcgcatctgggagcgctcgacaatggcgtcgatgagcccgtgctcaagcgcgaactcggcggtctggaacccttccggcagctcctgcttgatggtgtcgcggatgacgcgctgcccggcaaacccgatgagcgcgccgggttcggccaaaatgatgtcgccctgcatggcgaacgacgccgtcacgccgccggtcgtggggtcggtgagcacggtgatgaagggcagatgggccgcccccaggcgttccacggcgcaggacaccttcgccatctgcatcagcgagacgagcccctcctgcatgcgggcgcccccggacgcacagaacacgacgaccggcaggcgctcggcaatggcgcggtcgatcatcgcggccactttctcgcccaccgcatgccccatcgagcccatgaagaagccggactccatgacgccgatggccaaaggcagccccgcaatggtcgcgcgccccgtgcgcacggcctcttcaagcccgctctttgcgcgctggtcggcgattttctcgggatagccggggaaatcgagcggatcgaaatcgggcataaccgcgttccactcctcgaacgacccggcgtccaccgtggcggccaggcgctcgtcggaacgcaggcgctgcagggtgccgcaggccgggcaatagccgccgagctcgatgatctcctctttgtcgaagaagagcttgcagtagtggcagcggcgccaatgggtcggcccctcatcgtcgtcggcaagcggcgccggtgccggcgccgactcccagggcgcctcggagggctccgtcgtgctggcggcgggcaaaagctccacccaaccggtacgcaaggtgccctcggtggccggagcgaacacgcgcagaccgcgcttggcagcgtggcgcaggaaataggcgtcctcggcgagcggcgccttggcgctgtcgaggaagatgagcgctgcgccgcaagccttggccgccgagagcaccgtgtagatgttggcggaaagcgtgtcggcgtccacatcggccgtggtgctgcccaggttgtgcgtgggcagcatgcgccgagcgaagccgtccagcgagcggttgtccaccgtggcgaagacgacgtcgaggcccgcctgctccatgggcaccacgaaggcccgggcgttcttggccgaggcgatgacgagggcccggggcttggccccggccgccgcacttacggcgaagtcgtcgccgatggtggaccggacgtgctcggagacgtcggccaccttctcctccgggtcgcgatgggtcgccccggcacgggcgcccaccaaggccgccgccgtgtccggcagggtgccggccgcttccacgatggcgtccagggcgtaggagaccgccgatttcagcgagccgtcctcggtcgcctcaggggccgcagggccatccgcaagctcggggacgaagttccccgccgtgtcgaagctgatgtacttggaagccgctttggccatagttactccttgggtgcgagcacgtacttctgggtggccgtggcgcagacctcgccgtccacggacgcctccacctcggccaccacgaggcggcgcgacgacttcacgatggtcgctcgcaacgtcaccgtctcgcccggggccacctgccggcggaacttcgccgcgtctatgccggtgagaaagccgatgcagccgcgcagctcgggcgattgcagcaccgcgatggaagcgcattgggcgagcgcctccatgatgatgacgcccggcagcaccgggtgatcgggaaaatgcccgcggaagatatccagatcggcgggcacatccagctctccttcaatggaagcgccgggctcgatggccacaatgcgactcacccacacgaacggatcgcgatggggcagaatcccctcgatgacctcgcgcccccagggcagcggtgcgacaatcgtctcttcgctcatcgactccccctaacctttgtacggcgagaaggccaaagcggcgttgtggccgccgaagcccagcgaggtcgacagggccaccttctgcggatagtcggtgaccgcctcggtgaccaccgccaccgggcagtcctcggcggcctcggcgaagccggccgtggggggcaccgcatcgcgggccacggacagggcgcacacgatggcctccacggcaccggcggcgccgagcatgtggcccgtggtgcccttgatggacgtgacgggcagctcggccgccgcatcggcgcccatgagattcgcgagcgccttcgactccgtggcgtcgttggccggcgtgcccgtgccgtgggcgttcaggtgccccagatcggccggggtgaagccgccctcggccagagcggcggccatggcggcggtgatggcggtggcctccgggtcgggcgcggtcatgtggtaggcgtcgcccgtgctgccgaagccggcgatctcggcgatgggctcagccccgcgggcgagcgcgctttccaacgactcgatgaccagggcccccgccccctcgccggccacgaacccgccgcggcgggcgtcgaagggcagcgaggcctccttgggatcctcggcgcgggtaagggccgacaaattggtgaagccggcgatgcagatggggctcacggactcctccgtgccgcccacgagcgccgcgtcgatgtagccgtggcgaatgtcgcgctgcgccgtgccgatgcagtgggcaccggtggcgcaggcggtcaccacgttcaggcactcgccgcgcatgccgtagcgaatggccaggttgcccgccgcgatgttcccgatcatcgtggggatgaacagggggttcacgcgcttggggcccttctcctccaaggtggcgaagctcttctgcagctcgtcgatgccgccgatgccggtaccgaacaccaccgcgatgcggtcgcggttctcgtcggtgacttccaagccggactgggccagcgcctcgtcggccgccacgatggcgtactgcacgaagcgctcgaagcgacgggcctccttcttggtcaggccgtgctcgacgccgtcgaagtcgcgcacctcgccggcaatgtgcacctcgtactcgctcgtgtcgaagcgctcgatgggcgcgatgcagcagccgcgctccatgagcgcctcccacaacgcctcgacgcccacgccggccggcgtcaccgcgcccacaccggtgatgacgacgcgatgggtgccgtcgggccgccgggtctgaatgctctcgcttgcgttctcactcatagggacatacctccgtccacgcaaatgacctgaccggtgatgtaagacgcctcgtccgaggcgaggaagcgcaccaaatgggcgatgtcgtccggctcgcccaagcgcccgctgccgatgcggctcacgatggcctcgcgctgggcatcggaaagcgcgtcggtcatgtcggtggcaatgaagccgggcgccacagcgttggccgtgatgttgcggcgcgcaagctcgcgggcgagcgacttcgtgagcccgatgacgccggccttggaggcggcgtagttcacctggcccgcgttgccgtacacgcccaccacgctggacatgttcacgatgcggccccagcgctgcttcatcatcagcttcgcggcggcgcggcagcaatggaaggtgcccttcaggttgatgtcgatgacggcgtcgaagtcgtcgtcggacatgcgggcggccaggccgtcgcgggtgatgccggcgttgttcacgagcacgtccacccgcccgttggcctcggccgcggcggcgatgagcgcgttggcctcctcttctatggccacgttggcggccacggccagggtttccacgccgaactcttcggcgatctcgacggctaccgcctcggcggcgggcaggctgcgctcagaagagctgttcaccaccacgttcatgccagcggccgccagctcgcgggccacggcgcgtccgatgccgcgagtggagccggtcacaacggcgcagcggcggttttctgattcggtcacgtctattcctttccgaattcctcgacgaaagcgtcgaaggagggacgatcctgaatggcggctcggggcgcgctacggtcgatgcgcttcacgagattggcgagcacgccgccgaagcccacttccgcgaacatcttcgcgccggcctcctgaagctttgccacgctggcctcgaactgcacgggcgacaccaagtgcgccaccagctcgtcgcgagcgccggcggcgtcaagcggcacggcgtgcacgttgccgatgaccggcaccaccgcctcgcggaagtccacccgcgccaggtagtcggcgaagggctcctgcgccaacgccatgagcgggctgtggaaggcgccggaggtggccaggcgcgagaagcggcccttgctcgcggcccacgcctcctcggcgcgcgccaccgccgccggcgtgccggcgatgacgatctggccgccgccgttcaagttcgcgggcacgagcacctcgccctcggcgcactgggcgcacagcgcctcggcctcgggcagcgtgatcttcagaagcgcgctcataacgccggggttcgcgtcggccgtctctcccatgaggcgcgaccgctcggcgatgagcgcgaaggcgtcctcctcggcgagcatgccgccgagcaccatggcggaaacctgcccgagggagaacccgagcagcgcgtccggcacgatgccgcgcgcctcaagcgcccgccccatgccgaccgacagcgccgcgatggcgatctgggcgttgcgcgtgtcgttcagctcttcgggcgacgcgtcgcgcacaagcgccgccacgtcgcggccgagcacgtccgaggcgcaggcgaacacggacgccacctcgggaatatccagcatatcggcgcccatgccaggcttctgcgagccctggcccgaggccatgaacaccaggccagccgggcccaagggcgccaagggggtctcatcaagcatggcggcctccctacacgcgcgcccggcggctgttcagctcggccaactcatccaaggagcggccggccagggcctcggcctcgcgcaccatatcggcaatgacgccggccgccgtgccgcgctcggtcaccagcgcggccacctggcccgccatgaccgagccgttttccacatctcccgccacggcgcgggcgagcgagccggcgtacataccctccagctcttccccggaggtggcggccatctcaatcttgcggcattcgcgggcgaacttgttcttcaggccgcgcacgggatgccccgtgccgcgcccggtgacgatggtgtcggagtccttcgccttcagcaccttctccttccacgcctcgtgcacgctgcactcctccaccgtgaggaagcgcgtgccgcactgcacgccctcggcgcccagcgcgaaggcggcaagcatgccccggccgtccacgatgccgccggcggcgatgacgggaatggaaaccgccgcacacaccgacggcacaagggccatggtggtcagctcgccgatatgtccgccggcctcggtgccctcggccaccacggcatcggcgccgaggcgctccatgcgggcggccagcgccgaggaggccaccacgggcaccaccttcacgcccgcttccttccacatcttcatgtagttcgcaggactgccggcaccggtggtcaccacttccacgcccagctcgcacaccagctcggccacctcgcccgcgcgcggatccatcagcatgacgttgatgccgatgggcttgctcgtgagggcgcgggcgcgggccacctgctcgcgaatccattcgggccgggcccctccgcaagcgatgatgcccaagccgccggcttcgcttacggcgccggccagccctccgtcggcgatgcgggccatggccccttgcacgacgggatattcaatgcccaaaagctctgtgatacgggtcttcatgaaagcagctcgtcctctctttcgctgcggcaacacgcgccttgagataaactatctgagaaatcttaaggaattcgccccaaaaactgaccgcgcgtttaaaatcttcaccaaacatctcatcgttgagcagaaaacttggcgatatggggcatcatagagcaggttgaggcatcatttacggaaaggaacggctttgggcagcgtcatcatcggatcgggcagagcgctgcccgcgcgcatcgtcaccaacgacgagctctcggaaatcgtagacaccaccgacgagtggatcgtcccgcgcacgggcattcacatccgccacgtcgccatcgaggagacctgcaccgacctgggcacccaggcggcgctgcgagcgctggggctcgaggagggcggttggcagcgcgaggcgggagcgatcgatgccgccacccttgacatgatcatctgcccgacgctcaccgccgacacccacttcccctccgaggccgcccgcatccgcgagcgcatcggtgccacaaacgccgtgtgctacgacatgtcctgcgcctgctccggctgcgtctacgggctttccaccgccgacctcatcatggccggcgccgccttcgcgcgccaggaagccgcccgcaccgggacgcctatgcgctgcaacgacgtgcgccgcgtgctcgtcgtggccgccgagcgcctgagcaagctcgtcgattgggaggagcgcgccacgtgcatcctgttcggcgacggcgccggggccgtggtgctggaatggcgcgacgagacggaggccggtgctgccgaagccgccggtgctgccgaagccgccggagccgacgcccctggcatcctctcctcgtacatggaaaacaccgacgacgtcgaccgcaccctctggtgcgacagcgccttcgcctcccgcgaggtacccttcgccgccgacggcacgaccactgctgccggcacctccgccaccgatgccccgcgcctcgccgctgccgacgcggaaagcgatccctatatgcgcatggccggccaggcggtgttcaagttcgccacctccgccatgattcgctgcaccgaggaggcgcttacccgcgccggactgaccaccgacgacgtcaccctgttcacgccgcaccaggccaacgagcgcatcatccgctacgccgccaagaagatgggccttcccatggagcgcttccaggtgatcatcgaccacgtcggcaacgtcagcggcgccagcgccctcatcgccctgaacgaggcgctttgcgagggcaagctgcagccgggagacatcgcctgcatgaccgccttcggcggcggcctcaccgccggctcctgcgtgatccggatctaggctgcagccgcgatgcggtcggcggcctcttgcaccttcgcctcgatgcgggccttctcgtccccttcggccagcatcggctggtaggtgttgcggtcggtctccgtggaaaccgaggcggcgatgaagtccacatcgtcgttcttggccaccgtatcgccggtcacggtgaaggtctgctggaagatgaggcagtccttgtcgtcggggttggtgttgccgccgaagcagaagttgccgaggctgtagacgatgtagcggccctgatacacctcccagccctgcaccacatggggatgggatcccaccaccaaatcggcccccgcatcaatagcggcgcgcccggcggtctgctgcccctcggtgatgtcgtactcgtgctcctggccccagtgcacgtacacgatcacgagctgggcgtcctcggcgcgggccgcggcgatgttgtcggtcatctccttggtgttctcggcgctgtcctcggggaagtacgacccgatgagcgccaccttcacgcccttcacatccagatacgcgatgcggtcgtagccgaagctttgcaccccctcggcgtccagcgcggcaatggtgtcgtcgtagcccgtctggccgtagtcttgggagtggttgttggccagcgtggccgcctccaccgaagcgctggagaggatcttggcgtactccggcttgccgcggaaggcgaacttcttgtcggcccgctcaccgccctcggtcagcgcgccctccatgttcaccacggtgaggtcgtcggagccgaataagtcggcgacgttgcgcaagaagtaggtggcgtcgccctcctcggcctgccagcggctgttgaaggatcgctcgttctcgtagttgatgtcggtgccgagcgtgcagtcgccggcgaaggtgacggtcagcgtcacgggctcgggagcggtggcagggtcggaagcggcggcattcccgtcggcaccctgagaggcggcatcgttggcaatgggagccgcagccgccgccgaatcagccgacgatccggccgccgcacctccctcggaagcgccggcgcggccggcgagcaagagcccgatggccacaagctcgaccgcgataacaacaacgagaaggatcttcagcggagtcggacaggtcggtttcgcgtacatgtaaagccttttctagaacctttagaacactaagaggcaaacgattacaacaagaagaacgacgatcaggggaacggccaccttgacgaacagcggcacgccggagccgccctgcgctccgccatagttggcacttccgctcataacgccggcaaaccccacgtcggaggcgcgagagctacgggggcgacgcacaggcgccggagcgccgggagccccctcggcgggcgtggcgaacccctgcccggcccgagaataccacgtgcgattgtccatcgtgtcgatcatcgggtcgtggcggtcgcgatcgtcgcgcgagtaagcggaaatctggtggctctcgttgaaggtgcgcgaatcgatgctgccgcggccgtcgatgacctcgcggttgagcgcacggccccggcgagcctcggaaagggcatcgcgggaggcgcgggcacgctcgtagctttccatggaagagcgagtgaggtcgtagctctcctgggaagagagcgggggcaccacgcgggttcggcgctggccggcgcgctgggccggagtcgccgcgggcgcgggccgctgctgggcggcgcgacgagcctcctgctcgcgctgctgggccgcaagcgcctcgcgccgcgccgcgcgatcggcgtcgcgctgggcggcgctggccgtataggcgcgggacgcctgctgggagcgcaggcgcgcgtcacgggcgcgcatctcgtcttgggtcgcgtaggactgcagaatgctctctcgcgaggggcgcgtggtgatcttgccccgcgagccctggggagcccggccggccggagccggcgcatcgggtcgctcggggctgcggccgtaggcgtcccctcgggggtcttggttcattcccatggatgatcaacctcgtgttcgtttccgtcgtgcgtttcgcgtgttcgtttggtggcagcacgccggccgccaaagcagcttgcgtgcggttgtgtccatcgaaatacaggtgggctcattataggcaaaatttagccttgcgacctcccctcttcgcgaaaagccctcagacctcaacaatcggcagcgacgaaaacctcaacgcgtgcagcaagggtcgccaacgtcgctcccccgtaggggctgaccttggtcagccctagcgagtgggacgaccacgcgcgacaaaacaggggcgaccaaggtcgccccctacgggagccaaacggcagcggccccccacaacttctgcgcaacccgcgccgtttccgcttgcatgccgtcaacaatggcgacgggatggaaacgggcatattttcaaggcggcttctttcttccgaacaagttctcttacgcatacgcgattccaacaatgcccagttcagagcctatttgtgacctggacaccctaagataggcactgtcaagttccattcttggcccttaccgcacgagagggttcgcctcgcaaagaagaagcccgtccgcgactccgtcgataggcctcgtgaaaggaagaagcgtcatgaaggcatcgaaactcatagccgccgttgtttccggcgccgctgcgctcgccctggtcggcggcattgcctacgccatggagcccgaccgcgatccggccacgctgcccatgcccgaggcggcccaggacacgtccatcgtcaagcaggtggcctccatcatcgtctacgaggatcaggaagaggcggtggccatggcctccgagttcgacgacatccacgacgagctggccatggatgtggtttccagccgcgcctccctgtccgccaagcacagcgcaagccacgatgccggcgccaaggccgccgcgagcgctgccggcgagacgcccgaagactccgacgattccatcgatgtggaggccgtcgacgtgaccgagcccctcgagaccatctcgccggaaggcgatgaaatggtagcggactccatcgacgtgaacggggacatcgtcacctacgtcccctcctacgaaagcgcctcggctcccgcctccggcgcgggactgtggatgggctccgatagcaccaccgatggcagctggggctacttcatcggccacaaccccggcgacttcacctgcgtcatgaccctgaagaacggggatcccgtcaccgtgtgcgactccgatgggaacacgcgtacctactccgtcgtcgacgagttcatcgtgcccgacgacacctactgggaggacatccagtcccgcgtgaccgactacggcgagtcgatcattctgcagacatgctgcggggacaacgcccattaccgcgtggtcatcgccgtctagaggcgacagcgacccgctcctcccctcttccgagccgcccggtcttcccgatcgggcggctctttgccggcaggttgcgttaccctagggaagcactgcggaatgcaccctcgagaaaggatcctcatggcacgcctcggcgttatcgacctcggctccaattcggttcgcctggtcgtttacgagaccaagcgggaagatgccgtcaagcccttccgcacgttggtcgatgagaagaagatggccggccttgccgcctacgtgaccgacggggcgctctccaacgcgggcatcgcgcgagccgtagccgtactgggcgacctgctgaagctggccgacaacctcaactgcgcgcgcgtcgatatcttcgccaccgccgtgctgcgcaactgcgcgaattccgaagcggcaaccgcggccatcgaggcggccatcgatcacaaggtgcgcgtgctctccgcccgcgaggaggcccacctcgggttcgtcggcgcctccattggcgcaccccttgcagcaggcacgctcatcgatgtcggcggcggctcgacggagctgacggcccttgcggccgatggcgaccatgcggggatctcgatacctttcggctgcgtgctcgcctacgcgaactacgtgcgctgcatcattcccaccccggccgaatgccgcaccatcgccgacgcgttccgcagagaactccaggcgctgccgaatttggaggggtaccgaagcgagcggctctacggcatcggcggatcggtgcgcgctctcgcgaagatggtcgccgccgtgtggggcgacggcacccggcccaagagcatcagccgcaaggacatggaagggctcgccgatctccttcagggcgacgtctccgttttcgcccatcgcgccgtgaaggccgcccccgaccgcgtccacagcctcgttcccggcatgatcatcgtgcgcacgctcgcagaggaactgggcgccgccgaagttatcccctgcaaatacggcatccgcgagggctacctcgtcacgcacatgctttagggccccgccggtttaccccgtggagccggtcaacctcgcttgccccacatcccgtaggggctgaccttggtcagccctcccaaccggaatggtgcccccagctgcgaaggggcgaccaaggtcgccccctacggatcgcacttgcagggctctacaacagctcggccgccaaacgccgggccttctccatcacctcgcgctccagatcggcaatggccggcggcgtccagctgacggcgtcggcgccggccgcaatggtggcgcggatggcatcgtcggtcgggccgcccgtggcgatgatcggcaggtcgggatattcccggcgcagagcctccaccacctggggcgtgcgggcgccggcggccacgttcacgatggaggcccccgccgcaatctggcggtgcaccacgtcgtcggcagcgcaggcggtcacgcacacgggcacggccaccttctccacgagcgccgagatggactccacgggaatggacatgttcaccaccacggcagccacgccggacatctcggagtgcagggccgcctccacgcagcgctcgccctgggtgatggagccgccgaccccattgaacaccgggcgctgggacgcggccacaagcgcctgggtgatggccggctggcaggtgaaggggtacaccgcgagcaccgcatcggcgtcgcagtggcagatgacggccagatccgtcgagaacacgagcgagcgaatcttgcgcccctgaatggcgatgccgggggccgtacgcatgacctcgggcacagcgagtacgctctcgtgggcctgggcccgctccgcatgttctctcttgatgaccttggtcacagccgcgctcctcgctcttgccgcccgtggcgcccttgccggcgccttctttttggaacgcccagtatagcaatcccggcgcccgcgctaccgctgaagtcgccccctgcgccatctttccgcttccgaggcggcaaggcgccttcggtggggtacgcttctgccgacgataccctgcggcgcgcaggccttaagccccggcgccgcccacggaaggagtgccctatgaacgtcgtgtgcctcgatttggaaggcgtgctggttcccgaaatctggatcgccttcgccgaggaagccggcatccccgagcttaagcgcaccacccgcgacgagcccgattacgacaagctcatgaagtggcgcctcgacgttctggccgagcacgggctgggcctgcccgacgtgcaggcgaccatcgcgaagatcgaccccatgcccggcgcccgcgcgtttttggacgagctgcgcagcctcacccaggtcatcatcatctccgacaccttcgaacagttcgccaagcccctcgtggagaagctcggctggccgacgctgttctgcaacgagctcgtcgtcgccgaagacggcaccatcaccgacttcgccatgcgctgccccgagaccaagctcaccacggtgcgcgcgctgcactcctgcggcatgcagaccatcgccgccggcgactcccataacgatttgggcatgatcctggattcgaaggccggctttttgttccgcaccaccgacgccatcaaggccgagtacccggagctgccggccctggaaacctacgacgagctgctcgccgccatcaaggccgccttatagttccgttcgccctaacgggacgaacggacccgtcgacgctgcggttccgacaggcacctgcccttcgcattcagcgctttccttcacggcccgaaggccgctcggccgcgcttcaagcgaattgcaggtgcctgtcggaacctcgctgacttccttgggcgaacctggtatcttttgcattcttatggaagaagcactcctggaaataatcgaagccgtgcgcagcggcgtcgtcggtggcgaaggagccggcagcaacgccgacgccgcatggctcgacaaactggtgcgtcggcacaaccgcgccgcccacgacggcacgcgccaggtggccaagcgacgactcctccccttctacctgcgcgtgaaggccgaggagcccgagcggtgggcggcgtggaacgtgagcgaggcgaccgacgcagccctcgtgcgccttctgcaggccaaaccgcggcgcaccgcctcgggcgtggccaccatcaccgtgctcacgaagccctggccgtgctcgggcgcctgcgtgttctgtccgaacgatatccgtatgccgaagagctatctttccgacgagccggcctgccagcgggccgagcgatgctggttcgaccccttcctccaagtgaccgcgcgcctgcggacgctgaccgccatgggacatgtcaccgacaaagtggagctcatcgtgctgggcggcacctggagcgactaccccgccgcctaccagcgctggttcacaggcgagctcttccgcgctttgaacctgcccgatgaggaacgcgcccgtgaagcgaccgagcgccagaggtggtacgagagccgcggtcttccccgcgatcgcgatgccctggccgctgcggcagcatccctccaacagcgcatcgatgccggagagctcacctacaacgaggcgtggcggaaggcctacggcgaggaaggcccgcgcgggcatgaggccagaacactgccgcatcccggcatgtcgacggaggatcagagggcagaccaaggtctgcccctacgggaaggcgttgagggtgaggcgctgcaaagctgctcctgggacgcccttttcgccctgcatcgcgccaacgaaacggcaccgaagcgcgtcgtcgggctggtggtggaaacgcgccccgacctcgtcaccgccaatgcctgccgcagcctgcgcgcactcggctgcaccaaggtgcagatcggcatccagagcctctccgacgaccttctcgccgccaacggccgcgccatcacgtccgcgcgcatcgccgacgccatggccctcttgcggcggttcggcttcaaaagccacgtgcacttcatggtgaacctgctcggcgccgaccccgcctccgacattgccgactaccgtcgtctcgtcaccgacccggcgtttctgcccgacgaggtgaagctctatccctgctgccttgtggaaagcgcccgactcaccgactgctacgaggccggccagtggcgtccctacaccgaagaggagctcgtgggcgtccttgttgccgacgtgctggccacgccgccctggacgcgcatctcccgcatgatccgcgacatctccgccaccgacatcctcgtcggcaacaagaagaccaacctgcgccaagtggtggaggccgccgtcgatgccacgggcgagcccgtcgccgagatccgctcccgcgagatctccgtggaaggcgccaccgtgggcgacctctcccttcagaccatcgcctaccagaccgccaccaccgaagagcgcttccttgagtggatcacccccgagaacaagatcgccggcttctgccgcctgtcgctgccgacggcacttccccgcgacaccgccaacgagtcctctccccctcccatcaagagcgagcaaagcgaggcgaggggttcctcgcttgcttccccctccgcgccgcaagaggccatgatccgcgaagtgcatgtgtacgggaaagtggccgccctgcaccgcaccggcgagggcacccagcatctgggcctcgggcgggcgctcgtggaagaagcctgcgcccaagcggcggccgccgggtacaccgcgattaacgtcatcagcgccgtgggcacccgtgtctactaccgcaacctcggctttaaggacaccgggctctaccagaaacggccgctgccatgagcatcgccgacgagcagcgtgtttccgcatccggagcaacgaccgcgcagagcgcctcgcagcccgacgcctactccccccaggtcatccgcaagctgaacgccctcacgagcgacttctacgcccgcgaagccgcctcgttctcggccacgagacaagccccttggcatggttgggagaaggcttgggagctcatcacggcccccgatgccgcgcaaggcccctttcccagccacgccgccgtgcgagactccctctccagccgcgccgcccgcatccccgatgactatgccagcaattccaaggactccctcgctgtcctcgaccttggctgcggcaacctccgcttcgaacgcttcctcgccgaacgcacaaacgcccccctgcgcgtcaccgccctcgacaactgccccgatctggcatctcccgaaatcggcgctctatctgccgccttcccgcacagccttcgcagctcctctgctgcttccaaaacgaaagaggaggatgcttcagggcagggcgcgaatccccccgaaaagaccatcgtagatctccgcgccctcgacatcgtggaatccctcctcgacggcaccttcgccgaccgtctcccccgcaactcgcacgacctcgccgtcgccttcggactcatgcaccacctgccgacgttcgccctgcgcgcccgggttctcgaggggatcctcggctccctgcggcccggcggctttgccgttgtgtcgttctggcagttcctgaacgacccgcgcctggccgccaaagccgccacggtcaccgccgagggccgcgccgcccattgcctccccaccttccaagaaaacgacttcctcctcggctggcagcatgcggaaggcacctaccgcttctgccaccacacgcccgaggacgaaatcgacgcccttctcgccgccatccgcgaacccagcgcgccctccaccagcggctgcgcgccccccgctcccctccccttccgcgagattgcccgcttctccgccgacggcaaactcggcaacctcaaccgctacctcattttgcagcgcctctagcttagacgcaccctcgcccccccgttttccagccgcaaattcacggtcttgccgtaacaagcgtcaattcgtgactgaccggagaccaaaacagccccgtttgagagaaatgcagccgcaaaatgacgcctgtgacgtcaacatcgtcattttgcggctgcccgctcttttggcgaaagtttgaaggagctaacaaggacgacgtatcaccggaaaatctgttaaagtgcgcaccatggctagaacacccgacacccccgccgtcgctcgccgccgcgagcgcgagaagcgcaccatctcgaacatggtggcgatttactgcgctggcaatcacgacgcgtctgcgcgcaccgagacaagtttcgccggcgagccgctctgccccgcgtgcaaggccatcgacgactactgcgtcctgcgcaccgagcgctgccgatccatggcccacaaaacgagctgcgaggagtgcggcaaccattgctatgcccccgcccagcgcgagcagatccgcgccatcatgcgctacgcaggcccgcgaatgatcctctaccaccccgtggccgccatccgccaccttctgaagaaataagggcgccctcgcgccccttgacggtgctacatccccagatacgccaacagcccctcgcagccatcgcgcacgtcagcgtaggttgtctcaaaatcgcccgtgtaccaaggatcatccacgctgcgactggtgccggcgaattccaagagcttgaacaccttgccgtcgggatcaccgcccagtatccaattcatgttgcggatattggccgtgtccataccgatgatgaagtcgaaggcatcgtagtcggcgcgacgaagctgccgggcgcgtttggcctcaaagccgccaatgccgtgctcgcgcagcaccgccgccgtgcccggatgtaccgggttgccgatctcctcggtactcgtcgccgccgactcgatgtggaaccgctcggtaagcccccgccgcgccaccgtgtccttcagcacgaactcggccatagtcgatcggcagatgttgccgtggcaagcgaaaaggatgcgaatgggtgtttggaacatggggaaatcctttgcatggagaggggcggtccttgctttccagtaaattatagaggaacttggatttcgttcaatcgtgcactttctatgctaaaattccgcccacgtgccagcaaagtccgcgcgggcggcgctccgagagtaaaggagtgctgccatggagagtattcttttcgccgctgcggcggtcgccacaatagcaggcttcgttcttgaggtctggcgggagatgaaatcgacgcgaacggatgacgaagggagaaagagaaagggccagcgctaactgacccttcatttcgaaaatacctgcgccgcccgtgacaccttagcctagcaactacggaacgggctttgctggtacgccttatattatagccccttgcagcgcttttgggaaccgtttcgagattgctcttcggaaactcttcggccgaagctcgctggctgacttcaagcttaaactaatcactaaacccgccaaaaggccccgataatggggccttttgcttttgcgcagtacattattctatgattctatatttcctgaaaaagcaaaactcattgctagcgccgcaaagcgcggcggcgagtttcggacgcctcatcaaaccacgcgcataccatcaaatcaatggcgttacaaaaagctggcccatctctccggcatctgcgaaagaaagatagagaacggcgctctcaatactagctttagcttcttccgacaaggaacaatatattgccagattttccttcgacaacggttcgatgaaggcggcttcgccatttgaaatacttgcacgaataaagtatttattattgatgagaattgctgcataggcatctgatcccaaatggacagacgaggggaacctgctctccatttccccctgaacaagaaggtacgactcacccggaacgtcatcttcggagttcaaggcgtaatcgtgctttctgctgcgaatctcgaaactttccttccattcgacagattcaagcgaaacagccatgtcatccccagaatagtcctcgccaagtggaagaataatcctcctaggcatttcgtcgtagggattgtcagagatcctttttgctggcttgtcggagccattctcaccaataagggtgtcggggtcgtcgaactcaaagctcaattcaccacctgattcatcaaacgagagggtaatagagttgccttccacggctctgactgtgtataaggaaggaatctctccatcacctaagtaggcaagttttccgtcaaacatcacctcattgtacccatcatcccaaatcccaaccagttcgtcagcaccgtttaattcgctggtatcctggctgacttctacatcttcgctggcatccgaagacgcaacctcatcgcttttggctgcttgctcttgagcatttaagccggagttcacctcttggctcgaactacatccgtcaagacagccagacacacaaaacgccaagacagtcacaagcgacgccaccgcaactcccttaaatctcccgctcatttcttctccttccagttgtagccagtgcgccatttctacctcatgccgtgcgtaacttgttgcgcaacaaatggcaaaggcagcacttttctactgcggagaaggctcaattgaaaaggagagtatccaccgcagtcaccacaactgttcggaacgctcgcaaatgcgaaccaccaaagaaaggtggataccctccttgacagtggttcagatgaagttgtaagcgttccggaaggaacagttgtggtaaggcgtattcttccgctggctttttgcgcttccctcctaaagcaagggcctttataattcagaaagccgttcagtttctgacacaggcaatgcaatttcaaaagggaaattctgacactacaggctgacacaggaagcaaatatttgttttatatcacctgataagataaggagaaagcagtaaatggcagagttcatctaccaaatgtacaaggcccgcaaggcggtgggcgacaaggttattctggacgacgtcacgctgtcgttctaccccggcgcgaagatcggcgtcgtggggcccaacggcatgggcaagtccaccctgttgaaggtcatggccggcctggaggaagtctccaacggcgaggcgcgcctgacgcctggctacaccgtgggcatccttctgcaggagccgccgcttgaggaggacaagaccgtcctcgagaacattcagatggcctttgccgacgtgctcgccaaggtggaacgcttcaaccagatcggcgaggagatggccgcgcccgacgccgacttcgacgccctcatggacgagatgggcaagctgcaggacgagatcgacgccgcgaacgggtgggatctcgactcccagctctcccaggccatggacgcgctgcagtgtcccgacccggacgcgcccgtgagcatcctttccggcggcgagcgccgtcgcgtggcgctgtgccgcttgcttctggaacagcccgacttgctgctgctcgacgagcccaccaaccacctggacgccgagtcggtcctctggctcgaacagcatctgaagacctaccccggcgccgtgctcgccgtcacccacgaccgctacttcctcgaccacgccgccgagtggatctgcgaggtcgaccgcggccagctgttcccctacaagggcaactactccacctacctggagaccaaggccgcccgcatggccgcccagggccaggcccaggccaaacttgccaagcgcatggagcgcgaactggagtgggtgcgcagctcgccgaaggcccgtcaggcgaagtcgaaggcgcgtctagccaactacgacgccatggtggccgaggccggcaaggcgaagaagctcgatttcgcggagattcagattcccgccggcccccgtttgggctcgaaggtgctcgtagcgaaaaacctgcacaaggaattcgacggccgcgtgctcatcgacgacttgtccttcgagctcccccgcaacggcattgtgggcgtgatcggccccaacggcgtcggcaagaccaccctgttcaagaccatcgtgggcctagaaccgctcgacggcggcgagctggaaatcggcgagacggtgaagatcgcctacgtcgaccagaaccgcgcgggcatcgacccggacaagaagctttgggaagtggtgtccggtggcaccgactacatgatggtcggtgagaccgaagtgccctcccgcgcctacgtggccgccttcggtttcaagggagccgaccagcagaagcccgcgggcgtgctctccggcggcgagcgcaaccggctgaacctggcgctcaccctgaaggagggaggcaacctgctccttctggacgagcccaccaacgacctggacgtggagaccctctccagccttgaagcggcgctgctcgacttccccggctgctcagtcgtggtcagccacgaccgcatgttcctcgaccgcgtcgccacgcacattctggcttgggaaggcgatgacgagaaccccggccgctggcacttcttcgagggcaacttcgaagcctaccaggccgaccgcgaggcgcgtctcggcaaggaggccgccaagccccaccgcctccaccgcaaactaacccgcgactaggcaccgacagctccaggggccatcaaggccccgagcatcatattttcctaccgaagagggcgagctcacagggatcgccctctttctatcttttgattgatatattgctgagcttttctctatcattttttcgaattcatgtcgaatatgtcctaacctaactgatgtgatgcccctattaggcaatctatagattggataatcatgagagaacacgacatgtcccagcaaattaaggagatccggaagcactacggactctcccagcaggcctttgcgcggctactcggcatcggcgaggccagcatcactcgctacgagaagggcatcgtccctaccaaggccaacgccaacctcattcgcgccgccatgatccccgagttcatggccggctgcctcgagcgcgatggcgacgtgctcactcccaagcagcgcgcatcggtcgagaagatcgtctgcgcggaagtggcctttgacgaggaaggagacatcatggacatgacggaaatctacgagctgacgttgcagcaggaggtgttgaacgaatctgcctgggataccatggcgcaaatctcccgagcgcgcgccgacgcgaagctcaaaggcaacgacgagctgacgataatctacgacgacatcgagcaacagatcgctcgtcttgtacccgaaattctttcggagtcagcggccaatcaacataccatcgatgagatacgcggccagctgaaaggcttccagcagttcctttcgacccagcttgcaaaggcggcctaactatgagcgacgaagaaaagtgcaccgaaggggagttcagcgaaaagttcgaagagttgcgttggaacctcctgaacgcctatcgccccacacttgaatcggcgccccaggcttttttgctcggaggccagagcggggcaggaaaaaccacactccacaagatcgtccatcgccgactggacggcaacggtatcagcattaacggggacgactatcgaaagtttcacccccgcttcttggagcttcagcgcatttacggggacgaagccgttaattacaccgcgccatgggcggggcgcatgaccgaggcgcttatcgactcgctctcgcgcatcgagtacaacctcgtcatcgagggcacgttgcgtacggcagaggtgcccctgaagacggcggagctgctgcgccagcgcagttacggggtgtccctcgcactcatggccgtaaagccagagatctcactcgtcagctgccaaattcgctacgaggagatacgcgtagccggcacgaccccccgggcaaccgacccggcgcaccacaacaagatcatcgatcagatcgtctccaacctcggcgtcctggaagcaagcggaatgttcgacgagatcgccctctacgaccgaagtcaaacgcgtctgttcccccgcgagggagctggcgacagcgccgaaaaagccttacgcaccatcctcttcgacccctggactcccgaggagcgacgccactacaacgagctcaaagccaagctgaactacctgaagacaaagtaaaacccgccctgcgctaccaacgacgagcgggtttcaagccccgtgggggacgaaccgaaccgtcccccacagctgtcttcattctagcacgaatggagataccgcgggatagccgagagatgcgctatacgttatgaacgctctgtagccgactcttcttcctcagcgtcgtcaactggctcggaatcgtctatcgcctcgagctcatcggccggctcgggatcgccgggctcttcggcgtcgtcggcctccccggcctccgcggcaagggcggcgtcttcggccagaaggcggttgaactcctccacgtcgtacagctcgccggtgtcgctcagctcgtccaccacgggaatctcgtcagcgtcgtccgcatcgccggcaaagtcctcgccccagccgtccgcaacgccgtagtccttcatgccgaagcgcgcacgaccgcaactcacgaggcgcggctcgacatcctccgcctcgtcgtcatccgtcgtctcggcgttgtaccagtggtactcctccaccggtacggcggccactgcagcagccgcggcggcggccggtgtggcgcccttcctggaacgcagggcgttgcggcggcgcaaggcggcctgaagagcggtctcttccacgacctcgcgcgcatcgccatcggcaccctccccaccttcgacactctcgttgtcgagcagggggttgaaggcggccaccgaagcggcagccgcctcggtctcggcaacgcgctgcttgcgggactcggagaccaaccccgccacggcgcccgcagcggcaaggccgaggacgcccacggacacaggaccggccatcttcgcggcatcgagccattccacctcaccggtggaggccagcgcttcgtgcatgctgccggcaacgccgtacttcatcacctgtaccacgtggtggccgccctgctcgctcacaccgagcactgaagcgttggcccagccgcgctcgcgcagagccgctgcgcgctcgttggcccgggaaaccacggcatcgcgatcgtcgaaggccagcgcgtccagcgggcaggcagccacacaagcgggaacgcctccctcggccacctcggccgcgcacccgtcgcacaggcacagctcgccgcgctctccccgatggcgggggggcatcggcgggacataccatggcgcacaaatggcagctcacgcaacgctccgcatccaaggtcacaaaacccgtctcgccgctcaccgccagcgccccggtggggcacacttccgcgcaaggcgcctcggcgcagtgcacgcagccggcgcgggccgcctcccacaccgtgccgccgtcggccagcgtgcgctcgaagcgcgccacggcaagcggcgcctcctcgtccagcacggccgcccgcccgaacgcgcgcgccgccatatcctccgacgacgacgcaggcccgaggccgaagcggcccttgcaggcagcgacgcacgcctggcaggcagagcaccgactgctgtcgaaaagaattgccttgtcagccatgatgctccccctaagccttctcgatatcgaccaggaaacccttgacatcgcgggccgcccccacggggctttccgccgcaggggccaaaacgccccacatggccgccgcggcgtcctcgctgccgagggccatgccgttcaagcacacatagtggccctcgttgccttcgcattggaagggacggatacggtcggtgacgagcaccggtgcctccacggatccgcgctcgttgaacacgcgggcccactcccccgtggccaggccgcgaatgcgagccaaactcgccgacatttccacgaagcagccgggctccgcggcagccagcgtctcgctcagggcgcgccgagcgccgtcgcggccgtccgagccgttgatgaccgcctcaatgggataggccgcgcgattcgcctgcatagaggagtagtccggcgccagcgcatcggccacggcggcatccaccgccccgtcgtcgcctgcggcaccgggtgccttcgcggcggccgccagcagcaccggagaggcgtaagccccgttcaggcgattgttcaacggggactccaacggttcgtagtgctcgggcacaggcccgtcgcccaaccggtcggacaccaaaagccccacctgttcccagataccggggaaggcctggttgtccggctcgagccatcgtccgtcgcgcagaatcgggaagtcgggcgcatcgatgcaggcccagctctccccctcccaagtaaggagattgcgctcgcgcacccagggctggcccgccaagttcgcgctcgcccggttgccgcgcacccgcacgttgccgggccacgtgaagccccagccggggaaaagccccagaccgctctcgtcggcaccgtcgcgacgtcccacgggttgctcggccgcatcagccgcactggcgccgttcgaccacagccccgccaggaaagccgcgccgcaggccgtcgagccgtcggcgcgcagcccgtcggcaccttccaaaagcaccagctcgccgccgtcccagtcgctgtcctcgacgacatagccgttcatcgcccaggccaccttcaccagatcgatgctgtcggatgtcacgtagtcccatcgggccttaaggatcggatccgtcgccgcaccgcccttggtgtcgtacaggttgaacacgcgctcccacatatcgccgatgatggcagcgtccgtgcggctctcgcccgccggctcaaccgccgccgcagcatgctgcagaaggcggccgccgctcgcccggatgccggccttctcgaagccgagggcgctcggcagctggaacaccgtcgtctgctgctgggagggatcttccacccgttcccagaacgtagccgtgaggttcggcgagccgtcggtcacgacgagccacgccaggcgccccacgtcttcggccgtaacgcccgaagacgcgctccccaccagatcggcgccccacaggaaacacccctgcagcaaacctgtgcgcagcgccttgctgaacgacgccccgccagccggcgccttgggcagccaatcgtagccgtaatcgttgtcgaaagccgcctcctcgccccaccactcgcgcagggccgacaccagggcacggggccgcagagaacccgcgccggccggctcggtatgggcctcgagccacgcctggagcgtcgtctcgccctcggtgggccagggaagatcaccgcaaaacatgtccggcgaaagccccatggcatcggccagcccctcattcgcagcgccccccaggtaggagatgccgcccccgggcacgccgatgttgccgagcagcagctgcaccacagcggccgcgcgcgccgcctgggcccccgtgccgtgctgcacgagaccgggcccggccagcaccttgcccgccccctccaccgcgcccgtggccgcgaaggccccataggcgcgctcgagcagcgaccgctccacgccgcagacggtggccaccgtgtccaagtcgtagcgggcgagaaactcctgcaggcgcacccaggcgcaagccgggtcctgcagcgtgatattgcgctcgcagcgcggctgggacggcacggcccaggcagggacgccctcaccgcgcacccaggagaactcgccgtcgaagcgcatgttccacgtgtcgaagccgtcggtctgatagccccaactggtcttgtcgtaggtgccggtcatgggatcccagccgaagaaggcgccgcttgacgcgtcgaaggagaaggcggggtccatgaggtaggaggcgttggtgaaattcagcacgtactcgggctgccagagggaattgtccatggcgtatttggccagccccccgagaaacgcgatgtcggtgccggggcggatgggcacgtggatgtcggccatctcggccgaggccgagcgcagcggatccacggcgatccaaagcgcgcccgcatcccgggcacgctcgatccagcgaagggagagcggctggcttgtggcaacatcggcacccagagtgagcaggcagcccgtgttcgcgatatcgctccagagcccgtcgggctcggcgatgccgagggtcgcggcgacaccggctgcgaaggcacgccgaccgaaagccgcttcggagtcgatgttcaccacgccccaggatcgcagcgccttggcgagcaggaactgctcctcagccacaaggcgcgcgccgccgaagctgccgatggcccgagtgcgcatgaccggcacgccgcggggacgcttccgggcgccgtagtcgttgtcgccgtagccatcgtcgccgtagccgccgcggtcgctccagtcccattcgtcgaagtccgtctcgccctgcgcctcatcgtcggcctccacgccctcgatgctctcttcgaaggtggcatcccgcgtgtccttcaccaaggtggcgatctcatccagtgctcgatcccaggagatgtcttcccatgcatccgacccagcacgacgcacccgcggcgaggtcaagcgccccggactggccgtcgtcgcgccttcgctcgcggcgtcgttgccgcccgcgccattgccaccatcgccaccggcgccgtcctcggtcgccccttcgggcgccttccacaagtcggtcagcgcctgagcgcgcaggcagagccgcccttcagagaacggattcgcgccgtcgccgcgcgccgccgccacccgcccgtcctccacctcgagcaccagtgtgcaggcgcccggacactcctcgcagacgacgaccggccccgcaggggccgcaggctcttcggccggcgcctcgtcggtgccggcgggctcttcggcgacctcttcgtcggcccaggctcgattcggatccaaaccccatgccacgcttcccgccgccacggctccggcaccagccagaaagcctctccgcgtcaatttcatggacgaacgtctccttcgcacaggcccgcgtcctgctagcgcaagcctattcacgccctgtctcttagaaccttcattttcacacaagagaccgtcgtgcggacgctcaaaaaccccgagcgcgcgccgtaggcgagatgcccacaaattgtccacgattgcggcgctgatctgcccattgatgaggtttatcctcgtcttttcccattggaaacattcgccccctaacctaagcgcatcagaaaaccgcaccatgaaggaggccccatggcccgcatcaatcgcaactacgagaagctgcccggcagctacctgttctcggaaatcgcccggcgcaccgccgcctaccaggaagcgaaccccgacgcgcgcctcatcaagatgggcatcggcgacgtcacccgcccgctcgccccggccgtcgtcgccgccatgcacgccgccgtagacgacctcgccgccgccgagaccttccacggctatgggcccgagcagggctacgcctttttgcgcgacgccatcgccgagcacgatttcgccgcccgcaacatcgccatcgaccccgacgagatcttcgtctccgacggcgccaagagcgactgcggcaacatcggcgacatcttcgccgaggacaacgtcgtggccgtgtgcgacccggtctatcccgtctacgtggatacgaacgccatggccggccgtgccggcgactacgatgcggacgccgagcgctggacgaacatcgtctacatgcccactaccgccgagaacgacttcacgccagccctgcccgacgtgcccgtcgacctcatctacctctgctcgccgaacaaccccacgggcacggtgctctcccgcgaggccctgcaaaaatgggtcgattacgccaacgccacggacgccgtcatcctcttcgacgccgcctacgagcgcttcatcaccgaccccgccattccccactccatctacgagatccccggcgcgaagacgtgcgccatcgagttccgcagcttctcgaagaccgccggcttcaccggggcccgctgcggctacaccgtggtgccgcgcgatttggtgcgcgagggccagagcttaaacgccatgtggaaccgccgccagaccaccaagttcaacggcgcctcctacgtcatccagcggggcgcggcggccatctacactccggagggggcggcccaggtggacgagacgatcgacttctaccgcgccaacgcccgcacgataaaggagggcctggcggcggccggccttgaggtgtacggcgccgacaacagcccgtacgtgtggtgccgcacccctaacggcaccggctcctgggacttcttcaaccgccttctggaagaggccaacgtcatcaccactcccggcgccgggttcgggccggccggcgagggctacatccgcctgactgccttcggcgacgccggggacacgcaggaggccgtcgagcgcatcaagcggatgctcgatgccgagagtcgcgactagccgaagcgcaccacggaaccggcgctcagtcgagcccgcgcgccgtttgctgacgcttgtcaacaaacgctccacaattgatcgccgatgacgcgactcaacaattcgccgctatactggtcaccatcgcattgaccgcatcgattcaaggagagacaccatgaacaccaaccatgcgaaggccatcaagggcatgagcattgccaatatcgtgctcgcagccctcggcattttcggcatgctcatcgcttgggcaggcctcggcgtcggcggcgccgccatttccggctccggctacgactacttctacaccgacgacggcctctatttcaccaccgatgacgtgtcagtgctgctcggcatgctgggcttcctcgtcttcctcgtgatcgtctgcgccgtgctcattctcatcgccggcatcctcggcgtgcgcggcgcggccaagcccgacaaactgcgcggcatcatgatctggaacatcgtcgccgccgtggtgagccttctctcctgctgctgggtgtcgctcgtgctctgcatcatcgtggccgtgttcgccaacaaggatcgcgccctgtacgccgccgcgccggcgcccgcggctccctacggctacgcgccggccgctgcgcctgtcgcaccggtagccccgcagcagcccgtccaggccgcccccgtcgcgccccagcagcctgccgccccggccgccgctgttcccgtggccgccgccgtgaccgccgaggctgttgccggcgcagtgatgcctgccacggccgctacggcccctgcggcagaagtcgtcgccaccgagcaggtcgtcgcggctgagcccgcagcagacgaacccgtggctgccgtcgcggaggagacggtcgccgagcccgttcccgccgccgtgatggaaacggtcgaggaggacaccttcgccccggccgagacccccgaggaagccgccgaggccgcagccgagcccgccatcatcctgcccgacaactacatcgaagatgcccaggccggcgtgaccgtcgtcgaggagatcccctccgacaccgacaccgcagccgccgacgctgcgaccgacgccgccgacaacgacaagcccaccgcctagcatagaaatcccctgagcagccttcacagcactggcagccaaccgccaaaagacctcccgcctccggtcaggaggtcttttcttttgagcacttttctgaccacctttccatgtaattgcgatgccgccgtctgcagtgccggacaaaaactgggggtttggtatctttgggcgctctcgctctggcaagatggtggggtgctcccgacgtaccaagccacctccactgagtaagatagttgccgaactgcttcggaaaggctacggggcggggacttgcccgcgcggggagaggcctataatcgacccatgaggcaacgcgcgcccgcgtcaacggcaccagtggcggcgtcaacagccgcgccggtggcggcaccagcggcggcatcggcgccagcgcagcagccacatcaacggtcgcaccagcagcaacggcgcccataacgcagcgaggcacgccgacccaagaggcacaagcgcaaaccatcaggggtgagagtcatgaaccgcgagagggaaatcgtcaaggcgagcatttacggcattgccggcaatgcgctgctcgtcgccttcaagatggccgtcgggttcatgtcccattccatcgccatcatcctggacggcgtcaacaacgccaccgacgccttgtcctccatcgtcaccatcgtgggcaccaagctcgccgggcgccggcccgaccgccaccaccccttcggctacggtcgcgtggaatacctcaccagtgtcgtcatcgccatcattatcctggtggccggcttcatctccctgcgcgagtccatcgacaagatcatccaccccggcacccccagctactcggccattactatcaccgtcatcgtggtggccatcctcgcgaagatcgccatcggcatcatgttcaagcgcttcggcgacaaaacgaactccgaggccctcatcgcctcgggcatcgattccaactatgacgcagtgctgtcggccggcacgctggtggtagcggcggcccagaacttctggaacctgaacatcgacggcgccgtgggcctcatcatctcgctcgtggtgctgaaagtcggcttcgaggtgctcggcgacgcgctctccccgctcatcggcggccccgaggacaaaaagctcgtcgacgacatcactgtctacgccaacagtttccccgacgtgcgcggcacctacgacgtggtgctggacaacttcggccccaacgagattttgggctcggtgcacatcgaagtgcccgacgatatgtgcgcccgcgacatccacgccctcacccgccagatcagcgaagggctcaccgagaagttcggcatcctcaccaccgtgggcatctacgccgccaacacgaccggtgcgttcgcccctctgcatgccgacctcgacgccctcgcgaaaagcgacccggcgatcctgcaggtgcacggcttctacgtggacgagaaaacctcgaccatctacttcgatttggtcgtaggctttaaggccgacgacgatgccatccgcgacaaaataatcgcccatctgaaggaaaaataccccgattacacctacaatgtcgtcatcgaccacgattacgaagacgatcagccaacgtaggcgatcatggggaaaggggcgcacgatggcgggcgagagccagaaactgaagctgctcaacctcgccaagatgctctacgagcgcaccgacgagagccacggcctcacctgccccgaaatcatcgccgggctggccgaggcgggcatcgaggccgagcgcaaatcggtgtaccgcgacttggacgcccttcgcgacttcggtctcgacatcgcgaagcttcccacgtacccggtcagctacgccctcgtctcgcgcaccttcaccgccgccgagctcatgctgctcaccgacgccgtgcagtcctcgcgctttctcacggttcgcatggcccatcgcctcaccgaaggcctggcgtctctgggctcctgccaccaggccgccgcgctttccaagaacgtgcacgtggaaggccgcatcaagatgcagaacgaatcggtgttccaccacgtggacacgctgcacgaggccatccgtcgccatcggcaggtggcctttcgctacgtgaagcacgacgtgaacaagcgcccacagccccaagggggcggccgcatctactgcgagacgccggtgtgcctcatttactccgagggctgctactacctcatcgcctacaacgagaagcacgactccttccccagctaccgcgtcgatcgcatgcaggggctgcgcatcaccgatgaggcggccgtgcgcaacgagcgcatcgccaccttcgacgcggcggcctacacttctcgcacgttctccatgttcggcggcgagacgacgccggcgacgctgctcgtggaggaatcggtcatgagcgccattatcgaccgcttcggcaaggacgtggaaagcgcgccggtggatgcgacccatgcccgcgtgcacgtcaccgtggccgccagccccgtcttcttcggctggctcgcccagttcggcaccgccgtgcgcctagaggcccccagtgccctggcccgccagtacgctgactacctgagagacatcgccgacagctactagaatcgtctaatgcacgaccttctcgatgagggactgaaggcggtgaacgtcaagcggcttgggaaggtgcgcgtccatgccgctttccagggagcgcttgcgatcctcggaaaacgcgttggcgctcacggcgatgatgggcagcgatgcgcgcagagggtcgggcagcgcgcggatggcgcgggtggcggcatagccgtccatgaccggcatctgaatgtccatgagcaccaagtcgtaggcgcacgcatcggcctcctcgatcatccccacggccacctcgccgttttccgccgtgtccaccgcatagcccgcgtcgtccagaagacagcaggcgatctcgcggttgagctcgttgtcctccacgagcagaatgcggtgcaccgggccccgcccgcggctcggacgcggcgcttcggcggccacgtcggccggagcctggcggaaggtgatgtccaccgtgaaagtggagccctcccccggcgcgctttccacagcaagctcgccttccataagatcgagcacgttgcgcacgatggtgagcccgagtcccgtgccctgaacgcccgaagccgtggtgttgctctcccgttcgaagggcatgaacatgcgctccatgaacgcgggctccatccctacgcccttatcggccacgacgaagcggaagctggcgaagccctggggcgcgccggcgttctcggccacgctgatgcgcacggtgctgccagccggcgagtacttgatggcgttgtccaccagctgggtgagcacgtgggacaggcgcacggcatccacgagcacgcgatcgtgggccagaggctcaatgtcgcaggccagggtgacgtcggcgcggtccgccagatccaccatgtccatgcgcgcctgcagaaccagctcggaaagcgagcattccgcctcggccagctgcacatggcccgcctccatgcggctgatctccagcgtctcgttcaccacgtcgagcagctgctcggaagcggccagaactttgtcgctgtaggcgcgcacccgctcggcctcgccgccatgggccgagatgagcgacgcgtagcccaccacggcgttcagcggcgtgcggatgtcgtgggacatgttcgagaggaacgtgtttttcgccacgttggcggcctcggcctcggaaagggcgttgcgcagcatggtacggtgctcgagttcgcgggcataggcctcgcgcagctgggcgttcaccgcctccagctcgtcggcccgctcgcgcagcttgtccgtggcgtcgttgatgaacacgtagaagaactcgcccgcgtccaacgtgacgtggtggccgtagtcctctatccaacgcaccgagccgtcgcggcggatgatgcggtactccacgtagtccatggagtaccggtcggcctgaatctgacggctgatggagtgctccacggcctcgatgtcctcggggtgcaccatgccggggaaggcgccgcccgtcagcgcgacgaactgctcctcgtcagcgcagccgaagatgcgcaggcaggcctcgttgacgtagaccaccgcctcgtcgccatcggcatggtagacgaaaaagccgcctggcatatgagcgagaacgtcgccgatgtcgagctgggctaaagcgggaaatatggagggcgccgaggttgccatgtgctgctttcttctgtcggccgaaaaggtgctttccgtatgctaccacggccgttgcccagcgcccccgaagctgtcgatgagcccacgaatttgtaacgaaagagaaacgtggaaggcttacgagaaatcgaacatggcggtggaaaggtagcgctcgcccgtgtcgggcaggatgacgacgatgttcttgcccacgttttcgggtcggcgcgccaacttcgccgccgccgccacggccgcgcccgaggagatgcccacgagcagtccgtcatgggcagccagctcgcgcccggcctcgaaggcctcctcgtcttcgatggcgatgacctcgtcgtagatagcggtgtccagcgtctcgggcacgaacccggcgccgatgccctgaatcttgtgggcgccggcgcggccctcggagagcacgggggatccggccggttccacggccaccacctggatggccgggttctgcgccttcagataggccccggtgcccgaaagcgtgccgccggtgcccacgccggccacgaggatgtccaccgcgccatcggtgtcctcccagatctccgggccggtggtgcgctcgtgcacggccggattcgccgggttggagaactgcgagggaatgaacgagttcggaatctccgccgccagccgctcggcctcctcgatggcgcccttcatgcccttggcgccttcggtgagcaccagttccgccccaaaggcgcgcatgaggttgcgccgctccacggacatggtctcgggcatgacgatgatgatgcggttgccccgcacggcggcgatggccgaaaggccgatgccggtgttgccggaggtgggctcgatgatgaccgtctcgtcgtcgaggaccccggcctccacggcggcgtcgatcatcgattgggcggcgcggtccttcaccgagccggtggggttgaacgactccaccttcccgatgagcgtggcgggcagctcgtgggcgcgctcgtagttggtcagctccaccaacggcgtatgcccgatcagctcggtgacgttcttgtggatggtcatggcaggtcctttctggttgaaacgcaccgcggggcgggagcgcggggaattctgattcgctcagacagtcctcgctggtatcgaaggcgcagcgggcattacgcctccccgcatcaccgcgccttcaataccatctgcggaactcgctcggtcagaacaccccgcgctccctcggcactcttccctggttgagtcggtgcgctcgtaactggtagtgcccccatcctactgaatgcccccgcttcgtcaacgccccgcgccatagcggtttccgatggcgacgcggccgagaaaaccgtcacgaaccgccaagttcccccttccatcgccgctcggcggccgtataatacctagcagttccctagacttgaattccaacccgccataggagcttcccatgaccctgcagcaacttcgctacctcatcgccatcgcgaaccacggctccatctcggcggcggcgcacacgctgtacgtgtcccagtcgagcctgtcggtggccgtgcgcgacatcgaacgcgaaaccggcgtcaccatcttcgagcgttccaaccgcggcatcacactcacgagcgacggcatcgagctattgggttacgcgcgccaagtggtggagcaggctgatctcatggagcagcgctactccggccgcggcggcgaggcggcgcaaaagctctccatcacctcccagcactacgcgttcgtcgtggaggcgttcctggaactggccgaggaatacgagggcaccagttacaacttcagcctgcgcgagacccgcacctccgaggtcatcgaggacgtgcgcgacttccgcagcgatctgggcgtgctgtacctctccacgttcaacgagagcgtcatcgggcacgccctttccgacgcgaacctctccttcaacctgctgttcaccgcccagccccacgtgttcgtgagcgacaagcaccccctagcctcgcgcaccgaggtgaccgtagaggatttggaggactacccccgctacgccttcgaacagggcgcgaacaactcgttcttctattccgaggaacccttggccgagctgcctcacaagaagcgcatctccgtgagcgaccgcggcaccttgtcgaacttgctcgcccatcatgacggctacaccatctccaccggcgtgctctccagcgagatgtacaccggcatcgccagcgtgcccctgcagaccaaggagctcatgcgcgtgggctacatcgttcataacgagcggcagctgtcgcctctggcccaaagctacatcgagaagctgagcctattcgtggaaggctaccagataggcctcgcgggactgtagagcacgcatcccgtccgtcgtccccgcgtatgccgacctaatcctggggccccgtctcgcggccatcgaggccgagcagatcgaagagctcctgacgcgtgtggatgtcgagcttctggtaaatatggcgcacgtgggccttcgcggtgccgttggcgataagcagctccctctcaatgatgcccaccgtcttgcgctgggccaaaagcagcagcacttcctcctcacgcgccgatagcttgtaagttcgcgcgatctcgtcgcaacgatccaccagctcctgcttgcgaatcatcgccgccgagtcggtgccgccggacagaaagttggcaccccaacggctcgacaagtcacgctcggagagcagcaccgccgtggccaaggccacggccactaccgccagcgcagaaaccgccacctcgccgccgattccgaacgactcgagtgccccgacccccgccgcggtcacgcggccgagccacatgaaaatttggcgcacgccccgttcgatgccgaacagccagatagcggagaccccatagcgataacagatattggcgcagatcagcatgatgaggatagactgggccgtataggcggcggccatacagaaaccggccgcgtaattctgcgtaccgccgaacaccggcaccaggaacagcgcggccacgatgaggggcagcgcgaaccggtagataagcgagaagtcgaagcggccgccttggaaagagatgccgacgaacacgagcaccgccacgagcacggccccgggcgccgaatgagggccgaagacgcccccgtacatgccgttttccatgaggccgtaaccaaaggcgtaggccgccatgaacagcaccgccttccacggcaccgagaagcgcgtccacgccgtagccggacgctcttggggaggaagatgggcgaacccacgcgaagccgcccagaacgagagcggaggcaaaagcgccgtcatgacaaacaaccacggcagcatgaaaccgcggtaggcgtacagcaccactgcacccgcgacgatggaggccgaatagtaaagagcgactcgcaaagggttcaaacaaccatacagctcgctccatgtcaggatcacgagggcgatgccgaaaccgcccgccaccgcggcggcataaccggcccacgccgccaacgacgccacccagcagctggcgaacatcagcgtcgttgacgccacgagcatcgcggagcccagcacgaaaggccaccgcttgtcgaagaaggggccgatgcggcgggcaaggagggtgcagccgagggcggtggccaccatcgtccagtcgaacaagtcgcgcgccgacacggtagcggcaggaaacgccacgaatgtccccacgaacacgatctcgatccaggcacggtacagcccgagaccgaggaacaccatgggtacggcagccaccgaccggggcctccgaaaaagcggagcccgttctgctgcggcatcgggccgggcactctcggccggggaaacgcaatcggacgccatgtcgcaacctccttataggcgcagttttaccgatgaattttttccagcactccgaaaaagttgaaggggggaaagcgatagatgatagattcgattatagaacaagaccagccgtccgcccttccccgacgaaccccaaatgcccactccgcccgaaatagagggttatatgagggggttataaaagggtttggggagacaggttacacaattaggccccctaattcccgcaacggtcgatgcgcgcaaacattcgcacccctatggtggagctgtcggcaggaatgctcaaggccgacacgggagcaccgaagcgcggtgcccccttcgatacaccgaggagggaattatgagcactatttctcgcagagacctgttcaagttcggcggcgtggccgccgcgggcgccatgggcatgtccatgctcgggggctgcgcaccccagcagccggtagccaccaccggggaggccgccgcagcagccggggacggaaccccggcattcttcgtgaagcccgagcccatcaccgacatcgccgacacccgc

SEQ ID NO: 10511 - DNA, 3298 bp, Unknown
  gut microbiota DNA sequence
tcagaaggaggccacggcagtgtcccagggcaacacctgcgactccatcatcgtcgaccagacggctcccggcggcgtggaggccgtcgtatctctcatcaatgccgactgctgccacctctccgatcgcgagcaggtgcgcctgtgggcctacaactccggcgaggctttgaagtggctgtggaacatcggcgagcaggccggcgcgcagatggttgattccacggcaaagtggacgagcaacatcagcaacatcgacggctacgacgtcacctacttcgccttcgacttcggtccgaagccctacaacaccggcaacggcatgcgcgacatcgccgattgggccgagcagcagggcgtcgagatcttctactccaccccggccgcccaactcgtgcaggacgagtccggcgccgtgaccggcgtcatcgccgagggcgccgacggctacatccagttcaatgccgccaaaggcgtcatcgtggccacgggcgactacgagaacgacgacgaaatgatggcctactacgagccggccatggccaacatctaccgcaaggagcagaacaagaccggcgacggccagaagatgatggtgtgggcgggcgcctgcatggaggacgcctgcggctccaaggtgcagcacgacttcgacgccggcccgggctccatggccgacatgccgtttttggccgtgaagaacgacggctcgcgcttctgcaacgaggccacctgcgagatggccgtcatgggcaacttcctgcgcagcgaggccgaccagggttggtacagccagatcttcgacagcaactacatggccgacaccgagggctggccgggagtggccctgccgcccgaggccatggcgagctacatgcccgaggtcgagggcgagaagaccggcgtctacgagagcctcatcaacaccttctctgccgataccctggaagagctcggccagaagctcggcctgaccgacgtcgacgccttcgtgaagactgtcgagcgctacaacgagctggccgagaagggcatcgatgaggacatgggcaagccggcccagttcctgaaggccatcaagcagccccccttctacggcatccatcgccacatcggcctgtccaccatcattcacggcgtgaacgtgaacaaggacatgcaggcgctgaacgccgacggcgagcccatcgagggcctgtacgccatcggcaactgcgccggcaacttcttcggcagccccgactaccccatgaccgtgcccggcctctccctcggccgctgccacacccagggctacgtcgtcggccgcgccgtggccagcaagtaggccgcctctcgcagcaacggtgcgggcccctcccgactttccgcaccctcccagcatcaccctcccgagtgcacggggcgccatcgagcgccccgtcgcttttctcggccactctttgacctgaaagattcagccagctccgaaaaaaaagggggggccgccatgaaccatccaaacacggccagccgaagccaaaaatagaagtttggtatccgaccataaccgccagagccaaagaccgagatttggtatctttttgcatgaaaatctaggcaaaatttctgggtttggtatctttcgacgccaagtttggcggtttggtacccgtccttttccaaaaaccaggggtttggtacccgaaagttctaacgcggagttttctgacctggggtttctttaggatctgggtaccaaactgcgagagttggccgaattcggggtaccaaaccccctcatcttgccaaagacaggcgcgaaaatccttgccgggtaccaaagtgccgtttttggcattacgctctttggcaacgcctattttctttatggaaagacgcttccgcaagcatccttccgcaaaacgctacagagcccgtgcgatggtgccgccgccgaggacgatgtcgccttcgtagaggacggcggcctgtcctggggcagcggcgcgctggggctcgtcgaaggcgacggtcagctcgtcaacaccagtctgctcggccaccgccggcaccgggtgctggcggtagtgagtcttcaccagcacctcgcgcggaccttgccaaacgtcgccgctgatgaagttcatatcgctagccactacccccacgctgagcagctcgtccttaaagccaacaatgagccggttggcggccgtgtctttcgccagcacatacaaaggctcgcgcgccgctatgccaaggcctttgcgctggccgatggtgtaacggatgagccccgcatgccctccgagcacccgcccttcccgatccacgatctcccccggattgaaagcagtgtccgcgccacagcggccctcgatgaacctcgcatagtcgccgtcgggcacgaagcagatgtcctggctctcgggcttcgccgccgtgacgaagccgcgggcacgggccagctcgcgcacctcgcctttggtcagctcgcccagaggaaacagcatatgggccagcgtgtcctgggtaaggtggtacagcacgtagctttggtccttggcggggtcgcatgcccgcagaagctgccagcgtcccgtggccgcatcccaccggcgccgggcgtagtgccccgtggccacgtagtcgaaccccagctcgcggcggcgctgctggagagactcgaacttcaagaaccgattgcaggcaatgcaagggttgggcgtgcggccctcgagataggcgtcgcagaaggggcgtaccaccgccgcgtcgaatcggtcgcgcagatcgaaggcgtcgtggggaatgccgaggcggcggcatacctcccgcgcgtcttccacatcgcgcgacgacccgcaggtcgatttctggtcgtcccgcagcaccatcgtcgcgccgcgcacggcatagcccgcttcctgcaacagcagcgcgcacacggagctatcgacgccccccgacatcgccgccattacgccggacgtcccgggcgccatagccgtctccctgtcatcttcgaaagtcatggggcgcatcataacacagcacgccgaaacgccaatcatccttcgctatgggcaacctcttatcccgacgatggcccacagcagctctcttggctccctctccccgtttttccctgtttcttcgcctcttgaaaggcacgagcgaattcctcgcacgcacgtcgaagccatcgtgctaagctgaaagcatgcaggggtaccgctcggcggcacgcgaagccgtcccgtggttgagagggcgcaggcgcccaacccttcgaacctgtcagctaacactgtcg

SEQ ID NO: 10512 - DNA, 8562 bp, Unknown
  gut microbiota DNA sequence
cccgcagaggacgcagagggcgactttagtcacccccccccgaccccagacgtagccactatcggaacacgagggcggactaaagtccgcccctacggggtttcaacggcccagcaataaggcctctcagcggcacgatatcaagagatgttgcagttatgccagtttaataattgtttcatgcaaccatttgcgcccatgataaggtgcctgtcgaacagccaaggaggcacccatgagcaacttcttccaaaatctgccgtataagttggcgaacttcatggcggggcgcaacgggccggatgcgctggcgcgcgcgtcgctgtggatgggcgtgctgttcacgttcctggaaatcgtcaccggcctgggcatctgctcgcttatcggcatggtgttcctgttgtacttcatgttccgctgcttctcgcgcaatattgccgcccgcactcgggaaaacgcccgctacatcgccttgacggctaaaccgcgcgccgcctgggctcgtttcaacacgcggtgggatcagcgcaagacgaccaagttcctgaagtgcccgcagtgcggccagtcgctttcggtgcccaagggcaagggcacgctgaagatcacgtgcccgaagtgccgcaaccagttcacgacgaagtcgtagagagccagttctcaggctaaaatgccagcggactcatatcttcgcgaacgcttgagaaaggaatcgcatggacgggaaagctattcaccggtgcctgcatgtgttggatttggagaagtcgatcgcgttttacgagaaggcgctcggcatgaccgagattcgccgcatggggcccgaggacggctcgtggaccaacgtgttcatgggcagcgacgcctcgggcttccaattggaactcacctggaaccgcgggcgcaccgaaccctacgacaacggcggccgcgactcgcatctggccttcaccgtcgacgactacgaagcggcccgcgcattgcatgaggagatgggctgcatttgccacgtgaacgaggccatggggctgtacttcatcgaagaccccgacggctgctggctggaaattctgccgaataaggccgagttcgcaccccaggccggcgtggacgtgctggacgccatggcgcgccgccgcagcctgcgccgctattccggcgagccggtgccgcaagcgctgctcgaccgcattctggaggcggggctgcgctcggcatcggggcgctcgcggcggccgtgggaactcatcgtcgtgcgcgaccgagccatgctggacgatctggccgaatgccgcgaacagggcgcggccatgctcaccggagcggacgcggccatcgtcgtcgtggccgacccgacgctcgccgacacctgggtggaagactgctccatcgtcatggccaatatgcatctggaagcggcggcctccggcgtgggcagctgctggattcagggacgtttgcgccaggcggccgacgggcgctcgacccacgagttcgtcgcgaacctcctgaaggtgccggccccttaccagctggaggccatcctctccctcggtatgcccgaagccgaagccccgcatcggcccttcgatgaagcgttgcggggaaaggttcattcggagcagttttagggttcaaaaaccccatgtcggggcggacgcgaggccgcccctccgggggattacgtttgcatggcaaaagacggcctctgtcgccgcttcatgctttgtcctttatgaagtgccaaggagcatgcgttcgctgactcgggcggtgaaggcgtgatcggcgaggacggcggtgaagctgccctaagcggagcacttctacacgtaagccgaaataatggttgcacacgggccggttcgtggaaaaatggaagagcagattagtcaacgaacgcaacgccatcgacgaagcgctttcaaccgagcggaggcaacaaccatgaccaacgagaccatcgcgaccgaaaccaccgagaccgtcggggaattccccatcgacgagcttctgtctgacggcatcaccaacacgccgccgtcgttcgtgcgcgccatcctgaaagcggcctccgatccggaggtgacctcgttcgccggcggtctgccgaaccccatctcgtttccgcaggagaagctgctggaatcgatgcagcgcgtggtggccgagcgcggcccggaggccttccagtactccgtcaccgccggcgtgcccgagctgcgcgcctggatcgccgagcgctacaaccaccgcttcggcaccgactacaccgaagaggacgtgctcgtgaccaccggctcgcagcaggtgctcgatctgctcggcaaggtgctgctggacaagggcgacggcgtcatcgtggagaagcccacgtacctggctgccatccaggcgttcgcactgcagcagcccgtcttccgcgaggtggagctgaccgaagagggcctgaacatcgacgagctgaacgcggcgctcgatgccggcgcgaagatgatctacctcatcccgaacttccagaatcccacgggcctcacctacaccgccgagaatcgcgagcaggtgcgcgaagtgctggccggccgcaacatcgtggtagtggaagacgacccctacggcgagctgcgtttcgagggcgactcgctgccctacatcggcggcaccgcgctgccccacggcgtgatcatgggttcgttctcgaagacagtcacccccggcttccgcatggggtacctcctcacgaaggatcacgacttgctgaaggctctcaacaccgccaaggaagccgccgacctgcacaccaacgtgttcgctcagttcgtggtgctcgattacctgcgccacaacgacctggacgagcacctggtgaagatccgcgaactgtaccgcacccaggcccgcgcgatgaccgacgccatggccgagttcttccccgccgaggtgagcttcaccaagcccgagggcggcatgttcctctgggcgacgctgcccgagggcgtttccaccatggagctgttcccgaaagcgctcgagcgcaacgtggccttcgtgccgggcgacccgttctaccccgagccgggcgcgcgctccaccatgcgcctgaacttcaccaacgccgacgaggagaccatccgcgacggcatccagcgcctgggcgaggtcatcgccgccgcgctgtaaaccgtttcgaaggggcaatcgcgccctgttcgttttccgtatcttccgtagggggcgaccttggtcgcccctttttttgtcatgcgagcaaaacgcgctcggaagggctgaccaaggtcagcccctacggtggggaactgggagggcagaccgaggtaaacccttacggtgggatgcgcgataagggaggttgcggcggggaacgtgaaccctactggctcggttgatccttcacgaaggagccgaccgcgatggcaaccacggcacacagcagaccaccgatggcccacgcgagccagaagtacggcgtctcgtactcgggcacgaacagcatgaccaaaccagcaatggtcgcgacgatcatgatgcaggcgcacaatccgctcgtcagctggtccttgcggcgcttgcgctcgatacgggcgcgggcgcgctcgatctcctcatcggacgcctcgaacacgccgagcagcgcgcagatctgctcgtcggtgtacatcgcgcgcagggccgccgcgtcggagttcacaataaccttgccctcgtcgctttcagcaatcgcctgctcgcgggcatcgttatagttggcaatatttagccgaccgagcatcatggagccatacacgatgcaccatgcaccagccgcaatgagccccatcatgagcgccgctgcctcggtttgaacgaactcgcttagggagtcagtcatagccgtgagcacaatgccggtgaagatgagcgcgatgcccgccacaagcagccatgcgaaaagacgctgcgtgcgctgacggtcttccaccgtgtagaagtcctggataaagggatggctgcgctggaactccgtgtgctgaaaggcggccgttacaataaggccgagaccgatggcaattcccgcgaacagggggatgagacttgcgcccgcaagagagggcgccgccgcctcggcgtaggcggccacggccataagtagtgccacaccaacgagagtggcacccacgccccaagcgatcttccatgcgaaggcgcgcatgtgctcgtcgtagccgcacacatcttgaggcgggccaccagcggcctcgcgcagaatagcggcgcgggcttgcacagcggccgtgggcgtgctggtcgtcaggtcgccttgcacgaggtcgtctaaggtgacgtcgaatatctggcacagcttcaacagcttatccatttcgggataggacttctcggcctcccatttcgtgacggactgacggctgacgccaagcatgagggccagctgctcctgggtcatcgcatgggtagcgcgaagatgctgaagattgtcgcggaagctcatgatgggcctactttctttaaaggagggaaagcgttcggcgtcggatcccaggtgccgcagaagcccgcgccgtcagtcgtcgccttccccaaaggacaagttcggttgatcaacaacgaccactttacctgtcactcagggtgcattctaccaactttcggcatcaattttcgcaacgagcaggcgccttttggttgcaaaccccaggtcaggcctttagagcagcgccgccagaaaagcagcaagcgcacccgtgacggagccaatgagggcaccgacgacgacatcacgcggaaagtgcacgccgccgaggacgcggcagatcgcaagcacgacagccgcaaccagcagcacgacggcaacgggcgcgctggccgcaaaccaacttgccgcgatggcgaaggcagagaaggcatgacggctcgggaacgacttgcccgcgccatcgcgagcaatgagcgccgcgatggcgcagcactcgtagggccgcggcgcattgaaccgcctccggaagaaactcactgcgacgaaccccacggcggtgacgccgacgaggggaaccagcctccacggatcgctcacgcaggcccacccgagcaacagcgcataggccgcatagaacaccaccacgatgccgcggttgacgatgttgagcgcccgaacaacgccagggcggccccgcaggggagccgcccattgctcatagcgttgctcataacgttgttcgcagcgtacctgattcgttcccaccgttgccgcttcctcttactgaagattgcctcccagagtgtacaacgaagggatgcgtgttaacggcgaatcttgcgaaacgccatggcagccccaacagcggcaacgccgctcacgagaaggatcacggcgaacaccaggcccttctcatcgcccgtctggggaagcgtcagcacgccgtctttggaagcggcctccacttcggcatgattggcattccccgccgcagcctcgtcgatcacctgggtgccctggctaccgccgttggaagtcgctcccgtattcggcttgctcgcatccgaactgccactcgaggagccacctggcgtgcccggtgcattgctcccatcgtccgcgtcaccgttcgagggcccgtcgggcgtcacgtccggcgttcccggcgtttcgggcgtttcgggagcatcaggcgtctcgcccgcatccggaccgtcgggcgtatccgccgattcggttcccacttcaatctcatcgggtcgcaccacaggacgcgtgtagacaagattgatctcgtttttcgaggaatccatgttcacgaacacgtcctcggggtagcttcccacataggctaggccatcaacgggttcagtcgcctcggccagctcgtcacctgtcagaacatcggcaaacagctcgtttttgcgtacctcgctgcccattttcgtgaactcgaccgtctgatcaccaaccgtctcgaccaccgtgtggctgtacagcggcatcgaagccgtggcatccagcaaagacgcctcgtagtagttcaccgtcacatcgctggactggcggaagtaattcagccgaatggcgttcttcgacggatcttccgacacggtcagctcgcgcggccagccgtcgaagaaggcgtacccgggattggtgcccacatgatcccacgccttcaccacgtcgcccggcttcaaaccctccaccgtcgtggtgccgagcagacgcgtaccggtcagctcaggaacgccccaatcttcgagcgtcgggtcgtcgtagtgcacgagctcgaaatggtagatggtgaccgtttgcgtcgcctcctcatcggccatcgccggaagcggtgccgcagcaagggcaagggcgagaacgccggccatcgccggcacgctaaggcggcttttcagcgcagcacaagatcgcgaagcaaaagtaagcagcgttttcacgtgaaatctcatttcaatcggggccggctcgtcaccggcattcgtggtctcatcaatgtctagtatattgctagacttacatagcaactgtaccaatagggggataggcattcaaccacatatcccctagaaaagagcggaaacgatcccgttccataagttaaacattgatgactttttcacgttgaatttgccgcagcgcacctcgagggccgcttcagaaacgtgcggcaaggggggtgcctgagggcggagaagccctccaaccgcccccgttcgcttcccctacccctccaggggcaaggtggcgcgcaggtcgctgccaaggggtgccaagcacgtcgcattgaaatgctcggcttcctcaatctggcgctcgtaggcgcgcacggcacgattccaatgacggtaggtatcgccgccgtcggcacgatgatcctgcaagccgtagcgatcgcgcaggatatccgccaccgcgcgggaggctttcgtggccccgtagtagttcaaatgatccccgtagtcgcgcgtgtcggtgtcccagtcgatggccacctcatcgtcgcccgtattcaagtcgatccaatcgatgcccagctcctcggccaccttcaccatgccgttgtggcgcgcctgagaccagttcttcgtggaaggcgtcgcgatgagcaccatctgagcgccgtcggcgtgacaggcgtcagccatctggcgcaacacggtcatcgtaagctcgggcacctcctgcacccgctcgtcagaagccatatacttcgaggcgtccgccggccgtattccccacttcaggcggaagcccttcatgtcgtcgacccaggtgttctccggcgcggcaacgaagtcctccggggtgagcgccttccatcgattgtgacgctcaaagatggggaaggcgtccttcacggccgttttaacgagcttctgttcgtcgaagggtcgaaaaagcgagttgccctcaatcatgaccaccttcggattctgcaccgcgagcgcccggttgagcaacgacttcgaataggtgaggtactgcttgccaatggcgcaggtgtaggagggaatgcccgtgtccttccaaatttccacaggggaaagcgcgctgtaggtttccgagtcgccgatgaacagcgcgtccagagagttctccggctcgccgagaaaggcctcggcggcctggtgcgccgcgttcaggcctcccacgccgccgttgttcttcggctcgaagacgcgcgacgccccgtacagcacgagaaggcccaccattgcgaaggccagaagcgcgccggcgctgcgagcaagcgagcgcacacggctgcgcccaagaggggtcgcggcggcgggaacgtccacctcttccataggggtaataggagccgccgccgtgtccgacgctatgaggttttccgtatcgcgtttctcttccatcgtcttcctcgttcaatcgtacctaacagcaggacttccctttcccgtagggggcgaccttggtcgcccctcctcaagcggatacctcacctgaggagggcagaccaaggtctgcccctacggagaacagcctccgaggcgccccttctgcgcattagaactgggcgtacatcggatccacgggagcgtaggccgtgccgtaagccccgaagatgattaccgccaagaacagcgcgtaccacacggcccagcgtgccgggatcttccacgtgcccaccgtgtcgcagatggcgattccgcgttcgcgcagaatatcaaccaccagcaagagagcggtgaatgctaccacaacgccgaaatcgtgcatatccatgctgatgccgctcgacacaatgcccagaagggttccgtcggtcagagtcgccggcacgaaatcggtgaacatggcgccgcacatggcgagccccgcatcgagcccctcggcgcggaagaacagctcgcccaccacgatgatcacgagcgtacgcgcaatctggaacgcgcgatagcccgcggactcgcgactgatgtgcagccgctcggccagacgggctgccgtcggatcgatgaggctgccggacacaatgagcacgaagtagtacataccgaagaagatgtactgcgagcccg

SEQ ID NO: 10513 - DNA, 18085 bp, Unknown
  gut microbiota DNA sequence
ccacaggccgttgccgagccatacgcacaaaagagctgccgacgaggcgagcagcggcccgtagcggttgccgaagcgtttgcgcgccttgctcgtcagcttcttcatcggtttggaaagcgagacggggtagtaaatgtagtcacgcaaccaggtgcccaaggtgatgtgccagcgctgccagaaccccgaggcggtgcgcgagaagaacggctggcggaaattctcgggcagacttatgtcgaagatgcggctcatgccgagggctacgtccatggtgccggagaagtcgcagtacaactgcagggtatagagcaccgccgccacggcaatcaccgtaccgtcgtaggaggtgtagtcggcgaacaccggcttcacgaaggcattcaggcggtcggcgacgatcatcttcttcgccaggccccacagcatccgcaggctgcccgcgtacaagttcggccgcgtcaccggctcgccggccataagggcgtcagccgtctggccgtaacggcaaatgggcccctccataatctgagggaagtagccgaggaacagcgccacacggcccagattgcgatcgggggccaccgtgccgcggaacacatcgatcaggtaggagccggccatcagggtgtagaacgagatgccgataggggcggcccagacgggcagctccagattcagcgggatgcccaccgccgcgcaagcgccgtcgatgatggagccgaagaaggccaagtacttgaaagcggccagaagcccgaagttcacaatgaggcccgccgccaacacgagcttcatcttccgggcgtagcgggcgcggatctcgcgcttgccggacttgacggctttcacagcagcatcgcgctggcggatgagcgcgcccaaccccaagccggtgaggtagatggacagcgtggacacccacagcgccaagataagcgtgcgcgacaaccagaagaagaacgcgtagctggcaataagcagcaccacccagcgggtacggcgcggggcaacagcgtacagcactacgacggcgggaagaaacgccgccagaaatatgaaggagaaatatgaggtcataggtcttttcggtcggaaacgttcggcaatgcgagacgagtcgggacgaagcggggctcgctcagccgggactcgtcgaggtcagtcggggctagtcgagctgatcttccacgaggcgcttgaccatagcggtgaggccgtccacggagttgaagttctctacgaccacttccacggcgggaatggtgatgtcgaaggcgtcctccagctcggccacgagcgccacgatggtcagcgagtccagcacgcggtcgtccacgagcgtcgtgcagccttccacctcggctccaggagccagttcgtccagaatatccaggatggtctcgcgctcttccataatggtcctttctcgtcgggcgctttacttatggttatagccgcttcgctttcgcgaacagggtcttgcttgggagggctgaccaaggtcagcccctacgggggaataaagctagtcgccctcctccgtagggggcgaccttggtcgcccctcagttccgaatcacgggtgctttacggaacaacggctggagtgttcaaggggtcggtgcgggtatgggggcgggccaggtgggtcgtcccggtctcgtccgccagcacaatggcggggagctcacgggacagcagcagcgacacgccctcggtcatgcagtaggcgccggcacgctcgaaggcgagcacgcggcccggatgcatatcgcgcaccagcagcgacttcacgaggatgtcgttggtggtgcagagcgacccgcagatcgtccaagattcggcgcccgcctcgacgtcgtcaatcgccgctgcgggagacaccgcctcgcaccgcttcccgttgccgtcggtttcttccagaaaacgcaccgggggctgcttcatggccatggcaccgccgtaataggtgaggtggtgaatgccgccgtcgacaatggcatagttcaccttctggttcgtcttcgcgtcgacgaccgccgtgaggtacgtgccgcagcacgcggtaagaccgcggccgatttccagtgtgagcggaccctggaaggccatggcgtccagcttgtcgcccagctgctcgaggaacgcccgctcggcggccgggtcgggcgcgtcgaagtaatcgacgggaaggccgggaccgtattcgaactcgcggcagacgaacccgcaggtctcttccagctcggccatgagcgcatcggcgcaggccagctcgcgttccacccgacgaagcgaggtcttctgcgtaccggagaattgctgcaagccgcgaatatcgatccacgcatcatcacgggcagcagccacaagagcgcggatatcgtcggcatccatcccgaactggcttccgcaagtaagtcgcagcaacaccggcaagcgacggccggcctcctgggcaaggcggcgcagcagctcgaactgagcgagcgattccacggtgtagcggtggatatcgccgagggacagcgcgtggcgcaccatggcctcgtctttgtacacgcccgaaagaacgatttcctccggggccgtaccgcaggcctcgcaaatgttcagctcgcccggcgagcacacctccaaccgatgcacgtagggccggatgataggaagcgcgaagggattcgccttgatagcgaggcagagctcggcccgcgccggcagacattcccgcaaaagcgccacacgatcgcgcaacgccgtctgctcgaacaggtagagcggcgtgccgtattcgcgggcgagggtcatcaactgggtatcgttcataggtctttctcccgcttcttcgtccgggcgcggcgacgggcggcagcctcgcggctcagcgccagcagcgcggcgcgatccaccttcccgttcttggtgagcggcattgcctcgatgggcaggatcttcgtgggcatcatgaagggcggcagcgcttccaaggcgtgggccctgagcgcggcggcctcggctgtaccttcgtagaatgcgatgaggcgcttcttctccttgtcgtagacgcaacggcaccgcgtcacgccgggcaccgcctctatggccagatccacttcctccagctccacccgatgcccttggtgcttgatctggttgtccctgcggccgcggtagaacaactcccccgcgtcgctgtaagcgcccaaatcgcccgtgcggtaaacgcgatcgggaaaacggcgatgcaaggggttctgggtgaacactgccgccgtgcgcttctcgtcgcccacatatcccaaggcgagcgacacgccgcgcacgaggatctcccctgtcgcgcccggctcggtcaccaatgagccatcctcgccgacgagcagcacctggcggttcgggaaggcaatcccgaggggaatgccctcgtcataggcgcgatcgcggtcgatgatgtggtagaggcagttgcaggtgacctcggtgggaccgtagaggttcacgaagacggcctcgggcaggtggtccatccacgtgcgcaaatggtcgacgggcataacctcgccgctgaacatgacccggcgcaccgatgagagcgtctgtccctcgagtccgtgcagacttgtgatgaggcaaagcgccgccaccgcccaggtcatgatcgtgacttgcttctcttccaaataggaaaccagcgcagcaggctgagagaacagcgcgcgcggcaccaccaccagcgtgcaaccgcaggcaagggcgccgtagatgtccttcaccgacacatcgaaatcgaagggagcctggttggccacgcgatcggtttcctcgaagtcgaacaggcgcacgaagtcgtcgatgaaatcgatgatcgcgcgatggctgacggcaacgcctttgggtgtgccggtagagccagaggtgaacagcacgtacgcgggatcggaatcgataacacccgcgcgggcgcacgcaagcagcgcctcgtccaccgggtggctgagaaggtcatctgcgagaagaacctccgacaacccggtgctttcgccgaccttctcggccgcatcgagcgtgagttcatcggcaacaacgagcggatcctgcaagaccccgacgatgcgcgccaatcgctcagcaggcacctgcggatccacggggacgtaaaagccgcccgcgcacagcgcgccgaacatgacgctgagcgcatcgatgcccttttccatataaacgaccaccgcccggtgacgcgcgcctaactccgccaacgcgcttcccaccttgcgggcccgtaggtacagttgtccataggtgcagctccctccctcgtcgatcaccgcgcaacgcccagaatgtcgcgccgcatcgtcttcaaggtaggagagcacacttcttcgcaaagccatgtgcgtatcccctttgatatcaccagcctcagccactctagcacgttctgcgtaactgagaagatttcttcataaacgattttcttaagtttctgcaaagtgtttgcagaaggcccgcattctctctgttttcacgtggaacatggcacattcccactcggcgaacggcacgcgctataatgcgggcagcatccgccgatgcggaatccaccgacccgaagaaaggggcttccatgcgcaggaaagaccgcgagcagagcgaggagttcggttggaacgtgcttgagacgtgcccctacgccgtgctttcaaccaccgatgacgaagggctgccctacggcattcccgtgtcccccgccgtgctcgatggcgtcatctacttccattccgccaagcacggcacgaaatcgaagcttttacgcaagcaccctgatgtgtgcctcgtcggcgtgcgcgatgtggtgccgctgcccgaggcgtactccaccgagtacgccagcgccgtggtgcacggcgccgtcgccgaggtgaccgacgatgccgagcgcattgccgccctgcgggccatcgccgagcgctacgccgccgagaacctcggacatttcgaggccgccctggctgaggagctttcacgcacgctcgtgtggaagatcaccccgaccgagataaccgcgaaggcccggctgcacgagtaggccctgcgcgcccttccgtaggggctgaccttggtcagccctcatcaggagagacgagcgagcttgaggagggacgaccaaggtcgccccctacggactattcctgcgatcaagggcactccccctatgggaacaaacaagaagatacggcgtgggttgcggtttgactcaggcggggtatgatggaaccggcgcgcgaaaaaagcggcgcgccatcgtgcaatcagaggaggaaaccgtgcaaatcatcgaagacaaggtgtacgcgttctcaaaggacaacccgccgtgctacaccgcccagccgggcgaggtgctgcagttcaacacgctcgattgcttctcgggccgcctgaccgacgagacggtcaccatgaaggacatggacttctcctacaacatcaccaaccccgccgccggcccagtgtacgtggaaggcgccgaggtgggcgacgtggtcgtcgtggacatctacgacatccaggtggccgatgagggcaccatcgccactgacgaccattgcgggcctctgttcgagggcaccgactaccgcacgaagaagatcaagatcgagggaggcatggccgacttcaacggcgtgcgcttccccatcaaccccatgatcggcgtcatcggcaccgcgcccgctgagggagcccccgccgacggcttcgtgggcaactacggcggcaacatggacaacaagctcatcaccaagggtacgcgcctgtactttcccgtgcgcgtccccggcgcgcttttgcagatgggcgacgtgcacgccaccatgggcgatgcagagctgtgtggcacgggcatcgagatcgccgcgcaaatcacggtgcgcgtgaacgtgctgaagaacttcgagctgaactggccgatactggagaccttcggcccggcgggcaagtggtacgtgaacgccagtgcccaggagtacaacgaggcgctcgtgtgcgcatcgaaggagatgcagcgcctgctcatgaacatcaccggctgggatgccgtggaaacctacatgtacatgtcggtgcagtccgacgtggagatcagccagggctgcaagccctgcgaggtgcaactgtccctgcgcatcggcaccccgaagctgaccgagttcccgccgctggtggggtaggcgttcccctgcccgcgccgcagcggcgccgcggtgccatcaccgccgtcgccgctctgctcgagaagccgccttcccaggcggcttctttttggtctccataccttctcccttggcggaatacgggccgcttacgcttcataatgctgtgcaaaatggtaaactatggccgcgcaaaagcgcaggaaaggggaatcgcccgacccgtgttgggagggatcacgggccgcacgattcacgaggagaagacttggaagggatagagaggagacgtctatgtcacaacccatccaagagccgactatcggcctcggcgaggacattgaggcgttcggctacaagcaggagctgaggcgcggccttcagcttcacgacgtcgttctgtacggcgttttgttcatggtgctcatcgcaccgcagtccatctggggatcgctgcaggttgattccggtggcctgaccccgctcgtgtacatcatcggattcgttgccatcagcttcacagccctgagctacgccgcgatgtccagcaagttccccatcgcgggctcggtgtactcctacgtgcagcgcgccatcaacccgcatgtgggcttcatgtccggttggctcatcttgctggactacatcctggtgccctcgcttctgctggtcatggtcgccaactggggaaccaccctcgtgcccggctcgccttggtggctttgggtggtcgtgttcatcgctttcaacacgtttgtgaacgtgcgcggcatcaccatgtcgaagggcgttgactggatcatcttcgccgtggagatcctggcgctcatcgtgttcatcgctgtgggctgcatgtatgtctccggcggcggcggctacggcgagttctccaccgagccgttctacaagcccggagaggtcgacctccactttgtggccacggccgtatccctggcctgcctgtcgttcctcggtttcgacggcatgtccaccctggccgaggaaacctataagcccgagaagaacatcggcaagggcatcctcatcgcgctgtgcatcatgatcgtcgtgttcgtggctcagacttatgtggccgcgctcattcttcccgactgggcgaacaccgatcccgacatgggcttcttcgacgcctgctacgctgccggcggtctgctgctgcagaacttcatgctggtcatcaacatcgtcgccatcggcatcgccaacatcatgaacgcccagatcgcctcttcgcgtctgctgttctccatgggccgcgacggtgtgctgccccgcgtgctcggcaaggtgcatcccaagtaccagaccccctgggtggccgctatcttcctgggcgcgttctcgctggtcctcactctgaccgccggccagttcggcggcatgacggtgctcgcccccatggtcaacttcggcgcgctggcctccttcatcgttttgaacttcggcgtgttctggtacttctggtgcaaggagaagcagcgcggcggaaaggccgttctgcgctacctcatctgtccctggattggcattcttatcctgatctacgtgttcaccggcttcgatctactcacctacggcgtgggcgtcagctggttcatcgtgggcctcatcattgccgcggtcatttccaagggcttcaaggaagtgcccgacgcctttaagaacctggaagtgtaggcggcgttctgcagatccagcaactttgcctgccgtagcgcacggcatctttcgagcccccggccatgtcgggggctcttcttgtatactagactcagcctcgaaactcccatctatttccgatgagctgaccaggggattcgttacattttcccaggtcaaataagtaaatagaaatcggaaatagatgggagtttcgagggacgaacaagaaatagatgggagttttgagagaactcaatacctctggacgcgcgaaatgatggaatcagtttgctggtccttgcagaaaggaaaggggaggattcccatgaagatcggtttcatcggattaggaaacatggccacggccattatcggaggcctgctgcgcgaggacacagcgctcagcagcgaagacggcaacgcgactgtgatcaccgccgccaacatcatcggctcggctaaaaccgaggccacgcggcagaagcgcgccgagcaattcggcatcgccgtcaccgccagcaaccgcgaagttgccgaagcggccgatgtgctggtgctcgctgtgaagccccagttctttcctgaagtgatcgccgagatccgcgacgcagtgagcgaaaacaccctggttatctccattgccgccggtctcacactcgagcgcatcgcgggccttttcgaccgcaacgttaccgccatgcggctcattcgctgcatgccgaacaccccggccctcgtgaacgccgggtgcaccgccgtcgtaccggggcccggcgcaacggaagccgacgaagcgctctgcctacggctcatggaaagcttcggccgggccatcgtcattcccgaacggctgatggatgccgcaagcgccacggccggctcctcccccgccttcgtcttcatgttcatcgaggccctggccgatggcgccgtggccgccgggatgccccgcgcgcaagcgtacgaattcgccgcggcggccgtcgccggatcggcccaactcgtgctggaaaccgggcgtcatccgggcgacctgaaggatatggtctgctctccgggcggcaccaccatcgagggcgtgcgggccttggaagaaggcgctttccgcgcatcggtcatgaatgccatctcagcctgcgtggaaaaggcgaaagccctctagccaccgttcaagccgtgcagactgcgtggaattgcgtagcaacccaggaacagttcggctgtgcagggttcgcgcccgcttttccttgccttattatgaagggccaatcgcgttacggaagggctctcccgaagcagagcaaggcgccctttcgaaatgcttctttgctcctcgttgaaaggttttgccatgaggaaacatattcgcacctcccttaccctgcttatagtggccctcgccgccgcaagctttatgctcgttctgcccggctgcgccggcggctccaacgactcgcctggcaaacccgatgccgtgggcaatcgctctgctgacggagcaagcgaggcggcccagggcgacgtcgtcagcacggccatggttgcctacgccaacggcgatcaggtgcttttcgtcgaccaggagacgcagactccctacattcctacggaaattgatgatgcgaccatcatcgtcgacgggcagcagactgacgaagaggccttggtggcgggtaatatcgtgcaggtcacgggcaacggcatcatgctggaaagctacccggggcagtatcctggcatcactaaagtcgaagtcatagaaaccggcagccccgccgacgccgagcagtacgccgacatcgtggacaccgtgttcgcggcgcccgaccaaagccaagtgcccgtcggcagcctcagttacaagacggatcaggccgacacctccgtcgttttgaatccctacgaattcgattggcagtggcaaacggaagacggccaaaccagcacgtcccaggttgacggctccgccgctgacggaaacggaaccctgaacgaaacgatcgtcgatgcgcgcatccctaacgctgtcgatgcattcgtcgctttctcagtgaatcccacgtcatcggaaatcgagcgtcggcccctggtgaagggcgaaaccgccaagattgatccgcagagcgatggcgaggacgtaccgtgcaccttgggcgacgacggcaccgcagccctgcgcattgagccgaactacctctacgaggtgaaggcgacgttcccccagggcgaggccgagtacgcgttctacaccatagactaactcgtcccgttcaaatgacgacggcccggctgaattccccaaacagggagacagccgggccgtcgtcgtgctcaccgagaaaccggcgttagtcgagacgccgtaaggccgcttggctcttgccgccgcgtttagctacgtagagggcctcatcagctacctgatataagtcatcgaaggtgacggaggtgcgcgtacagaccacagcgccgatcgagatagaaggctgcaagtcttcgggcatgtcagccggacgcggattgcgcgcataaatgccaccggagagctgggcgagcacgcgctccaacgccggccctggcacgaggcctgcagcgaacacggcaaactcgtcaccgccgaggcgagccacgacatcgtccttgcgcatgttgcgcccgaggaacgcggcaatctctttcagcacgcggtcgccctccggatggccgaagccatcgttcacttgcttgaagttgtccacatccacgaggaagaggctgcaaccgtgcgagcaatcctcgctggccagggccttctcgatgcgcgccatagccgcctcgcggttgaaaacgcccgtgagcccatccagctcggccttcttccgcagcgtggcctcgcgcataaccatatcgtgggtgtccagaagacgacccacatggcgaacgggacaaccgacgccgttgaacagcacgaaagactggtagcggcaccagatggggtcgccctccgcattgggcagcgaggtttccatatcgatgaagtcgccttgcgcaacgatgtcgcggatgcgctcgatgtcgtgcacctccagatcgatagagcattctttgtcgcaacgcttctgcaaaatgaggtcgtccgactgcggctcgcggttgaaccgcgcctcgaaatcgccgaagatctcgccggtctgtgcctggcagtcgatatcgaaaatgacgtcgcgcgagagcaccgtgagcatttccacccgctcttcagcccgttccagtttgcgctgatagctcatcttctcggtgatgtcgatgatggtgacgtagaaccaggcctgaccctcgtcgtccaccacgtagcggccgcggtcatccacccacacctcagcgccgtcgggacggttcagccggtaggtgactgcgtcagtgttgccacacttgatttgagaggttatctcctcggtgacccgctgacgatcgttcgggtgcaccatgccgatgaagctgttgcccgtaatggagcagaactcttcgtaggtggcgcagccgagcagctccagcacgtcgcggcttacgtagtcgatcgtgccgccctcgtcatcggcgcgatagcgaaacaggcctccgggaatgcggtcgaggaactcctgggatacctcatcttcaatcgtgcacccgtcatgagaaccgagcttgccctcggtcacccgatgaaagaccgtcataaccagccccttacgtacctcttaccaatgggaagccgccagccgcgaccccccacgtctcattgctcccccacgatcataccaccgctagcgcatccggaaaccccttgctgcaacaactcctccctcatatgtaattgtttgctgcgagaaggggagccaacggcgcacgctatcgccagcccgcagcgagcatcactgcttcgagaagcgctgctatactgacgacgcagtattgacggggtaccccttacgcgtacccctttcgataggagaaccttatgcgctatctcatcgcctccgacatccacggcgcgctaccggcagccgaagcgcttacgactcgctttcacgaagaaggcgccgaccgactgctgctgcttggcgacctgctgtaccacgggccgcgcaatcccctgcccgaaggctacgcaccggctgaggtggcgaagctgctgaacggatacgccgaccgcattacagccgtgcgtggcaactgcgatgccgaggtggatcagatggtgctggactttccctgcctgggcgattacgcgctggtggtggacgcagacactacgctgatgctcacccatgggcatctggatttgtcgcgggttgtcgcagggcttcccgcagggtcgttcgtgctctcgggccacacccacgtgaagggcatcgggccggaagtggcacccgcattcgtgaaggacgccggggccgcagaatccggcagcaaagaaggagcagccgaagcctgccccgcgctgtccgcacagccctcagtcaccttcgtcaaccccggcagtatcggccaccccaaagacggttccgccagctacgccgtctgggacaatggcaccgtggagctgcgcccgctctttggttgagaagggctgaccaaggtcagcccctacaagcagaacaggccatggaaccaacgcaacgccaaggcaatttgcctacgccatccatcgacctcgggagaatctcagaatcctgagattcatcttggagaagacgcgtagcgcaagctcttccccttgcgcacaacacgcaggtcgtccttttcaccaattaagaaatttcgtaataggcaacgctctgatctaaatggagcagatccatttagatcagcagtcgtgacctgttcttggccaacctcaagattatttcgaagtagcgaaccttatcaacatcggtttgccgcgcatgctttttaaccttgtgccccctcttgtagaccttgcgacccaacatataagagtgatttccgccgctaatgacgatcgctggcttgtgtatcgaaaggatgcagaaaaaactacctcttggactccttcgcttcttgcatgagccagcatagaccagcagctaaaacaaccggcatgactgaactttgatcttctaaccttatcttccactccctccggttcaaggtggtcggagggggacgtgactgccagcatgccttcacaggctattggctttccggagcgaaccccgttctcttttcctgctcgatggggctagagccccaagcgttcacaggctagccccgcatgccctgcggttgtctcgacatcataatgcgcacggcttcttgccgtatattctccgctgcgtttttatctcgatcatgaaaggcgccgcaattgggacaagtccaagatctatctcctaagcgaatctcctgattcactatcccacactgcgagcagcgtttcgtggatgggtaagagcgcccgactttagtaactgtccctccttgctcttctgctttgtaagttagacaatggacaaacaatgaccagccgttgtcgaaaaccgccgacccaaagtgaagcacgcgcgacatcgcaaccatattgatgtcttcaattccaatgacatcgaagcgattggttatctcccttgatgccttatgtatgtaatcgcgccgctggtcggcgatttttcgatagatgcgggccaccttcttttgttgccgtcgataattggccgaacctcgacgcttacgcgacagtgatttttgagcccgagccaatcgttcttggttctttttcattgggcgaggatgagtggcggggaaagacgtgctcacaaagaaagaaggcatagaataatcgagaccgatcgatgcagtactttcaattgcccctagcctatctgtattctgtttagtttttaagggatcaatctccaccaacacccccgcataataatctccgcacctatcttgagagacggtcacgctcttgatgtgtgctcctagcggcaatgccctatggatctttgcccttacctttcccatcttcggaagcttaatccagttgcggccaatctcaatgttgttcttgatgaggttagtcgtgtaccttcgcgagctacgcttccgggttttatgcctcggcagcccttttcttggttgctgaaaatacgaccggaaggcttcttctaaatgcagctgaacatttatgagagccattgagtcaacttctttcaagtagggatagtcctttttatactgcgccggcgtctgacgactcatctttcgtccagcccgatattcttgaagcttgtcatcgagcatcaagttccagatctttcggcagcacccaaacgtcttcgcgatgagaagcgcttgctgagcagtgggataaatgcggtatttgaaagaacgattcaaatcgatacacccctactcaactagaaatttagaacatttgtattatatcagatctctcttcgggaaggaaccaaaatatgagtcccgtaatgcaaaaaggccagaaacctgatggtttctggccttttatttcgatggtggtcggagggggactcgaaccctcggcacgcggattttcagtccgctgctctaccaactgagctacccgaccggatacgcggaaacggtttccgtttcgacgcgagcatatattctagcgggtatgccgcccagatgcaagaacttttttgtctgagcctgagccaaggggacggttctcccggttctcctgacttacgcgacgaaggcgacgagggtgccgagggcgatgaaaggggcgaagggcatagtgccggcgaggagagaatcgcgatcctgctcggcggaaacctcccggatcgccccacttaggaaaggctcgccggcggaagtcgttgcagcgcccgtgttgcaatcgcggcgccctcgccccatcactcggcgaccgagctcacggccgagcacgtaggcgacactgagtacgcatgccgtcaacaggcaaacgattcctcgctccagcccgagaaacagcccgagcacggccataagcttaatgtcgccgccaccaaaagcctccttgcgccggacaagctcgtataccgtcgtcagaacaagcaagcctccaccgagcaccacggcacctaggatgccgtttgcaaacgagatgccgccaatttccaagcccgggggtaccagcacatcgggcgcaggcccaaggaactcggcgcgaaagcccaagcccatatgtgctcccgcaaacccgagcactacgcgccaagccacccacagaagccccagtgcgccggccagcacattgggcacgcgccgcgaccgcacatcgataatggacacgacggccaaaagccccagcacgagggcgtacgtgacgagcgttatgacggaaacatacgtcattaacaaccttttccgtcgccgaagataagctcgcgctcctctccggtgagcgccgcgcgagcctgatcgcgcaggttgttcacgccgatgaagaactggcgcatcatgaccaccaccaggtagcggcccttcggcgtcagcgtcagctcgtcggcgttgtcggtggcgaaagccccacacgcgcgcatgaagcccatttccacaggcagaccacgttccaccgacataccaaaatcgcgctcgaactggcgcttatcaagacgcagaccgaacagctgcatcatgaagcggtagcgcatgcggtcgcgcagcgagaacgtagtcttgcccatcatggacatatgccccgcctcgatggccgtgttgtactcgcgcaccgagaacgtgttcacgtacaaattctcgcccaggtaggtgatgccaccactgccgatggccgggtactcctcgtaatcgaccacgtactcgtcaatcatggcgccctcgccagccgcaccggtgccgcggcggttgaacgtccaggcgctgcccaactcgaacaggcccggctgcccgccaggcaaatctcccagcagcagatcgcagatgatctcgtagaagcggcgctcgcggttgtagtcaaccttgcccaccgtggcagcgagcgagcgctgcaccgacggcgaggccatcagcggatagaatgtcgtctggctcgcgccggaagccaccaccatctcaatgtcgtgaatgagcgtgtcctcggtttgcgccgggaagttgaagatcatgtccgcgttcatcgaggtgaagtacgggctcgcctcctgaatgcgctcgagaatctcctgaccgctgccgtacttctcgtagcgatccatctggcgcagcaggtcatcgtcgaaggactgcactcccacagaaaggcgctgcacgcgtcctttcaacttctccaaatactcgtgggtgaggtgattcggattcgtctcgctagaaacttccttgatcgagaacagatcgcgagccatatcgatggtttcgcacagctcgtcgatcatgatggtgggcgtgccgccgccgatgtagacggaatcgaagtcgtagccgagatccttcagcatgcgcatctcgcgacgcatgttctggaagtagggcttcgcgcgatcctcgcggaaggggaagcgattgaaggagcagtaggggcacagacgctcgcagaacggcacatgcatgtacagcatgtaaggctgacccgggttgggagagggcatgaacgcctcgtcgcagggcttaagctgcaggtagttggccgtgcacgcctccaccaccttagaaagcattcgttctgaaagcatatcgtgcgttccttctttcttggctggttgcctcggttgagaagggcggatcaaggtccgcccctacggaatctatcccatgcgctgaacctctaggcagcggctactgatcccaggcgctgcggccctgcaaagctttcttgccgatatcgtgacggaacatcttgccttcgaagttgatgagatcgcaggcctcgtaggcacgctcgcgagcctcttcgaagctgtcgcccttggccaccacgttcagcacgcggccgccgttggtgagcagctcgccgtcgtagttgcggcgggtacccgcgtggaagaccgtcacgccgggcagctcctcggcctcttcaatacccagaatgaccttgcccttctcgtaagcgcccgggtacccctcactggcaagcaccacggaaacagcccagtcgtcggaccactccagctgcacgtcctcgggacgtccctcggccacggcgagcatgacctcaaccagatcgctttccaagcggggcagcacaacctgcgtctcggggtcgccgaagcgcacgttgaactccacgatcttcgggccttcgggagtcagcatgaagccgccgtacagcgtgccgcggtagtcgctggtaaagggagcgacggccgtagcggcggccgttttctccatgatggccaccatggcggccatttcctcgtcggtgacgatgggcaccggcgagtacacgcccatgccgccggtattggggcccaagtcgccatcgtaggcgcgcttgtggtcttgcgccggagccatggggaacgactgcccggccgtgacgaagcacagaagcgagcactcggggcccgtcatgcactcctcgataaccaccgtggagccggcatcgccgaaggcgccgtcgaagcaggcgcgcacggcagcctcggcatcttccacagtttcggccaccacaacgcccttgcccgccgccagaccgtcggccttgatgacgatgggagcgccctgctcgcgcacgtaggcaagcgcggcggcctcgtcgtcgaagcgcccgtaggcggccgtgggaatgtcgttggcttccatgaacgccttcgaataggccttggagccttccagctgagcaccgtcggcgttgggcccgaataccgggacaccgtcggcgcgtagcagatcggccacgccatcgaccagcggcgcctcggggccgatgaccacaagcccgatgttgcactcatgcacgaagctcagcagcgcctcgccgtcggcgatatccaggtcgacgttctcggcgatttccgccgtgccgccgttgcccggcgccacgtacagcacgtcggtgttcggagacttctgcagcgcccacgcgatggcatgttcacgcccacccgaaccgatcagcagaatgttcacattcgttcctttcagtaatttcttctaagaaatcacaggtcgttcgtaacgtcagtgctacttttctcgga

SEQ ID NO: 10514 - DNA, 15430 bp, Unknown
  gut microbiota DNA sequence
tccatggccgagacgctgcgcccgcggcgcgtgcccgaggaccgcatcctcatcaccggcatccccgccagccccgccttctcgcgaacctacgaccgcactaaggcccgcgaggccttcggactgccgcaggacaaacaggtggtgctggcgctcgccggcgcgaagctcccccagccctatgtgcacttccgtgccgccatcggggagatgctccccttcatgcacgcgatgccctcgatgcagctggtgatcgtcgccggggccgacgaggactacgagcgcgagctgcggcgccaggtggccgaatacggcctggccaacgtcacggtgctcggctacgtgaacgccatggccgagcttatggaggccgccgacgtggtcatctgcaagccgggaggcctcacggtgactgagtgtttatgcgcccatgcacccatgatcctcttgggccgcgcctacggccaggagaaggccaacgtgcgcatgctcaccgccgccggcgccgccatggccgccaccacgcctcgcgagctcttggacaccctgcgccacatcagcgaccactccgcgagcgcccacgccatgctgatgaacgcctccatcctgcggcgccccaacgccgccgaggacatcgcccgggccaccttcgccctcatccggcgcgagccgccgcgggacgcgaagctgcgggccaagcacttcctgcacttctactggggcaagaagccggcccacgtccgctaggacccccaaccgctaccgtcacgatccgaaccacgaaagagagtttcatgaccacctttgccgaactcggcctttccgacgccgtccttgccgccgtcgatcatctcggctacaccgagccgacccccgttcaagcccaggccatcccgctcgtcctccaaggccgcgatatcatcgccgccgccaagaccggcacgggcaaaacggccgccttctcgctgccgagcctggacatcctcgcccgcgccgagcgcaagaaggcaccggccatgctcgtcatcacccccacgcgagagctggccatgcagattcaggaagtctgccaaaccatcgcccgcacccgcggcctacgcgtcgccaatgtggtgggcggcgtgaaaatcgagccgcagatcgaccgcctcgcgcgcggcgtggacgtgctcatcgccacgccggggcgcctcatcgacctcatgaaccagaaggccgtcgacctctcgcaggttcaagtgctcgtgctggacgaggccgaccgcatgctcgacatgggatttctcccctcggttcgccgtatcgtggaggcgacgccgaaaagccgccagacgcttctgttctcggccaccatcgacaagggcgtcctcgaccaggtggacgccatgctgaatgatccggccattgtgcagatcgccgcgaagggcgagacggccgacaccgtggagcagtacatcgcgcacgtgccccacaccctgaagcccgaccttctggcggcgctcctgaaagagcgggggcacaagcgcgtcatcgtcttcgcccgcacgcgccatcgggccgacgccgcctgccgcaagctgaagcgggccggctaccacgccgaggccatccattccgaccgctcccagaaccagcgcaagcgcgccctggacaacttcgcctccggcgagaccgacatcctcgtggccaccgacgtgctggcccgcggcatcgacgtcgacgaggtgtcctacgtggtgaactacgacgtgcccacccaggccgaggactacgtgcaccgcatcggccgcacgggccgcgccggagccgagggcttcgcgatcaccttcgtcagccccgagaacaaagacgagctggcggccatcgagaagctcatcaagcgcgacatccccgagatcgagatcgcgggcttcaacttggaagaggccgccgaggccgcggccgagcgcgccacgcgggccaacgcccgccgcgaccccgagctggcagcggccgcccgcgagctcgccaagaaggagaagcgccgcgccaaggagaaggagcgcgccgagcaggctgccgccgagtcgcgccagcgcggcacgcgcaagaagcagggcggcaagagcgccggtgccgcgcacaatgcgaagaagggggcgccgaagccgaagagcaccgctaagggcagctctggacgtccgaagaagagcgcgggctcccctaccggcccctctcgtcccgccggcgacttccgccccggccgcgcccaccgcgccgccgtcgccgccaagcgcagcggcggcaagcgccgcggctagcaaagcgatcgaagcacctcagcgggaagataccctccgtttgccgtactccacatctgggaagggattgttcgggtatcttatcggaagtatttctggggaagggaatattgcatgaagatcgctgtcgcttgcgacggacttgatatagccgtgactgctgcaacctgctcgagctttgcctgctacaccgcgcaaagcggcgtcgtcacaggctgcagcaacgtgccgaacatggggatcaccccacgagagagggcctccatcctgcagcagatgggcgtcgatgccctcatagcccgccaattcagccccgaaggcctcgcggctttggacgaagcgggcatcgaggccgtcctctccaacgccgcctccccgcgcgaggcggcggatctgtatctttaccgcacgctcatgggggaagagggcctatcggaaaagagcatcaaagaggagcccttaggcgagctggacgacgccttcgcccgcatcgagctcaagctcgtcgcccaaagcgcctagccccgctcgcactcccccaacgaaaaaggaccccgaagggtccttttcttatgcgctctttcgaacgaaacaaactaggcaacggccttcttggcgacttccaccagggcggcgaaggcgttcggatcgttcacggccatgtcggcgagcaccttgcggtcgagcacgacgccggccttcttcaggccgttcatgaacaccgagtaggacaggccgttgatgcgggccgcggcgttgatgcgggtgatccacagacgacggatctcgcgcttcttgttgcggcggtcgcggtacatgtactgaagcgaatgctgcacctgctccttcgcggcgcggtaggaacgggacttcgcgccgtagtagcccttcgcacgattgaggacggtacgacgcttcttgcgggcatggacggaacgctttacacgaggcatatcttaatcactccttgaagacgaatgggactagcgaaggccgagctggcgctcgacgaccttggtatccgccttggcgacctcggtctcgtggcggaagttgcgcttgcgcttggggctcttcttggtgaggatatggctcttgaacgccttggcgcgcatgagtttgccggtaccggtcttgcggacgcgcttggccataccgcgatgggtcttcatcttgggcattagttgtcctttccttcgtcgttcttggaatcctttttctttttcgcagtcgcgggcagaggcgcaatgagcatgtgcatgttgcgcccctccatcttcggctggttctcgatgacggcaacgtccttcaggtcgtcggccaatcgctcgagaatggagaggccctgctcgggatgggccatctcgcggccgcggaacatgatggtgatcttcaccttgttgccggcctccaaaaagcgcagcacgtgcttcttcttggtggtgtagtcgcccacgtcgatcttcggccggaacttcatctccttgacctcgatcttgttctggttcttacgagcctgcttggccttgatggcctggtcgtacttgaacttcccgtagtccatgatgcggcacacgggcggcgtggcgttcggagcgatctccaccagatcgagattcatgtcgtcagcgatctgctgggcctggtgcgtgggatacacgcccatctggttcccgtcgaaatcgatgagacggcactcgcgcgtggtgatctcatcgttgagccggggctcttgagcagctatcgcgctcacctccctttcgtgttctcacacataaaaacccgccgggccaacgaggcgcacggcgggcttacacgcaaagtttctatctgcgggtacccatcagcaacctcggaaggcgccgaaccaggtggagagcttccgccctcgcttgattgacagcttgcctagtatagcgttgccgtcgctcccacgcaagggaaattctaggagtttacatatatgaagatggtccggacggtgtcggccagattgtcggaggcgttggccatggagtagtcgtaggagagcaccgccgaccaggcatggggcgcgccgtcgatgtccacctcgccgttgaaggagcagtactccttagtggtcgtagttccgtcagtatcataggaggtgtattcttccgcgttttccggcaaaacgactgcgtcatcaggaatagagaggcctgcctcagccaaggttttttcgataatgcgttctttgagaaccgcatctttaaagctaacggagccgtagccgagcgagctggtggacgtggaatagccggcttggatgatcttgccgtcggcatcgagccccagatacaccgtgggcgtgcccgtgcggctgtccgccggctcggcggtgagcgcgacgcgcacctcgctcttgatggggttgccctcctcgttcaccgcccggggctcggcaggggtggcgccgtgctgcagcttgtccacggcctcctgctgggtcaggcccaagaggctcaccaggtcgggcaccgtcgtcaccttggcggcatcggcggagtccgtcgcgtcctcggaggcgatggcagcgacctcctgctccgaggagagcgcctgctgcaccgcactggaggaggcctccttgtacagctgaacgccgaagtagaccatggcggccagaatgagcacgagcaggatgatgaccacgataagaatgcggcgcatacggcgcgacttgcgcatgtactcgggcagctccgccttctttcgggccttctcgttcatctcgctcgcgtgcttggcatgacgcccgcgcgaggcgccgtcggccttcttcgcgccatgggcggccttgctcgcaggcttggttggcgccgcatcggccgtcaccacgccgaggggcacggcgtcgggcacgggcgatgcgtccgcggcatcggcgccgtcggcatccagcggacgaccggcgtagaagtcctcgaagaccgcctcatcgggaaacgactcgccggcgggcaggccctcgtcgtcgagcgcttccccatcgcccaagtccacctcttcgaagacgccctcctcgtcgacgacgacatcctccccgatgatggagccgtcgccctcgcccatggggggcatggccgtggtgaagccgtccgccgatacggggtggaaggcctccgtcaggcccatggcgttgccgtcgtcggcgctgacatcgcggttgcgcttgcttcttctcaccatgtgctcgctgttcctctcgcttctcgaaggcccacggggctagtgggccagcagataccaggccgcaaaggcgatgacgcccagcacagccacgacgatgatggccttctgggtcgtggacatccgagtcgattccaagtcatcgagggtcgtctcgcgaaaggaggcggcgtcggccttctcgcgggccgtcggggccgtcggtgtcgtcgcagacgccgaggctgcctcggaggacgccggaacctcggcattgtgcccagacgccgacgagacgtcttcgggggcagactccggatcctcttctctcgcgtcgtcgacctcggctgcaggcgcctcttcaacgaccgcctcttccacggcgccggcctgaatgaccacatcgtcctcatcggccgtgaccgtgatatgggagaactcctggggattcgccatggaagcttgcatcctttctgctttgggtcgccccattatagccgatgagggccgtcccgcgccgctgctgcaccagttctgcatccgggcggggcgaaggcggcgcccccgccccattccaagatgcgcccgagccgtgggcgctcggcgcgcctaggctagaagatcgacgacgttgaagtcctcgccgctggcgcggatgacctcgccgttgccgaaggcgcacacgcatcccgcgccggcgatggcgtccaccgacggggcgagggcgcgcacgtcctccgtgcgggccgcgcgcacctcctcgcgcacccgggcccggtccgccaaggtggctccggagaagtacaggccgtcctggcggcgcagaagctcgcgagccttggccggcgcgtccagcgaggccaccgtggagaccacgtagccgtccatctcggattccgtggggctaaagacgccagcgagccagtcgccggcagtgcggaagcgctcgacggtctcgtcgttgcgcggatcgcggtaggagtagaagcggctcgaccccgaccgcgtcgtctggaagccggccccgtaggcgccccccttcacgcgcacctccgtccacagaaaatcgtaggacagaatgcgcgaggccaaaagccacgtaccgccatagggctcgccgagcagacggcggtcccagccgcaggcggtgtaggtgacgtcgctcgccacgacgaaggcctcgtgcttgtcctcgggggccggcaccgtgagcaccggggcggccaccgtgccgccgaagggcgccgaggcttcccgataggcgtccagagcctccccgctgccgccgaaggagagcgtgcagccgccgtcggtgaacaggcgcgccgccaggtcggccagcttcgcggtaagctcgccggcccgctcgtcgaagtgcgcgagcagctccttcaaaaagcggtagaagccgacgccggagagcgcctcgcgcacgacgccggccggcaggtagtaggaggcgacccgcgccatggcggcgctgtggccggccgaggcgaaagcctgctccatggcgatgcgccgctggcccaggatgtcgcggatgcgctcggtatcggcgaagtcggtctcgcgcagcacctcctcggccagacgggccgcccagggaacttcctcgtcgagggcagaggatcccatgacgaacatcggacggatccgctcgcgatcctcggcatcctcgtgcacttccacggcgaacccgaggttgcccagatgggcctggatcagggtatccagctcggccgccgtatgacgggccgtgtccagcttgccgagcacgcaggccagcaccgtggcgtagggcagctcgtcgaaggcgaggccgtccatggcgaagtagcggtaggcgtaggcgataccgcggcagggcagatgatggcggataaggcgccagggcccgcactcccccacctcccacatcgcctcggcgggcgcctcgccgatatcggcccgcgaaagctgcggaagcttctccagggcctccggcgcgtccggcgcctcctgggcctcgcgcagcgcgcgcacggcctcgcggatggacgcggcctcgtcttcggtgagctcggcggccgcctcgcgctcggtggccgcctcggcctcctcggcggcctcgtcgctttccgtgggcaccacttcggcgcaggcgcggtggtcgttgtcaaggaacaactcgcgcaaaagcgcctcgaagtacccctcctccaccttctcgcgcaggctggcgaagacgtcctcgaagcgcaggtaggccgccgggtcgtcgtcggcgtacagccatccggccatggcggacatggccagcaccacgccatcggggtagccgaaattgcgctcgcgcatgacgaactcggcatgggagagggccgcccgcaccagctcgcgatcgagccctccctcagcgaggcgccgggcctcggcttccacgatggcgcgcagcttctcggcggcaccgggccgggcgccccgcagggacaccacggcgaagggctgggccacggagtcggccacgtacccgatggcgtcgtcggcgatgcccgcgtcgagcagcgcccgtttcaggggcgactcgttggcccccatgatggcgtccatcaggatgtcggcggccacgatgcgctcgcgctcggcggcacgcccgatgacgaagcccacggcggcgcaggcgttctccggggcggtggccatgggcacgaccaccggcgcaggggccacaggggcctgcagcccgagcgggttgatgtccagcggcccgcgctctttcgcggccaaaggagccaggtaccgctcgtccagaaagccgaggaagcggtcggcgtctaggttgccgtacaggatgatgtaggcgttgtccggacggtagtggcgccgatggttctcgaggaatccctcgtaagtgagcgtcgggatggctgccggcgtgccgccggactcgaagcggtaggtcgtattcgggaacaacgccgccgagagtccgtcgtagagcacggaatcgggttcggagagcgcgcctttcatctcgttgtacaccacgccgttcaccacgaggcgcgcatcttccccctccccttccagctcgcggtgccagccctcctgctggaagatgacaggtcgccggtatatgtcgggatggaagaccgcgtccaggtagacgtccatgaggttgacgagatcctgctcgttggtggacgccaccgggtacatggtcttgtccgggaaggtcatggcgtttaagaacgtctgcatagaggtcttcagcagattgacgaagggctccttcaccgggaacttctccgatccgcacagcaccgagtgctccagaatgtggaacacgccggtgtcgtcggcggccggagtcttgaaggtgatggagaaggccttgttggcgtcgtcgttctcgatgaacatgaggcgggcgccggaggcggcatggcgcatgaggtgcaccacgccctccacctcgctcaccggctcgcttttcacggcggtaaagccgtgggaggcggccacctgttccaaatcggtcatggtctgtcttcctttcgaagggttcctgcgaagggccccgcgaccggctctgacggcccggcgcggagcaacgaaatgttcgtgagtattctacccgtccgcgcgtcgccgtttccaaccaatatggtgtcgttatgatttctccgcgacgggggaattttcgctataatcagccccgaactatctagacgagacgagacagatacggagtatcctatgctcgaacttaagaacctggtgttcgaggtgccggccgacgacgggggcaccaagcgcatcatcgacgacctttccctgaccattcccgacgaccgcttcacggtcatcaccggccccaacggcggcggcaagtccacgctcgccaagctcatcatgggcatcgaggagcccacgagcggccagatcctcttcaacggcgaggacatcacggacaaatccatcaccgagcgcgcccgcctcggcatcggctacggcttccagcagccggcccgcttccgcggcatgaaggtgaagaagctgctcgatatcgccgccggcaagaagctgcccatgctcgcctgcaacgagtacctctcgaaggtgggcctgtgctcggcgagctacctcacccgcgaggtggacaagtcgctgtcgggcggcgaggtgaagcgcatcgagatcgccaccattttagcccgcgacccgaagctggccatctacgacgagcccgaggccggcatcgacctgtggagcttcgaccgcctcaccgagacgttccgcgacatccacgaggcccgcgacgggcgctccatcgtcatcatctcgcaccaggagcgcatcatctcgctggccgacgagatcgtgcttctgcgcgacggccaggtggccgagacgggcacgccggccgagctcatgccgcggctcgggttcgcggcccgcagcctggacgatcacggctgcccgctttccacccccaccgagctgcacctaaccgagatccccactacttgctagaggagctatcatgaccgttgatctttcccccatcgacgagaacctgctcgccgagatcgccaatatgcacggcatgccgaagggcgccttcaacgtgcgcaaggacggcgagctggtcgagcgccattcctcggcctacatcgacatttccaccaagaccgacaaccccggcatcgacatccgcatcgcggacggtaccaagggcgagacggtgtacatccccgtcatcgtgacgaagtcggggctgaaggacgtcgtgtacaacaccttctacgtgggcgagaactgcgacatcactatcatcgccggctgcggcatccacaacgactcccacgacgcctccgagcacgacggcatccacagcttctatctgggcaagaacagccgcgtgcgctacgtggagaagcactacggcgagggcgagggcaccggcgagcgcatcctgaaccccaccaccaacgtgtacatggaggagggctcctcctgcgagatggagatggtgcagctgcgcggcgtgacgagcacggtgcgcgacacgaacgccgagctgggcgcgaacgccaagctcgtgctcaccgagaagctgctcacccacggcagccagaccgccatttccaacatgaaagtggaattgaagggcgagggctcttccgtgcaggtgatctcccgctcggtggcccaggacgactctgtgcaggtgttcaacccgctcgtcatcggtgagtgcgcctgtcgcggacacgtgcagtgcgacgccatcatcatgggcaacgccaaggtgaaggctatccccggcattgaggccgccagcgaggacgccatgctcgtgcacgaggccgccatcggcaagatcgccggcgaccagatcgtgaagctcatgacgctgggcctcaccgaggaagaggccgaagccgagatcctggacgacttcctgagctaggctccagctaaactcgacaagcccgcaaagcaagcggtccgacggaacttgccgtcggaccgcttttgtgttgagaggatgaggcggatcgctactcggtcgcgtcctcttcgccggaactgccggagtcgcctgcatcgccggagtcctcgctgccagagtcgtcgccgctgccggtatcaccggactcatcggagccgtctgacgagtcgccggagccggtgtcttcggaacctgtgtcaccggaatcactggagcccgtgtcgcccgaatcacccgtgtcctcgctatcggaacccgtgacggcgtcggcggcggaggcggtcagatcgctgacgacggtaagatcgcccagggccacggtggtgccgagccacttgcgctcgatgacgttgatggtgccgtcgctcaccaggcgcgcgagcacgtcgccggcggccgtctgcaaatcgacgttctcgttggagacgcccatgcaatagccagtcggcgacatgagcatggcgacgatggacacgtcgagcccctggccatgggccgcgtacaggccgatgacggcgtcggcggccacgtactgcacgcttccggcctcaagtgcctcgaaggcctccttcaggctgtcggtgggcgtgaggctggactcaccgaacccgttggagacggcccaggcgctcttcgaggaaacctgggcggcgaaggtggcgccggaatcctgcgtgggaatgcccgcgtcggggctcagcgcgaacagggcgatgcccgtgggcaggtaggaggccgagcgccagaaatcgccgtcgctcgcggagtcgtcgatgccgagcaccacgtccaccgtgccgttggcgagcgccccggccggatcgctgcccacgtccaccaccgacagcttcagccctagctcgtcggcgagagccgcggcgatgtccacgtcgatgccgatgatcttgccgctgcccatgccggccagaggcgggttctcggtgttgacgcccacgcgcagggtgccctcctcgccgatgaccgggggcgccacctcggcggacttcagctccggctggtaggtgcccgatccagtgcatccggccaggccgaacaggccgaccgcgagcagcgccgcaaaggcaaccgcaacgaacgaacgctttctcacatcatcctccgtctaattcaatcggtacgttgcctctttcgactgacctagtctttgaccccacactcgcgcaccggggcgttcgcttgcgctagtagccctctcgcccgtcgcgacgtccgtgccgcgaaaatgtcagcgggcggtgcgacttacctctaggatacgccatgctcacggcgggcaatgcccacgcgcttacgtggatcctttcgaccgcatctgccatggacttggaaagacgtcgcgcctttccgcaactacagacccgaaagaagcatcgctaagtgtagcagaagtggacttagacggggcaaagccccgcagaacctccgaagtgcgaaagccgtgcggttggcgcggggcgcgggatgggacgcgaacgcggtcggcgcggggagcgaaacgggacattcccgcgtcattgccacggtcgtgcgcgcgtagactgcccccatgaagccgatgaaaggacagatggcgctcttcgatgagcgaaaaccggcgaagagccgtcgggagggcgcggccgcgaaacacgccgctccctcccgccgcctgcgcgcggactggcgcgccgtacgcgatttcgccgccgacatggcgaccgagacgctctaccccacccgctgcgcggtgtgcgataagcccggcgcggtgctgtgcggttcctgcgccgcagcgctcccctacatcgacgcgctgacggcctgcccgcgctgcggcgcgcccttcggcgtcgtgcagtgctcggagtgcacgtccgtgctgatggagcccttcggctacaaggagccgccctacgacgagatggcgagcgccctcgtgcttaccgaggccgtccgccgcatcgtaacggtgtacaaggaccagaacgagcgcggcctggcacggcccatggcccagatcatggcccgctacctgccgccccgctggatgggcgcagcgccggtcgtcaccttcgtgcccgccacggccgccgcccggcgccggcgcggcttcgaccacgccgaacatctggcccgcgagttgtcattcatcgccgggctggacttcgcccctctgctcgtggccgcccgcagccgcgaccagcggaagctggggcggacggggcgcatcgggaacatgaggcattcgctcaccgcgctggccagcgccagcatgcccggcgccgtcatcgtcgtggacgacgtgtgcaccaccggcgccaccctgttcgccgccaccgaggccctgcgcgccgccggcgccaagatcgtctggtgcctcacgttcgcgcgaacctagggcacagcctttcgccccgaggatgcgcgagacgcatcctcggggcggggagctggccgaccccgcccgtttcgctaccttaggcaacgggagaaaggcaggcaaatgaacctttgcgattgggttcgttttgcggcttgcttgctgaacctgatggctcgaatccgcgagtacgcggattcgagccgaaaggcaaggcgggcacgtcatgcaagacggcccaaataacaaacggttcaggggagatttcactggccagtggctcccctcgagcctgccttatattctagcaagcatcgctagaaaatgaaaggagctatttcgaggagagacggacgccctcggcctcggagaactcggcgacgtccaccgagatggaatggcggatgggcttccacgccgcttttttcaccagagcgatgagcgcgataggaatgtaggtgagcatgaagaaggggaaggtaaacatgtagcggatcttcttcgccgtggtggtgcggatggagtcccattccacgaaggtggtgagcacgccgaagacgaacatgaacacgatgtagttgcacaggcagaacacgaccgaggtcaccgagctcgcgatggccacgcccgtggacatgacgcccgtggccgccagcacgatgataatggtgttgaacagaatggagatgatggagagcagcatgcccggagcgatggtcatgagcatgtcgtagcaggcgaagcggtaaccgcgcgggttggtcaacgtgcctttcaccaggccgcccgcataatgggcgaacacctggtagaagcccttggcccagcggaagcgctggttccacgaatcgcggaaggtgatgggctgctcgtcgtagagcaccgccgtcgggcagtaggagatgcgcacgccgtcgatgatggaggcggcggaaaactcgatgtcctcggtgagcaggtgccacttccagccgccggcggccttcaggatgtcggcggcgatgaagaagcccgtgcccgacacggcacaggaggtgttcagcgtgaggcgcgcctggttcaagaacttcgcctcgcgcaggaaccacacgccgtagccagccgagatccagttgctgccgaagttcttggagttgcggtaggaggtggaggccttcgcaccgttatcgaaggtggcgttcatctcgcggaagtagttcacatcgagcacgttgtcggcgtcgaagacgaagaacgcctcatagtcgcgatcggcgtactgctcccaaatggccttcaggccgtaatcgagcgcatagcccttccccaccagcttgtcgttgctgcgggggaacacgatggcgccggcctcgcgggccacgtcggccgtgttgtcggtgcagttgtcggcgatgacgaagatgtcgatgagctcggcgggatagttctgcaccttgatggagtggatgaggtcggcgatgaccgtctcctcgttgcgcgccgccaccaagaccgcatagcggtggttggcgcgcgccaccttcttcggcgcccggcgcgtcagcaccacgagcacgtagaagagctggtaggtatagcaaatagtgaaggtaagaaacacgcagaaattgaagatgtcgacgaaggacaacgccgacacttgcgatgctacggtatcgaacaccttgaggctcctaggacatgacatgcgcccgcacggtcagtggcgtgggcgcggctgcacaaacggctgaaagtatagccctttcgagccaagttggcagcgccagttgggccatgacggccgaaatgggggcaatcgaggccaaagtgttccttttcgccgcatttgcgccacatcccctccatacctgtaagggaagcgtaaggtttggtggaggggcgggaggccgggatcggcggaggggctcgcgctcaagcccgagacgtcagcaggatacgtgcgggaggccgcgggtcggcggaggggctcgcgcgcaggttgcgcagcgactggaacagcccagtgggctgttccaccaagcgagccattgcttgcgcacgtgcccctccgccgac

SEQ ID NO: 10515 - DNA, 28791 bp, Unknown
  gut microbiota DNA sequence
gcccgcgatccccgcaaggcgcagaaaatggctgcactgggcggggctcaaacagtatttcgtgggaacgccgtcctccaaagtctgccacaagaaagattcgctgccgtcgtgccagccggagctttgcccaatgctgggcgtccatgagccgccatgcgagatcgggcgctccccctcgcaccatgccggctcctgcccatcttccagaagcaggcattggaacatcggcggctgtgaacgcggataggacggctctaaaatccatccggtcatttgaagaaaacgctcccatgacgttttcccaaacagcgataactggaaacagtccattggtcgcctccctcatttctcgaatgatgcggatggcatgaaagaacaggctggatttttcccccgcaaggcccgtgcggttgccgatctgtgagagattttgacacggtgagccgaaagtgatgacgtggacgggcgggatcgccccgccgtccagctttgtcacgtcgcccaaatgcgccatgtgggggaagtggcggctggtgatggacaccggcgctttctcgatctcactggcccataccggctcgacgccgcagcgtacagccgccagcgggaacacgccgatcccgtcaaacaggctgcccagccgaagctccgccatcttatttgcggccctgccccttgacggtcaggatgccttcaagggtagtggcggtgatacccagccgctgggccacggcgatgtcgtttttcatggcctcggtgacggtatggccgcagaccaccagcacatgggaacggcgcagcaggttacggctcatgtcgatgccgtctttgtgttcctcgggaatggcgtcgttgaggatcaggggcaggtacagggtcgggcagatgggcgaaaagcccgccttgtagacggtgcggcaatacttcgccgccagttccgcgttttcgcaatcgtcgccgctccatgcggcggtaatatacgcaaggggtcgtttcatgtttagaacctccatattttataaattgtgttcagccctatccccccgccctttcccattcttgggaaagggggtggctctggaggatatatgcccccgccgcgccgccggggttagcacagccgggacaggccgtcaagggctggccgtcgcaaacggcggtgcgatgcacccttgactgcccggcccgcccgtgccggggaatgggcggcgacgggggatatataccagcagagccacgggcaaaagggcgtgaaaaaacctcgggacaatctgtctcgaggtttacttctccagatccgctttcttttcaggcttgcccagctcgggcggctgcttggccttccagtcatccagcagagagatgatctgctctttcatcttggcgggagtgacctccttgccaaaatacttttccagttccgcagtagaaatgatcacgccgcgatcctcctttttcttttcagataagattccgtcgataatgtcgccgttgagcttgcccgcctggtccagttcccgcagccttttcgcctgtgcgtgggagggcgaggactgctcgccgtcaatggagacggcgataagccgctggtttttcggcttgatgtaggagatctccacagcgggcatgaagcccagctttttatcatccaccttgttcagcagctccgggacaagggagttgagccggatataacgcatgacctttttatagttcatgccgttattttctcccacgatctcaacggagcgtttgccgatgtcgccgggggctacattgtccagccgcccgccctggtgcttgatggcctccacttccagatccagcagctttgccagttcgctgggcaggggatcgccgcgctgcttgttgctgtttttcatctcgcggacggcctcaatgtcggtcatgtcccgcacgatacagggcagctcgtccagaccggccagctcactgccgcgatggcggcggtggcccgccacgatctcatagccgctgccgtccttttccgggcggacggtggcgggggtcataacgccatgctccttgatggtgctgaccaaatcggtcatggccgcgttgtcctccaccttgaacgggtggtcccggaaggtatggaacgggtgcagctcggagagcttcagatagatgaccttgccctcctccacagggcgtggcgggggcgtcggcgctgccggagcctgctcctgcgcgggagcagcggcggaaatgcttccgcccttatctgcggtagctttttcgctgccgcttcgggacactttgtctcgaggtttgggcggcgtggccttgtcaggggccgccttgtcagccttgggtgggcggcccctgcggggcgtcgccgccttcgtgtccttgtcctcggacacagccttttccttcgggggacggccccggcggggcttgggctgctcgggttccggcttggttttttcctctttgccgccttcagccgatggttcaggcggcgattcctgttccaccttttcacgggcggcatcgcggcgctccttcaataactcgtcgatcttttcaaaagaaatcaccacgtcgccggggtccggctgggcagggccgtcatgcaccggctgggaaatatcgcccgacaagtccggggcaggggcaccggggacgtcaggcgtactggcctccggtgccgcctgcggctctgactccagagggcgcttttcttctgccatttgctaacctccttaaatttcatcgttttgcacaaagttttctccgaaaattttgctattattttttgaaaattttcgcctccttttcgggccatccacgcaaaaaagccgcccgttttcctcaacggacggctttctgcgtaatgtgatagctctgttttattttcttccggtattgcaggccccggaaagccttgatattacagcgttcctaataagaactaatcataggaatcctttccttccggtcaaccttcgtagggggcgacctcggtcgcccctcatcatcaggaaaaatctctctggttggaaggggcgaccaaggtcgccccctacggatctaatgcactggcgtccacgcaggtggttgcccttacccctgggccacgggggtggcggtggcggcgaagagctcgaggtactggccgttgctgaccgtgaccgtctgctcgccgccgggaatgacgtacttggtgtccacaatggagtcgtcatcgaagtcgaggttcttcatgacgaaggccgccgagtcctcgtcggtctcgccctcgcccaccgtggccgcggtgatggtgtagctgcccgcggggatatcgatgcccacacggtagcagccgttggtatagggcgccgtcgggttagtggaggtggaaggagccgggtacatggtcgcctcgtcgccgggatcgaacacgatgaggtctccttcgtccaggtcaacgaagtagttgccgaagtactgcacggagtcatcgaggctgtagcggccgtcgtccccgtcgaacacgtagtagtgggagagcttctcgttggagccttccaaataatacaggccggcgggaatctgaccctggggtcctacggtgtagaagcccttggcacaaacatcgccctcgcccggctcgcccgccgcgacgccgtcggcctcgaacaccgaggcgatctcgtcgagggtgaagctgccgtagggcgaggcgtcctcgtcggtaccgtagctgtcctcgggagcccacatgtcggtgtcgccgaagtcgtaatcgtaattgtagtcataaccgtcatcgtagctgttgtagctgtcgtagctgctgtcgtagtcggccagggccatgatacccacgcagctggcacagccgcccatgccgatgacgaggcccacggccagtcccaacagaaaccacggccagcggcgcttctgattgggattgggcggctcgtagcccggatagatgttctgcgcgggggccgggggcaccgggggctgattgcccgcgccgtaggtgccatagcctgcggcatcgtagggcgcgtaggtcggctgctgggccgcggcctgggcataaggggcgtagggctgctgagcgggctgtgccgcggcggcgtcgtagtagggctgcgtcggcgccgtcgccgcagacgccggccgcgcgacctcgggaggcaccgctgcaggcgcgggcgcggcctcgggctggggcgcggacgccccgaaggcggcgaaggggttctcgggtgcggcagctgccggctgcatcggctgcgccggcgcggcctcgggctgggacgccggctgttggggttccggcgcgccggaagcgctcggggtgttgctattctcgtccatggtcttcgacctttctggtttgcgcgcccgctagttggcgcgctcgctgaacacggtttcggtgacgccgtcgatgcgggcgacgatgtcggcgggatccatcagcatcatggcctcgaacagaggcggcgacaccatgttgccgcacacggccacgcgcaagggctggaacaagagcttcggcttgagccccgcctcctcgccggcggcacggcagagctcctcgagcgcctcggcgtcccacgggttgtcgtcgtcggcgagaatgccgcgacagatggcgagcgcctcatcggcccgcgccccttccttcaaaagcaccttctggacgctcttctcgtcgagcaccaccgagtcgccccagaacagaaacgccagcttggcgggaatctcgtccaggtgcgccaggcgctcggcaacaagcgggtacatggcctcgtagaactcgcgatcgtcgtccacgtcgaccaggcacgcctcccaggtgtcggcgtccacgccctcgccgggcagatgcaactcgcgggcggccgcttccgcctcctccttggcgggcgtcggcacgacggtgatgccgtccggcacgttcgacccatccaggttggtctgggcgagccagggcttggcggcatcgacccaggcggcagcgcccatgtcgcggatatagacgccgttcatccagtcgagcttcttctcgtcgaagatggagtgcttcttcgtgatgcgatcgagcgagaaggtgcggcagagctccgccggcgggatgatggtggtctcgccgtcgagcgaccagccgagcagcgccaggaagttcacgagagcgtcgggcagatacccccggtcgcggtactcttcgacattggtggcaccgtggcgcttcgagagcttcttgccgtcggggcccaagatcatggacagatgcgcgaacagcggcacctcggcgccgagcgcctcgtagatgagcacctggcgcggggtgttggagagatggtcgtcgccgcggatgacgtgggtgatggccatgttcacatcgtcgcagaccacagcgaagttgtaggtgaacgtgccgtcggtgcggcgcaggatcatgtcgtccatcacatcgatggggaagctcatgtcgccgtagacggcatccttgaacgtgaccggaccgtggtcgtcgggcactttcaagcgccagacatggggctcgccggcagcgatgcgcgcggaggcctcgtcggccggaatggcgcgacaggtgcggtcgtagcccgcgtaacctccctcggttttctcggcggcctcgcgcttggcgtccagctcctccttggtgcagaagcaaggataagcggcgccggcgtcgatgagcttctgcagcgctgcctcgtacgtgtcggtgcgctgggtctggaaataggggccgcaaggtccgcccacctccgggccctcgtcccaatcgaggcccatccacttcagcgcgcgcagaatgatctgggtgttctcctcggtggaacgctccgggtcggtgtcctcgatgcgcagcacgaaggtgcctccggtagcccgggcgaaggcccagttgtagatggcggtgcgagcgccgccgatgtgcagcttgccggtgggagaaggcgcgaagcggacgcgcacgggcttggtcgtggtcatgggtttccttcagtcctcggggtcgattcaggtaatagcgccagtatagcacgggggctgagccatcattcattgaccacatccgactcggcgacggttcggtacagggctcgtgtccgcagcgcaacggagccgtgacgctccgtgacagttcggcggtggggccgtatcggttggacagcagccctaaggcgacaccggagcgggcctagactgaaggagctatgggaggggcttcggcttcgcacgggcgcccgcgaaggacgcgccggctatgccccgttccacacgttcccacgacgccgtaagagaggaaatcgccatggccccgtaccgttccgtacatgccttcaccgtccgcttctttccgcactcgtcggtgtccctccgctgggttgttgccgcgttcgcccttctcgccgctctctgctgggcgtcccctgcctgggccgtggacagcgctgtcttcgcctcgggcgcgggcaccgaggccgacccctacctcatcgagaatgcaagtcagatagcggccttccgcgatgccgtgaacgcaggcgacgactatgacggcaaatacgtggcccccggcgccgacgtggatctcgagggcgccgagtggacgcccatcggcgccggcacgcgcaagagcagcggcatcgccgagggcagcacacctttcgctggcaccttcgacggcgcgggccacaccgtgagcggcctgaagatcacttcgacccagggcgccgactacgccatcggactcttcggcattctggacggggccaccgtgaagaacctcaccgtggccgacgcgaagatcgccgtgcctcaaagcgagctggcgggcatcctctgcggcatgttggcgaacgattccactgtatccggcgtaaacgtctacggatccgtttccggcaaggcgggcgtgggcggcatcgcggggcgcatgacgctatccggcgccatcgagaactgcgagaacagcgcctcggtcaccgccgcgggcggcgtgggcaacgccggcggtatcgtaggcgccgcctactacaccacaccctcgggccgcatgtccatcacgggatgccataacagcgggagcatctccggcaccgactgcatcggcggcatcgccggcctcagcgcggccttcgtgtcgaattgcgagaacagcggcgccattgccggtacgagctactctgtcggcggcatcgtcggcgagcagaagaactacggcgctgtgagcggttgtatcaattccggggcggtttccacgagtaacgccagtgcctacggcatcgggggcatcgtgggatgggcccgctacgacggcgccgccccagcctacgccaccagcgcgcccatcacggtgaccggctgcgccaacagcgcctccgtgcaaggcggcagctgcgccggcggcatcgttggcacgttctacaacgcgggcaccgtaagcgggaacgccaatacggccgcgtccatcaccagctcgagcttcgccgggggcatcgtgggcaacctgcagaacgccgacatctcgtcgctgccctccacggtgcccgagggcatccttgtggagaacaacgtgagcgccaccccgctcaatgccatcacggctcccttgaagggcccctacgcctacaacaacacgccgagcgatttcaccgtgcgcgacaacgggagcgcctgggtggcccaggccggagcgacgcgctacgccacgctcgcgggcgccttcgcaacggcccccgatcacagcaccatcaagctcgtcagcagcgtgagcgaacagccgaccctctccatttccgacggccgcgagctcacgctggatctggccggcttcaacctcttcttcgccacggacggcggcctgtcccttcgggatggagccctgacggtaaccggacagggcgacgtggcgaccgccgagggagccgacggcaagcccgagcctttggccaccgtaagcggcacagggtcactcgcgcttaagggcggcagttacaaccaggacgtagcgccctatgtggctgattcctacgccgagttcgtccccgccgacgctcacgcgacggcccccttttccgtggtgcccgcctcaacagccaagcacaacgcccaggccgtcgttcacgatggaggcaagaccgtttactatggtgacgccggcgcagcccgaacagcagcggccgctgcccctggcgccaccgtggaggagctgaaagccccgagcacgccatcgggcaacgagggcggcgagggcaacccgagcgacggacagacgggaacgacgaacgacgggcagccgagcggagacgccaacgcgaatgccggggacaagacagatggcagcaccgcagccgacgaccagaccgacggcaacgggacgaagggcgcggacaaggatgacgcctctaaggcgacagccaaacccagcacatccagcgcggcgtctggcacgcatacttaccgcagcagctcgatcgcctaccgcggcgttccacagactggagacgcggccaccgatgcgctgctcgccgtgggagctctggccgtcgtctcgggcggcgccgcggccctcgcccgcgcccgcatgaagcgtgcccgggccaagtagcgtagctcggcatcgctcgcaccgtaagccgcaatcgccgtggctcctctttacctgagagcgcacatcgaggccgtcgccctgaccactacctcctcgtcggcctccccacggaaacgggcaactcccgcagggcctccattacctcagcggcggcttcctcggcttgcaactgacgaggcatgtcgaggcccgcgcgctcgaaggcctcggccaacgcggcagcgtagtcgcgcttgtgggcatcgttgagcaccttccacggaatgcccttgaaccaagcggccacctccccattgaagggcacgcgtccttgcagcatgaacgccatgatgacagggtatcccgcgtagccctgccagaacgtcgcgttgtcgttggagcggtagcgtccctcgtcgtcccaggtcacccggtactccttcgacccgtccgacgatcgcacgataagcgcttccggactcaaatcgtagcgatcgtcgaccagcgccgtccacgcctcgtacactttctcaaccggcggcaatttttccatgagatactccttgtatcgcactttctcgttctgctcattatgactccactgcttcggttcaacgcaaaactgccactcatcagttatgttgcaagccttccagttatggtcatttcatgtgtgcccatttacaaagtgcctgctcatagagttatccacagcgaaaacgagacactgccgcgacataactgcggtttgacgctgctacgatccccgccctacttcgatccatctaaaaaacaaggggcaccatggcggtacttttagcgggcgcctgagcgcttccttttgccttcggaattctgcccggagagggagacgagggcgatcatggcggccatgaggacaaggccgatccaatcccaggcagagaacggagtgtgcagccacaaggcagcgatgaccatggcaccggccggctcagccacgcccagaaggctccccttcaccgagcccacgagcgacacgccgtagaggaacagcccgaaagcagcaaaggtacccagaacgcccacgccaccgacaagagcgagccagcctgtagcgtccatgtcgagaacgagactgccggcggtgccgaaaaggtcggcgagaatcgagcccgcagcgccgagggcggcagaaggggcggcgagcagcgaaacgatcgcctctccgatgagccacacgagaatggcgacaataccgctaatgaccatcccgcaggcgatgacggtggggcgatcccatcggccgtagagccgttggggcgccatgatgtagagcgtctcggacaaggcgttggcaatgccccaagccaagcccgccaccggcagcacgatgacgccccagtctccctgggtggcgatgagcgtcgcggcggccatcgcgcacatcagcccgacaaagtcggcgacgcgcggcagacggcgcgctcgggcgcaggtgataagcatgacgaacaccgtgcaggtggcctggagcaccgtggccgtgccggcgttagtgagggcgaccgacaccgcgtaggtgatctgcgagaggtacagccccacgccgaacagaacgagcgtcggacgggcggcggggctccccagcagcgagagcagagcctcgcgacgcgtaacgaatacgaagacggcgaacagcagggccgccacgccggcacgtacggcggagatgaaggcggagcttacctcgtaactctccgcgagaaactggatacaggctcctgagaatccccacagcgtcgcacccgccagggcacataccacccctcgccagaagaccttagaagcgttcaccgccgtctcacctccgtgcaatccatcgaaatccgttgccgcagaggcagcatacaccatcccatgcacaaggagccagagaggacgcaccttcgaccgctacgggcaaagcgacctccctactgccgcccttggcacttggcggcgcggctatcgtctttcttcgcgcttggcggcacgggcggcgcgcttggcggccaaacgctcgcgggcggcatcgcccttggcgaggttgttggcgcgccgttcgctgcgccccgtggggcgagtgggagcgggagtggctgacgctgagcccttggccgtgtcctggcccagggcggaccgagatccgcccctgcgggaatcggtcggggcattttgcgaaacagccttagcagagcctgtccgagcatttttggaaacgcccgcagcgggatctgttgcgataccccgggggacagaagaggcaggatcggaggcaaagccggaagcgccgccctccatctccgcgaaaggagccccctcttcggcgtcggtctcgccgaagagtttctccaggaagtgcacgatagccggaagcaggttgtcgcgttcctcctccgagaagtagcgcagcggcagcgtcagtttgcgcttgtccgtctggtagcggccggccgcgcggcgcaggggcttcatggcagcagcggggatgtcgatgggctccacgatgagcttgcccgccgccacggagatgagcttgaccccgtgctcgttggcgaaggccttcagccatgcgcgctcgaagaggttggccgccgcctcgggcatctcgggggccttggcgagcatatcctcgcggagggcggccacttcctccaccgtggaagccgaagccagcttgcggtaccacagcacccgggcgtcggcgtcgggaatgtactcctcgggcaggtaggcgtgaccggggatgttcacggtgatgtcggaaagcgccggcggcagctcgcctgaggcgcccacgccctcgcgcgtctcgttcacggcctggttgagcatctgggcaaacagatcgaagcccacggctgacatattgccggactgctcggcgccgagcatcgagccggccccgcgaatctccagatcgcgcatggcgatgcgcatgccgctgcccaaatcctgatgctcgttgatggcggtgagacgcgcggcggcctcctcggtcaaaggcacgttctcggggaacatgaagtaggcgtaggcttgggtggacgagcgccccacgcggcccttcagctggtacatctgcgcgaggcccagacgctgggcgtcctcgatgatgagcgtgttggtgtgggggttgtcgatgccgctctcgatgatggtggtggccacgagcacgtccagctcgccggcggcgaactcctccatcacctgctccagctcctccttggtcatctgcccgtgggccacgccgacccgtgcctccccggcggcggcatgcacgcggtcgaccgcctcgtcgatggagcgcacgcggttggacacgtagtacacctgaccgccccgggccagttcatagcggatggcggccgacacgacgtcgggatcccactcccccacgtgcacctccacggggcgccgctcgtcgggcggcgttaggatgagcgacatatcgcgcacccccgacagcgacatctgcatggtgcgcgggatgggggtggccgacaacgtcagcacgtcgatggactcgcgcaagttcttcagctgctctttgtgctgcacgccgaagcgctgctcctcgtcgatgatgaccagtcccagatcgtgcggattcacatcgcgcgagagcagccggtgcgtgcccacgagcacctgcacgtcgcctttggcgaagccctccagggccgccttctgctgctcgggcgtgcggaagcgcgaaagcacttccacggtgacgtcgaaggggtcgaagcggtctttgaaggaggtgtagtgctgctgggccagaatggtggtcggacagagcaccatcacctgcttgccatcctgggtggccttgaaggcggcgcgcagggccacctcggtcttgccgaagccgacgtctccgcagatgagacggtccatcggtcgcggcgattccatgtcgtgcttcacatcggcgatggcggcgagctgatcgcgggtctcggtgtaggggaaggcctcctccatctcgcgctgccagggggtgtccggcgagaagcggaagccctgggtggcggcgcggcgggcgtagacgtccacgaggtcgaaggcgagcttcttggtggccttgcgggcgcggttcatggcccgcgcccagtcgctcgtgttcaggcgggtaagacgggggctgccgccttccggccccacgtagcgggtcacgcggtcgagctgctccacggggacgaacagcttgtcgccctcggcgtattccagctgcaggtagtcgcgctcagtgccgtccacctcgcggcgcaccagatcacggaaaaaagcgatgccgtgggccgcgtgcaccacgtagtcgccgggcttgaacgggaaggtgacctcggtggcatccacgcgggagcgcacgcggcggctggcggcgcgcgagccctgggtgtcggcggccgacaccagcgcgagatgcgctttcgggatgatcatgccgagcgggatgtcgttgtccacgatgttgacgaccccgcgccgcaggcggcgtttggcctgggccggggtgtcggcctctgtgctttcgggttgcgactcgccatcgtccaaattttctggctgcacaatctggatgggaataccgtggtcgacgaaggcgtggcgcatggtctcgcgggcgcgcaagttcggagccgagaagacgatggtgtagcggtcggcggcgaggctcttcagcttgccgaatattttgtcgggcatcccggccacatcgacgcgcttcaccggcagctcgtcgtccagcgcgccgccaacccgcatgatggagacataggtggcccgcacctcgcccccgaagtccagcgccgccggctcggcgaacaggcccgcgagcgcgatgttggtaccccgggcgcgctcggcgatgtcatctgcggcgtgggccgcatcatcgaagagcgaacgcggctcgatgagggccgcacacgtgcccgctccggcgtaggcgcccagcgtcaccggcttcttgtacagaaacggcagcaccacatcggcgccgtcgaagcgaagccccccttccagcttctccagcacatcgcgcagagccgggttggtgagcgccggcttccccagggcgcgccgcgcgtcggccagcgcccggggggaggcggggaactcggagacggggtaaatctccacggagggcagcgaagagatggtctgccccgtggcgggcacaatgcggcggatctcgtccagctcgtcgccgaagaagtcgagccgcaccggaaaggacaggttgccggggaacacatccacggtgccgccgcgcacggcgaaggtgcccggaccgtccagctcgccggtattggcgtagccggcggcctccagggcgcggggcaggtcgcccagctcctcgacgccctcgacgcccatatcctcaagctcctcgccggccgtaagcgcgatcggccgcgcagcattcgcctctaccggcggcaacaggcgcagcagcgcccgggcgctcgccaccaccacgacttcgcggccgctcttgagcgcccaggcggcctccatgcgctgggcgatgacgcggcgatcggccggcttggggtcgaaggggtaatccgcgcgctccgggaagcgcagcacgcgctcctcccccacataggcggccacgttgcgggcgaaggcgacggcggcgtcctcgccggccacgacgacgagcgtgggctggggcgcatgggcgaagcgggccgccacgaggaagggccgcgccgaggcggccacacccaaggtggcgtcctcgccggcatcgagctttccccagaacgcgtccaggcagccggacttctccaaggtgaaggcgagcgaatcgatgagcacagtgatctcttttctgcaagacaaacggcaaaagccgcccgagcgggcggtcggcacccgggatgagcgcctcgcacagtgtagcgcactggggcgcgcagcgacgcgaacggggggccaatagtagcaaagaagtaaaccgtcccgccgcgattcccctaactattcctcgagaaggagcccgcgctgtgcgacaatagcgaaaacgacacagcgccgacgcaggccggcgcaaaaggtaaggaggcagcatggcacgggaatccctggcgagcaagcgggagcgggcggcggccatcgaggagcgcatgttcgagcactacggccctgggaaggcgtcgctcgactatcgcacgcccttcgagctcaccgtggccgtggtgctgtcggcccagtgcaccgacgccgccgtgaacaaggtgacgccgcgcctgttcgcggccttccctaccccagcggccatggcggccgcctcctcagacgaagtggcggagatcatccactcgctggggttcttccgaagcaaggcgaagaacctcgtggcactcgcacaaatggtgacggcggatttcggcggcgaggtgcccgccgacgtagatgagctgcagaagctgcccggcgtgggccgcaagaccgccaactgcgtcatgtgcgaggccttcaaggatccccagggcatcgccgtggacacccacgtcttccgcatcgcccaccggctgaagctggccgggccttcagccgacacaccgcagaaggtggaggacatcctgctcaaggtgtacccgcgcgagcagtggctgttcatcaaccaccagtgggtgcacttcggccgcgagttctgccgagcccgcaacccccgctgcgccgactgcatcgtcggcgatctgtgccccacccgaggccagtgggggtaggaccctttccccttccatagcggatagtcgccgtcttacccccgtagggggcgaccttggtcgccccttctatttcttctgcaaggggaagccgcggcggtgcagctcggccacgacggtttccaccagcaggggcaaggcggcggcgcattcgggagtgagccccacaacgaactgctccggggagggattgcccgcctgcatgcccaggcagaagccctcggcctcgtatcccatgagcgaggcggcatcgaacaaatcgacgagcttcaaatcgtgcagcgacgcctcggggcccgagtggcgcgccatggcatccggctcgaaacggtacacggtgccgggcgcgtcgcccgtgccgtccacggcgtccaccgtgaggataaggtcgcaacgctccacgtagggcagcatgtccagcgacatgcagccgacgtccaccagcgtcacgttctcggggatgtcatagccggcaagtatctcgtcgtaggccgccgggcccaccccgtcgtccagcatgagccggttcccgacgaagaacaccgccgccgtgcgctcgctcgcttccatgctgcctccttaggcccaggtatccagcgtcgggcgcagatccaagttgtaccaggtggcaaacgccacgatggccacggcgatgatcgcgccaacaacagcccagatgcgctcccgccgcaggtaggtctcgcgactcacccccatgttctcggcccggtgcgccgcgaaaggctgggccacaatggcgaacaccacggtagcggccaccaagcccgcggccatgagcacggccagcaccacgttcatcaccgtcggctccaccgtggccgcgtaaatcacgttgtccgcgaacagccacgcgacgaagaagaggaacgccgcccacatcccatgggccggcccccacacaggcgccaaaaacagcgcccccaggttcacccgcggcaaacccgcgagaaacttctcctcttcggcaatctgttcgtcggtcaatggctcgcccatgtcgcccatctttcctctcgttgatcggcggcacgtcgggtggcccctccgtgcgctcgccgttatttccaatcccgccttatcattgccagggcatcctatccgggttccagctgtattcaacaagaccgtctcaattctcgttttccaattttcggggataaatgccacttcaaccccgaaatggtcgatttttcggcaacataccagagttttttcgaccatttcgcccttcaactggcatttggcttgccatttcggggtcgaagtggcattcactgccaaaaaagggaagcatgaggaatgggggtcggcttcggtcgcgcagcgcgcgctagctgatgagcttcgagctctccaccttttccacgtaccattccatgaacttctccaggggcttgcggagcaccaggcccaagagcgccgccgggatgaggaacagggcgagtgcgcccatctgagcccagaagtcgccgccgtaggtgcccatcatggcgcttcgcatggcgttcaccacgtgggtggcgggaagccagggcgagagggcctgcacgaaatcgggcatgatctgcagcgggaacgagccgccgcagccggtcacctgcacgatgagcagaagcacggcgatggccttgccgaggttggcgaaggacaccaccagcgcgtagatgatgaacgtgaacacaaggcccgcgccccagaagcacaccaggaacagccacggcgaggtcacctgcacgtcgaggaagaacagattgcccagcgccatgaccgtcgattgggccagcgacaccacggccatgacggcgaagcggccgaagaacagctgccgcggcttcgggttcacaagccccgcctccttctggatgcgcaggtccgccttcggcttgaacaccacgagaatgagaagcgacccgatgaagagggccagcgtcgtgtagagcggtgccatggcgctgccgaagttctccaccgggaacaccgcgatgcgctcgacgcccacggggctcgccagcgccttcgaaagggccgacacgtcggagccgagcaccgcgcgcagggcgtcgcggtcgcccgaggcgatggcgccgtcgatatcggaggccatctcccgcagccccgaggagacgcccttgagcttctcggtggtctcggcgatcttgtccgcggtgccggccatgacatcggccgccgaggtggccgaggaggacagctcgccgccgacgcccttcaggtcgtcggaaacgccggagagcgcatcggccatggaggcggcctgctctgccagcgaggcgagccccggcgccacatgcgcctcgtaatcgtccttgatggaattgacggaggcggcggcctcggccgccttggccttcgcggcatcgcgctcggcggaaagatcggtgtcgcccgcctccagcttatcggcggccgtccgcaggctcgcggccatggaatccgcctgggacgccaccgccctcgcgcggccggccaaggcggtcacttggggccggaggctctcgggcagcgacggagcggcgccttccaagctgtcggccacctggcggtacaccgtcgcatgggacgcaagcgcgtcggcctgggcgcgcaagtcgccggcaatgtccttactgtccccggaggccgcatcgaacagcgcgtcgacggaatcggataccgccccgaaggcggcggcgctgtcggccagcgagctcttgagcgtatccgccgagcccttcagagcgtccaccgtggccggcaccgcgtcggcccgccccgtcgcggcggacagcgtctcgtccagggccgtggaggcctgggtggccaggtcggccgaatggcgcgagagatcctcgcaggagcgagccagcgagccgtagagcgaaagcaccccggacgcgtcgtcgaaggcgtcggccatctcgcgcacatggtcggccaccaccgcgatgcggccgtcccagtcgtcctcgtcggcgaagctggaaagcgattcggccagcgagagcgacacctccgagagcgtctgggcgaacacggcgttcacctggtaggacaccgaatcggctccctggtcggtgatcttcggcgcgatggcgctcttcttctcgttggcgtagtagacgatatcggcatggccggcgtcgcccgtgtagaaggtgagcatgtcgcggctgaagctcttcggaatcaccacggcggcgtagtagcgccccgacttcgcgccgtcgatggcgtcattctcgtcggtaaactgccagtctatctggtcgttggcccgcagggcggagacgacctggtcgccgatgttgatgcgcagcgggatgaggtcgctctggtagccctcgtcggtgttggccacggccaccgtgaggttgcccgtgttgtcgaagacgttccagcaggcgatgatgttgtaccaggcgaacagcgagggcacgagaacgaggcccagcgtgatgatgatggacatgacgttggccttcaagcggcccagatcgaagcggaacaggcgccagacgttattcatgacgggcctcctccccttccgcaccgtcgcgcgcggcatcgcgagcgcacgcgcgctcccgatcgccgaagcccgcgtcgcgcgcatccatgcaggcggctcgctccacgtccgccgtggcgccgtacaggtcgatcaggctcgcgtcggagaggctctccagcttcagctgccgctcgaagctgaagcgcaggctctcgatgaccacgagcgccacgaaaatgacgatgatccaaatgagccagcccgtgagcagccacaccttctcagtcggcgtcagggcgaagatgaccgcaaggaccaccggcaccgccacgcccaaaacgagcgcgcccttcatgagccgcggataccagcggttgaacgtcgcgtagcgctgctgcaaggccgtggcgtaggtgtccttgtcggagagcgcccgcatgatctgggggatgcggtaggggcacacggggatgtcgacgtcctcgccgttgaacaggccgccgtcgcgcacctggcgggccaccatgcggttcacgttcgccatgagggggcggatgaggagcccgagcgccatgaacagcacgaggaacagcgctagcacgagcaggtcggagacgtactggccgccgtagaagccgcagatggcctcgcgcatggccccgatgccgtaggtgaaggggaacagcgggtagatggattggaagaacggcgaggtcatctcaatcggatagaggcccgtggcgccggggatctgggcgaacacgagaacgacgcagatgcccttgccgatatgctgcagcgtgacggagaaggcgtagatgatggagaggtaggcaagcgacgccagcgccgcggcgaagatgagcgccggcgccgagacggtttgcacgccgagcgcgagcaccccgacacagcagatgaccgcctgcatcacggcgatggccgcaaggaacaaataccggccccaatagcgctgggccagcgtgaggccggggatgccctcgccgtccgcctcctggcgcatgatgacgagcagcatgaaggcgccgatccagaacgtgaggttcatgaacaagggcgccatggcgctgccgtaggcgttcagcggatagagctgctcggtgaccacctcggtgggcgacgccatgaacgccgcgatcttgtcggcgtcaagaccgccctcgcctacgagccgggaaagcgcgtcgggggtgccgaaggcgagcacgtcgttgtagacgatgcccagctcgctttccaggccggcgaagagccggtcggtctcggccaccgttgaggcggccgtgtccatggtggcatccagctgatcgatgacgagcccggtctgggccacgaggagccgctgggtctcaagggccccggaaagggccgacgaagtttcggccagcgcgtccagcgcatcgttcacggcgggcagcgtggtgccgaacaacgtcgtggaataggccgacgcgccgctggtcgcctggcgcaccgcgccatcgagggccgatgccgcgtcggaaagcgcggccgccgaggactgcgcgcggtcgttggcggccgtcagcgcgtccagggccgtcgaggccgcccgggtccgctcgtccagggagtcggccagagcctccagggcggcgcgctcgctgctgccggcgggaagggagcccgccgccgcgcgcacagaggacgccagctggccgctctcctgcacggcggcgcttccctgggccagcgccgcctgaatgcctccctgggcctcgccgaaggcggcggtgaggcgcgcggcggccgaggtggcgtcgttcgacgcctgggtgatgtcgtcgaggccggcggtgacggccggcagcgcgaaggcggagaagtcgctcaaggtcttctgcatggccgtcgcggtctcccccatctggcccaaggacttatcggccgcgtcgatgccggcactcgcttcggagagcgtctctttggccgaggcggccttgtccttggccgccttcgacgcatcccccaaatcggcgagcacgcggcgcacctcgccggtggcggcgacggcctccgatatcttctgcgcggccttcgactgcatctccttggtactctcgcgcccctcgttcaccttctcgtcgatggtcttgacgaccacgtcgcttacggtggcgacgaaggtggagttgatggtctcgtccaaggttgtggcgcccgtgtcggtgatcttgggcgccaccgggcccgatttctcgttcacgtagtactcgatcttgggctgcgtgaagcttccggtggtgatggtgagcagatcggcggtgaaatgctcggggatgacataggccgcgtaggcgcgtccgctcttcagctcgttcatggccgcgtcgtagtcggtgaattcccagtgcagctggttgttctcatgcagctggtccacgatgcgctcccccacgttcagctcgccggtgagctcggaggaaccgcccgcgtcctggttcaccacgcagaccgtgaggttgccggtgttgtcgtaggggttccagaacccgatgacgttgtaccaggtgtacagcgagggaatcaccatgagggcgaacacgaccacgagcgcctgcggcgttttcaaaagacgcagaagatcgcgcttgagtatcttcagaacattccgcacgaaacgggtcctttccgcctgcagtcggtaagtgtacagagttgccgttaatcataacgcaaccccggcaagtttgcttcctcttgttgacggttcggaacgtttggtcaagcaactatctcggctgcgtctcctcttaacttgcactcgattgcgtttaacttgcaaagggacacggggtggtgctcaccaagcgagttccgcagcgacgagaacaggactcaatgtcctgttctccaaagcgaggactgtctgagcgactgagcactaccccgtggcccgccaatggaagactcgcaacaaaaagggcggccccttgcgagaccgccctttcgacttcggcgcgcgcgacccttagtggaggtcggagtcctccccgacgatgttgtgcagctcgggatcgtacaccaggccgccatgctccttgtggatgaacatgagcttggtgggggcgaagccctcgacgttggccaggtagatgtggatgaacatgaagatgatgaacacgtacatgccgaagtagtggatgatgcgcatggacatgagaccgcccacgaggttcgtcgtcgcggcgaacgcgggcacgttcatggtcacgccccacaggcagagccccgtccagaacatcagcacgatgaggatcgggatcaagaggtagctgatcttctgcggtacgccgagcttggcgcccagcgggtggtccttcttcaggaacaggtagtacttgatccactccagagcctgatgacggttgtccttctggggcagccaggtcttgaagtcggtcacctgctggcgcgtgccgccggtcggcgcggtcttcacgaagaaggccatgatgacgcgggccacgcagttgatgaacagcacgaaaccgaagaacagatggcagccgcgggcgatgcccgtgaggaacggcagcaccgggaagtggatgatgatgcccgacaggatgagcatgaccatggcgatcaggttgatccagtgggtcaccacgaagataagagggtgggcctctttgtagtgagcgagatgggccatcttacttcaccccccaagggctggtgacggtctcgaagtgcttgccggtaccgcgctccgtgacatgcacggcgcaagcggtgcaggggtcgaaggagtgaaccgtgcgcagggcgttgatgggcttctcgatgtcggccaccggaacgccgatgagcgcctgctcgagcgggccgtgctcgccgtcgccgttgatgggagccaggttccacgtggacgggatgatgatctggtagccctcgatcttaccgtcgaccaccttctcggagtggtagagcgcgccgcggggggcctcccagaagcccgtgccctcgccggtgagacgggcaggctcgcggaagtactcggagtcgccgcccttaatggcctcggcgagctcgttgacccattccaccatgaggttggcgatgtagatggtctcgatctggcggatggcggtgcgtcccagggtggactggaaggcggccaggtcgcccggcttggcgccgaggatgccgagaacggcgtcgacctgctccttgatgaagggcacgccgcgcacgtaggccgcgaagatgcgggccatggagccggcctccatgggcttgccgtcgtaggcgggggccttcacccagctgtagcggtcgtcgacgttgtactcggtgaagtccggatcggtgacgaagtacggcgaggtgtaggtctcgctgcccttgtaccaggaacggcccatgtactcggtgatgaggttctcctgcacgtccgacgcctggaactgctcgtccaggacggccatgggcaggtagcggttgagcatctgctcggtgtagttgtcgccgtagggccagtcggggccttcaaagacgccccaggcgatgtagcggccgcagcccttgccgaaggtgagcacctcgggatagagcttggcgagcatcacggtgtcggcgaggacggtgtcgttgacccagtcgcggacctcggtggccatggcgagcagatcgtcgagcttgctctcggtgggcacccacatgttgccgccgggaatggaggtcatgacgtggggcatcttgccgccgagcagcgccgccatctcggaggagcgggcctgcatcttcagggcctccaggtaatgggaggtgaggatcaggttcgcctcagggttgtcgacgtaggcctcgccgccgtcggcgtcgaaccagttgcccgagaagatggacagctggccgttgtcggcaaaggccgccagcttctcgtagagctggttgaggtcggagtgcagcgccaggccgttctccagggccacggcgtaggcgtcgtcgacgttggcctgaagcgcattcagcgggttcacgtaatcgagagccgccaggttgtacagccacaggatatggctgtgcaggaactgagcgccctccagcaggttacgcacgatgcgggcgttgttcgaaatggtgatgccgtaggccttgtcaccggcgatcgaggaggcatgcgcgtgcgaaacggggcacacgccgcagatgcgctcgacgatttgggccgcatcctcgggggtgcggttctgcacgacgagctccatgccgcggaagcagccgccggacacccaggcgtcggcgaccacgccgttctcgacctccatctcgacgcggagatggccctcgatacgggtaatgggatcaataacagaacgtgtcaagtcagctcacctccttcttaatcgttgttacggggttcggcgttcttctgcagcagctcgtcgtcgagaaccgggccgccggcgaccgggtcggcgtaggtgccgatctcctggtcgggatgcttggcatcccacttgcggatcttctcgaacggagcgccgccgtccatgcggccggagagcttcatgccgaagccgtgcaccacgagcgccgccgccacgatgccggtgatggtcacggcgatggtggtgggctgcaggctcagaggaccgatgcgcaggtcgcgcatgcgcttgtagaacggggtgttcacctcggcccagttgtcgcccgggttgttcgggttggcctcgcagcagccgatgcagggggcgccggactgcacgcaccagctgcggcggttgttccacagcgtgacgccgcacagggcgcgggtctgcgggcccttgcagccgacgggatacaggcagtagcccatctcctcttccttcgagccgaattcgtagacgaactcgccattctcgaagtggccgcgacgctcgcagttgtcatggatggtctggttgaacagatcgcccggcatgttgaactcgttcagacggttcaccagcaggtccatgtccttcatgaccacgacgtccacgagcacggacatgacccactcggggttcacggggcagcccggaacgttgacgaccggcgtggcgacgccgaccttcttcaggtactgctggacgccaagggcctgggccgggttgggggcagcggccatccagccgccgttcacggcgcaggagccgaccgccacaacggcgttggccgactcggcagcctccacaagggccgtgatgccggtctcgccggccacgcgcagagcgttgccgtcgaaggcctcgagcacggcgccctcgtagatgagaatgtagttgcctgccgcgatggtctgggccttggcctcctccatggagtggccagcggcggccgacagggtctccgagtagttcagggagatcatgtcgagcacgaccgatgcgacatcgggagtctccacctgggcgaaggactccgtgcaaccggtgcaggaagcaccctcgatccagatgaccggatacaggttgccggacgtcgcgccgataacagactcttccagagcttgcgccacgcgcggaaccgcaagctgggagagcccggctgcggcggcgatgccggcgcacagcttcatgaagctgcgacgggtaacgccacgcgaggcaaggatgctgtcaaagtctgacatcgttgcctgattttccatgcgtacacctccttataggtgtctcgtctctcttacatgcaggggttagattatccgttcgatcgccacaaaagctgcacaatgggtcacaaacggtcaaatcatctaccagcggcgagaaaatgttacgcgctcccctgctggtaacaaggcattttcggcgccgcgccgttcgcgcccgatttgcgccgtcggcgggaaggccctgctcgcgcggccctggcgagctgtcggccgcaatccccttgcatgcccgaattcgccagcggcggcagacgactgcgcgaccaacacatgcctcttgcgatagcgccctcagccgcaactccgctttgccgcacgaaagaatcgcgggtcgcccgctctctcgtcttcggtatttgccgcgtagatgccacttcgacccagaaatggtcgacgggccaaagaaaaagcacgcgaaaatgccacttcgacctagaaatggccaaaaaggaaggtgggctcccgtccatttcggggtcgaagtggcatctaccgaccacttgctcgaaacagagagcgggaacagccgcccggctaccgcacatcggcggtgaaagcaccttgcgcgactaacgacccgtcgccgacaaaccgaggcgatcgctcgttactccacgggatagctgccgagcaccttaacctcgcgcaacttcagccgcaggcaatcaagggcggtctgaacgtcgatatcatgcatcgacccgtcaagctcaacgaagaacatgtactctcccagctgcttttttgtcggacgcgactgcagcatcgtcaggttgatgcccgcgtaggcgaattcggaaagaatcatctgcagggcgccgggcttgtccgcgcgcaaaaagagcgccagcgacgtcttgtagcgcgaaccccgcaaaagctcggcatcgaccaggcgacccaccaatgcgaaagcggtctggttctcggggttgtcctgtatcgactccgcgaccacgctcgcgccgtgcaaccgagcggcaaggggattgcagatgcccgccgtggcaggatcgccggccgccatccgcgcgctttcggccgttgaggccacggaaagcgttgaaacgcccttaaaatgctccgccagaaagcggcggcactgcgcgatgccctgcggatgggaggcgatcctgcgaatgtcggatcgagcggcctcgggatgcatcgccagacaatggcgcacatcgatcacctcctcggccaggataaccgagtcggtgcggaaggcgaagttgtcgagcgtcgccgtgacggggccttccagcgaattctccttgccgacgacgccgaagcgcaccgtcccatcgtcgacgcaatcgaagacctcgtcgaaagaagcgcactccaccagatcggggtcgtcgatgccgagacgggcggcgaaacgcaaagccgcttcgttgcagtacgttccggcaggacccaaaaaagcgatggaattctcgtagctcatgttaaaccaatctgttgtgcgtcatttgcgatgtcgcgcgccaaccactgcgccactaatcgcgagccgcgtcgcacgtcactcgcgatgttgcatgccagagcgcgacgccgcgtgtcgtctacgatcatcatagcgcgtcggcgcccgaacggctttgaaacagccccgttccgatctctttcacgtgctcttcggttgctaagccttgggcgaacacgacagcatcaacaaagcgtttccgggatgcttttccggcaaagcatccttcagggtacgttatccaccatctcgaaacgactttccactctttcgtcatctcgtctactctcattctcgccaaattcgcgttgaaaccgcattgatgtctcgttaaattcccgatttaccaagagttttgcacattatttcaaatcgtattgacacggaattgagacctggtatcgtgggctcatggaatgcacgctagcacataaaagctcccttgaactatggtcacatatggccgaaaccaatgctgcgcccacatgctacgaccggacgctcaagtccaagaagggcgccgtcggcgttgcggcgaaggacgttgatttctggctgaatcgaggaagcttcttcaccgaaccgcttcacattgccgtcgggtctccatccgagcgctgccgcgtcttgcgctgcgtttcccacatcgatcgccaactcggcaacaaaggcacggtatggggaattgcccctaagcttgccacagtttcaccggcaatgtgcctggcgcagttcgccggcgagctgcctctcgcgcaactcactgagctcgcatgcgccctgagcggcaactaccgcttcgcctccaaacccgaagacgttgtcacctcggcagtaccgctcacatcgttgcgagagatgcgtgcgttccttcacgctcatcagcaaattcgtggagcatcgaaggcgctcagggccatcgatctcgccatcgaccacctgggttccccctatgagaccattctctacctgtttctctgcctgccccgcaagcttggaggctacggcctccccaagcccgttgccaaccaaccgatcgcgcccaagtcccgcgaagcgcaccttgtcgcccagcacaatttctacccggatttattctggcccgacaagcagctcatcgtcgaatacgacagcttcaagcaccacagcacgccgaaaaagacagagcatgacgcccggaggcgtaacgatctcgagtccatcggctatcgcgtcatgatcgccaatcgttccatcgtttcttccgccgcactgttttcccaattcgcagacaacgtccgccgtgaacttggcatgcgaagccgtccggagacggcgcattgccgagatagccgaatgcagcttcgcaggttgcttcttgcacccgattcgattgcggagctctggaggtaagtttcgggattcgacaagtatgcatcgcgtcaatcgccgagaacgaatgcaagcgggtacgtatcggaaacatggcaggtagatgccacttcgacctcgaaatggctcatccccctcctatctttctggccatttctaggttaaagtggcattttcgagggatttcccctcagcaagtcgaccatttcggggtcgaagtggcattcacctgcggacccgctgttaaaccaccattgacatagacccactttcggtacacgcggaaaggggcctcccgctacgatgcgattgtcgagaaagcac

SEQ ID NO: 10516 - DNA, 5390 bp, Unknown
  gut microbiota DNA sequence
atcaagggcgtccatggcccgggccgcctcggcgtcgtcgatgtcgccgagaaaggccagcgtcagatggtaggtgcttcggtcgaggaagcgcccttccaaagaggcgctcagccggcgtgccatcgccgccacgtcatcggcgaagtccgtgggtagttctaaagcgatgaatgtgcgcatggcggcccttcgtttctacgcgctgggcgtttcagtcatgaacaggatgccgagggtgctcgggccgcagtggctcgaaatggtgcagctggccgtggtggtgtagatggtgtggaacccgcgctcttccagcatgcggcgcacggcgtcggcgatctcgtcgctcacgccggagtgagtgatgaagatctcgtccttcacgatgtcggggtggcgcgccagcgtgtcgttcacgtagcgctcgagcactttctcctgcttgccgcggtaaagcttgcccaccttcatggcgccgctctggttgtccacgaggatgcccggccggcagctgagcttgccgcccagataggccaccagggtggggcagcgaccgccggcagcgaggaattccatggtatccagtacgaacgaggcgtgggatcggttgtgcagctcagccgcctcgcgggcgatatcggcgccgctcatgccggcatcgcgcatgcggcaggccgcgagcacctgcagaccgatgccggttgagaggctcttgccgtcgatgacgtagacgccctccatatcagccgccgctgcgctcgcgttctcgtaggcggaggaaagcgcgctgcccaggttgaagtggacgacctgcgagccgtcggccacaagctcggcaaagtgttgccggtaggcctccggcgagcaggcgcccgtttggggcagcgacttgtcctcgtagaagccatcgaacagcacctggggcgtgatgtcgatgttgtccaaatggtcgcgcccgcgaaactcgatatggaacgggaagctgcgaacctggtggcgctcccgctgctccggcgacaaatcgcacgtgctgtccgcgctgatgatgacgttaggcattagcgagtccctttccgcaagcaaatgttgaagggcattgtaacgctgatcgggcctatgaggggaatcggtgatggcgaggtgccttgagagggagcgattcgacgcggcgcgatccccgtctacgcgataggttttcgattgttgttggactcgcccatgctcgctgctgttatccccgcgcggcgaaatcggcttcgatgggcgccttccaatcttcggatatggccaccccgcagcgcattggtgcgattacctgctctgaaatggttccgtagttgagggccgtgccgacgctgtcgcagacaaaattcgcggcgcggttttctgcaatgcccatggtgcgggcggtctctatcgcatcgatattggcgcccaggaagatgaactcccagtcgttcttgcggcggcgcttctcgatcatgcgcttcacctctgcgagggagtagtgcttgctggcgttctccatgccgtcggtggtgatgacgaagatggttttgtcgggccgcccccacgggctggctttctgtgcatggttgacacggcggatggtgtttcccacggcgtcgagcagcgccgtgcagccgcggacgaaatactcgcggctcgtcagcggcgccacttggttaagcggcacgcgattggcgatgacgtcggtgcggtcatcgaacagcacggtggtgacgacggcggcgccgggctccgctttctggctttcgatcatgccattgaagccgccgatggtatcggcctccagtccgcccatggatccgctgcgatccaggatgaacaccatttcggtagaagtggggcgattggttttcatggttcctcctcggttcgagttttcgtgacgcatttagaatacgaagccgagggacacggcaggtcgcctgcgaggcgacatctagcggccgatgagcgcttggtcgaaagcgaacagtgtttcgttgatgaggaagatgtcgaagacgccctggtcaatgaagtactctacgataaggtcgcccttgcttgcgtgggtgagagcgtatccagcacggccgatgaggtcgcgggtctcgtccagagacagctgcagggccacggcgagcgcgacggcggtggctttactcggctggtacgcgggattgctgcggatcttcgagaacagttttcggtcgatgttcgcccgcttgtacacctcggggtcggtgaccccgcgttcgtcgatcatgcgcaaaagggcctcggagaaggtttcgtctacttggttgaccacgtcttccagctgacgacggcggaatcggttgaggaagccgagcgtgcgcggagggtgatcggttgaagacggagacgagggagcaaaggaaggcggagcttcttcgaaagcggggatcgccgagagcgacccctcgtaggttgcgcttggcggacttgcgtaggcgaacgtgtcgccagcgggcagttgttcgacgtcctcgaaatgctcgtcgatgaacgactgcaccgagccgaagagttcttcagaaagctggtacgattcggggtcgtataccacgagtatcacgtcaaggtcgtgctcggcgaggaaatctccgatagtgcgaattgccaccctcagcgcgaggtctttggggaacccgtaggtgccggtggagataagcggaaaggccactgacccgcagcccagcgataaggcgaggttcaagctgttgcggtagcaggcggccaacgcctctgcctcgcccgagcccccttcccagagcgggccaaccgtgtggatcacgtaacgcgcgggaaggacacctgcttcagtggccgccgcttcaccaaccgcaagcgccccgacgcgctctcgagcggcgaacagccgcgggcctgcggcggcgtgcaggcgcgaatcgaccccgcgccccacaacgggcagcgggttcgccgagttcacaatggcgtcggcgcagaccgtgacgatgtctgctctaatgatttcgaggggcataggcgaaccttacgcgtttggctgtaggcggcgggtgctgttggcgcagatagtggcgctgtttctgctatgtttgcttggcggaaggacattaagcatcccagatgctagcatatgtttgtcgaaataagaacaaggaggcaataatggctacgagcaccttgacgattcggcttgacagcaatttgaaggatgaagcttcaaggatcatcgaacaatacggccttgatatttccatggtaatgtgcgcgtttctgatgcaaattgtgaacaccaatgcaattcctctttcgttcgattatgagcagccgaacgaagagagtctgattgccgtacgtgagacaaaagaaatgattgctaacggatcgggcgagagctacgacaatggtcgcgatctgattcaggcagctttggcgtgagtgcgcagcttatagcaaagtttcggtctttgtcatgggccatgctacaatggctgaaccgttttgcatgaattgagggaggtcgtttcatggctgagatcgctgatctgcgcgattgcgctttgagcggccttttctatggagggcgtgcgggacagaaagagggtattctcattaacggggaaccttggattgccaagtatccgcgcacgacgcgcgatttggtaggcaagcatctgccgtcgtacacctcgagccctgtttccgagtatctggggtcgcatatttacggacttttgggcattcccgtgcacgagacgatgctggggtaccgggccggaaagatcgtgtgtgcttgtcgcgacttcactttcccgaatgcccgactcttcgagttcaaggagatcaagaacgccctctccgacgacgatgccggcttcagttctgcgccatcggatggggaggtcattttgctcggcgacgtgctcgccaccatcgagacctccgatttgctgcgcagggtgccgggtgtgcgcgagcgcttctgggacatgttcgtggtggacgctttcatcaaaaatcccgatcgcaacaacgggaactggggcgttctcatgacggcgccgatggcctatgagttggcgccggtctacgacatgggcagttcgcttttcagtaagcgcagccccagcgtggcagcccgtcggctgggcgatgaggaggccgagcaggaagacgccttcgggacgaacgtctcgtgctatcggctttcggatggcgaaggcggcagcgttgcgattcaccccttcgagtacatggcgaagacgacgaatcccgatctgacggctgccatcaagcgctttgcggcagcagtggacatgggggccatcgatgcgcttatcgacagcgtgccggaggaagcctacggtatcgtgctgctgtcggagtcgatgcgcgaagagcacaagcgccttctgagaaagcgtctcgaagaaggtattcttccgcttctgtgaattgagcggcatgtcagtgtggcatatgcggctactgcctctcgaagtagtcgcggtcggcgaggtagtaggtgcggatgtagccggcaggggatacgacgacgaactcgccagtggattccaggaagtagaggtcgtcgccgtcctcggcttgcagcttgtggagggcggccgggttggcaacaacggcgttggcggcggcgaggtattcctcggccgtggcgcagccggtctcctggccgtgcttttcgaagtgctgctgcagtttgtcctcggtgcggaaggtgaggtacgaggcggtttcggcggaggtcgtatcgtgggaaggtacgcttccgctttcgccggacgcaaacccgcagcccgacaggcacaggagcgctgccaacccgagagcgagaagtgctcgcgcttttagaatcctccgcatggctagtatcccagcacgtcgccgacgttggcggcaatgcagaggtcggcatgggcgtcgcgcggggtgggggtgcggttgatgatggccaaatgatcgccgcggaaatagtcgatgaggcccgcggccgggtacacggccaggctcgtgccggcgatcactagcagatcggcgctggcgatggcgcgcacggccgcggtcacggtgccgtcgtccaacggctcctcgtacagcaccacgtccggtttcacgatagcgccgcagtgcgcgcagcgcggcacgccgtcgggactctgctcgcgcagggtcagcagctcctctacagtgcacgaggcgccgcagcccatgcagaagttgcgccacacgctgccgtgcagctccagcacgtttaggctgccggccttctggtgcagtccgtcgatgttctgggtcacgacagctgaaggctctcccttccgctccagctcggctagcttgcgatgggc

SEQ ID NO: 10517 - DNA, 47689 bp, Unknown
  gut microbiota DNA sequence
catccccatcgcggtaagattatgcgagtttacccgagagaaaggacgcccatgggcatcgtagaaggcaaggtagccatcgtcaccggcggcacacgcggcatcggattcaccatcgtgcgcgagtttttgaagaacggcgcgaaggtggcgctggccggatcgcgccaggagaccgtggatgcggcgctcgccaagctcgccgaggagggcttcaccgacaacgtcatgggcatcgcgcccgcactgaccgatcccgactccgtggcggcggccttcgcctcggtggtcgatcgcttcgggcgcttggacgtgctgtgcaacaacgccggcgtcagctcccgcacaccgctggtcgattacaccctggaggagttcaacaaggtcatgtccatcaacgtgaccgccgtgttcgtgtgcacccaggcggcggcccgcatcatgatcgagcagggcgagggcggcgccatcgtgaacacgagctccatggtgggcaagtacggccagccctccggcttcgcctaccccacgagcaagttcgccgtaaacgggctcacgctgtcgctcgcccgcgagcttgccaagcacaagatccgcgtgaacgccgtggccccgggcgtcacccgcaccgacatggtggacgcgctgcccgactcggtcatcaagccgctcatcgagtccatcccgctgggtcgcatgggcgagccggaggacatcgcctgcgcctgcctgtatctggccagcgacatgtccagctacgtctcgggcgccgtgcttcccgtcgacggcctgtcgcgcccgtaagcgcttcacagcccaactgccccgcagcccaaccgcggatcgcggccacccgcacaaaacgactgccgcgcaagcaacagccccgaattctggcaagtttttcgaagttttcgacatcgggaagccagggcacaccgagcacagcaacaaaagggccggaaaccatcccaaaaagagtggtttccggccctttctcatgcctctaaatcgttgcaatcagcgttgcatgtcgaaatcctcgaaaaacttgccagaaagagggcttcttccctacgcctcgtggcgcttctcgtagaaggcggccagctccggggccatcttctccagagtgggcagatcctcgtaggccatatgcccgttctcgtgcaccttgtactcgatgcggctcgtgatggactcgggcaaaaacatcttcgagatggagtgcttcacgttccagaacggcgtggccgcgtcgtggatgccgccgaagaacagcacgcggcagaacgggttgcggcgcagggccgtacccatatcgtaggcggtgttcgggcacacggggctgcccatggtgccgggcgcctggtgcgtccagttccactcctcgttcaccttcatggaaagcagcaggttgatcggcgagcccttgaagcccgtctcctggacgagcttcatccaggcggactggtccggcgtcatgatggcgtcgccggagggatcctcgccggcgaagaactcgttgtcgccttgcacatccatgtaggccggctcggtgaagcgcgtatcgtagcggccggtgaacaggccctcgtcggccatgatggtcttgcggaaggtgtccagctcgatgcgcaggtgcttgccctcgatgaactcggccggaagcccgatgagctcgctcatctcgacggccagctcgtgctcctcttccggagtgatggagtcgctcgcgatgagggcacgaccgtacttctcatcgacgaacttccaggcgcggtcgaaccactcgaactggtcgacgccggcgccggccttgccgaagtagttggccgtggcggcgtagaccggcagcatgcccatgtagtacaggtcgttgcccgaaagcgtcggcgcgtaatcgagaatggtggactgctcgatgacgccggtcagtgcgatgccgcgctcgccgagcacgcgcatgagcaccgagttgcgcatggtgccgtaggactcgccgtacaggtacagaggcgtgttccaacgctcgtgagtggtgagccactgggcgatgccacgcatgaaggcgtcagcgtcgccgtcgacgccccagaccttcttcgggtcgtagccctcggccaccttcgagtagccggtgcccatggcgtccaggtacaccaggtcggtcgtgggcagaagcgagtagggattgtcctcgggcttcgtggggcagggcagctgcttgatggtattgatgggcacgcgacgcgggcccaagccgccgatgttgaccatggccgacgagccgcccgggccgccgttccagcagaaggtggcggggcgatcggacttgtcggccgcatcgcttacgtaggagagagcgaacatgtgcccgatgagcgtgccgtcgtcggtgtgcaacggcagcatctcggcagtggcggtgtatttgatggtctgcttgccgtcagtccaggtcatatccttgctggccggctcaggaacgggctgctccggtttggcgctcttcccgtcgttcatggtgacggtgaaggaggggcttgtctctgccataatggctccttactcgcgttgaggcgcccggccacaaggtcgcgcgcacgactaacaacgctgagcctacacgcatcgccgatgcagaaaggccacggtcgcccccctgtcacgaaacgcgggggcagccgtggccgaatcgtgaactgaccggacagtcagcactttaggcggcgtagtcggcggcgttcttgccggcgatgcggccgaaggtgtagatatcggtcatagagcaagagcccagacggttcgtacccatcttgtggccggccacctcgccggcggcatacaggccggcgataggcgtgccatctacggtgagcacctctgcctcgggcgtgatgtgcaggccgcccatggtgtagtgcacagcgggcttgcaggccatgaggtagtaagggccgtctccgatgacgttcatctcggcgctgtagccgaaatccggatccttcccgtcggcgcagtactggttccacttctcgacggtcttcttcagctcggcggcatcgacgccttgggccttcgccacgtcatccaacgtatcagctttcacgataacgccgcgagcctcgctgttctcgtactcgtcggcatgctgcttgagcagccccgtctcatcggcggccgcctgatcgaacaggaggaaggccacaccgtcggtctggttcttgatgccgttggaaatgacgtcgcggcgatcgagctcttgcacgaagcggtcgccctccctgttcacgaggatgccatggttctccagacgcacgtcgccgacgtacagcagcgcgcccgtttcagggtcgcacaccggataggtctggatatactccatatcgatggtgtcggcgccgatcttctcggccatcacgatgccgtcgccctgggcggccaccgaatcggtggagaggatcttatcgtccatctcggggttgtacttcacgcgcatatcgacgttggagccgaagcctcccgtcgccagcaccacggccttgcatttcacctcggacgtatcgcccgtcacgggattctccactttcacgcccgttacggcgcccgcatcgtcggtgaccagctcgacggccttggtgttgtcgatgagcacgatgtcgtccatgccgttgacacggttggtcagcttcgtggtcatccccgacccggaatgagtgatggggatgatggagcgcttgatgttgtggccgccgaactgcatgaggtcgtgcttccaggagacgccgccctcgtaggtgagccagttggccgagtcgagcgcgccgttggcgatgatggccaccagctccggatcgcccttgttgtcgccgccgacgagcatgtcggacacgaggttctcggggctgtcctctatgccctgcgtcacctggatccagttgccgggcaccgccatttcgcctcccgagagggccgtatcgccaccgaagacgcccatcttgtccataagcacgacgctcttgccctcattggccgccgtaatggccgccgcgaaaccggcaccgcccgcgcctatgaccacgacgtccgcctcttccgggagctcaacgtcgctcacccaagcggctggctcgcgattcttccaatcgtccgcgctctcccccatcgcatccagggcgctgcccacggcggtgaggaaggccatcgaggtaagcgtggcgccgctgatggtgtctaccgcaagcgtctgattgtcgatgatcgcttgggtcatcttctccatggccacatcgcccatccccggcgtctcacgggaatcgagcacggtgatgcgatcgacggcgccgtctttggccgatacctctaccgtgaactcgccatgcttgcccataccggtgccgatagccgttacctcgccatcggcgttcttgtcgttgccggcagcggcctccctcttcttggccgcagcctcttcatggctcatgggcgcacaaccggccagagccagcgtgcctcccagcgcagcaagagcgcttcctgtgagaaattgtcgacgagaacaacctgacataataacctccctaggtcgaacttcgagcgagcgtgctggtacgtcacctgcttcttggggatttcaccgatttggtaccaaaaacgtatcaacattgacggtttttcatcgttttcgctcccttcgatggctccatcatagacccatcacacgagcttgcggcgaagtaccgccatcctctaccgacccgttgccaccctgcatccaagcgttgccgcttctccaccggcccgttacctgcctgtaaaaagacccaccgcgccacgggcaatcgccgaggcgagaacgctgcccgcagcgaggctctgctatgctacgggcaagagaaaacgcgagaagggaacttccatgaaagttgttatcgtaggaggcgtggccggcggcgccacggcggcggcccggcttcggcgcctcgatgaggcggccgagatcgtcgtattcgagcgttccggctacatctcgtacgccaactgcggcctgccctactacatcggcggcaccatcgccgacaagagcgccctcaccctgcagacccccgaaagcttccgcgcccgcttcaacgtggacatgcgcgtacgccacgaagtggaggccatcgacgcggcgcgccatgtggtgaccgtgcgcaatctggaaaccgacgaggtgttcgaagagccctacgacaagctcatcctctcacccggcgcccgccccacgcgcccggcccttcccggcgtggggctcgaccgcctgttcacgctgcgcactgtggaggacgccttcgcgatgagggagtttatcgatgcagaaagcccgcgttcggccgtggtgtgcggcggcggtttcatcggcctggaagtggccgagaacctgcgcgagctggggctggacgtgaccatcgtgcagcgcccgcgccaccttatgaaccccttcgacgccgatgcggccgccctcatccaccaggagatgcgcgctcacggcgtgcatctggcactgggccgttccgtggagggattcgaagagcgcgacgggggcatcgacgttcttgtggccggggaagagccgttgcgcgccgacatggtggtgctcgccatcggcgtcacgcccgacacggccctcgccgagacggccggacttgaaaccggcatcaagggcagcatcgtcgtgaacgatcgcatggaaaccggcatcgaggacatatacgccgtgggcgacgccgtgcaagtgagccacctcgtcaccggcgatgacgcgctcatctcgcttgctgggccggccaacaagcaggggcgcgcggcagccgacgtcatttgcgggctgaacagccgcttcgccggcgcccagggcacctcggtcatcaaggtgttcgatctcacggccgctgccaccgggctttccgaggccgcttgcgagcgcgccggcatcgcgcacgacgccgtggtgctctcccctatgagccatgccggctactaccccggcggcaaggtcatgacgctgaaggtggtgttcgagcgcgagacctatcgcctgctcggcgcccaggccatcggctacgagggcgtcgacaagcgcatcgacgttctggccacggccctgttcgcgggactctccgcgattcagctgaaggatctcgacctcgcctacgcgccgccctactcttccgcgaaggacccggtgaacatggccggcttcatggtggagaacctcgctttgggactcgtgtcccagtaccgctgggacgaggtggccgacctgccgcgcgacgggtcggtgcagctcatcgatatccgcacgcccgccgagttcgagcgcggcgcccttcccggcttccgcaacatcccgttggacgagttgcgcgagcgcctaggcgagctggatcccgcgctgcccgtgcgcctcgtctgccaaagcggcctgcgcagctacgtagccgcccgcatgttggcgggccatgggttcgccgacgtgagccatttggccggcggcctgcgcttccacgacatcgtgacaggcgacgcgcgcctcatcgagcacgccaccccctgcggcgccgacgcccgctagaggcgcccgcacgtaccgctttctgccaaagcgagaactcgcttagggggatgcgtggcggtgcgtatcccctttctaccccagcgccacatcgagcaccatcatgagcacgaagccgaaggcgacgccgatggtgccgatgttggtgtggtgaccttgctgcgtttggggaatgagctcctcggtgaccacgtacatcatggcgccggcggcaaaggccagaaccaccggcagaagcggggtcacgagccccgtgatggccaccatgatcgccgcgcccagcggctccacggcgccgcacagcgtgcccgccagaaacgcgcgcggccgcgagaggccgttggtggccaagggcagcgacacgatggcgccttccggcacgttctgaatggcgatgccgacggaaagcgccgtcaccgaggccagggtgatggtggggtctcccgccagaaagcccgcgagcaccacgcccacagccatgccctcgggcaggttgtggatagccagcgccgccagcatcatcgtgggcttcttcagcgtggaagccggaccttccggttcatcggatcctacgtgcagatggggtgtgaagtggtcgatggccaaaagcaggaacatgccgccgagaaagcccgcgcccacgggcagccacgagggcaccgcaccgccctcggccgcctcgagcgccggcacgatgaggctccacacgctggcggcaatcatgacgccggcggcaaaacccaaaagcgccttggtgaagcgctcggacatgccatggcgcgcgaagagcacgagcgccgcgcccagcgtgtttcccagaaatggcacaacaagcgccacgagcacacctgcgaccacgggattttccatcgttgcatcctttccaacccttttgacagccctctcggcgctgccgcggaacaagcatagcgcaccaccgccgaggcggcggcatcaaccttcatgcgttgttgccccgtagagaaccaggcgtgcgacctgctacactggcatcggcgcccaagggggacatcctgcgacatggcgtcaacacgattcggggccagccgacgacagccgcaacgaggagcgaaggagagacggtgcgccagacctactacgtcatagacagtcgcctgtgctgtcgatgcggggcctgccagaaggtgtgcccccacggcgcgctcacgacggccaccaccgtgcccgtcatcgaccaggcgctctgccgccactgcggcatgtgcttccgcgcctgccgcctcggcgccgtcacgcgcccctacgagctgtaccacctgaagaagggccgccgccttccctagcatgtttcgcagcgctttgaatcccctccgtaggggctgaccttggtcagccctcccgggcgggacaaccgcgcgcgacaaagcaggggcgaccaaggtcgccccctacggaatagcaacttcaatacgaaagggcgtgggggatgaacaggcgctggtaggtggcggtggcgtagcggtcggtcatgccggcgatgtagtcggtgacggcacgcagatcgtcgccctcggagatggcacggtagtcctccggcacctcgtcgatgtgcgcggcgtagtagtcgaacagatccgccagcaagtgcttcgccttctccacctcggccatgaccgaaggcgccgtgtacacattctggaacagaaacgcccgcagctccatcatggcgtcccacacctcggggctcatggcgatgtccccggtttccgccgaggtacgcaccatatcggtgaccagcgtctcgatgcgggcggagtggttggcgccgagcacccggtgggtcgtatccggcagatcggcctcgcgcaggatccccgcgcgaatggcgtcgtcgatgtcgtggttcacgtacgcgatgcgatcggcggtgcccacgatgcgcccctcgcaggtttcggcctgcaagtcgcccgtgtggttcaggatgccgtcgcgcacctcggccgtcagattcaagcccgcgccgccgttctcgatgcgttccaccacgcgcaccgactgctcgttgtggcgatagagcgccgcggcctcggacgtgtcgggggcgacccccttgtggcgcgcaaggcacgcggccagcgccgcttcgccggtgtggccgaagggggtgtgccccaagtcatggccaagcgagatggcctcagtcaaatcctcgttcagcccgagcgcccgtgtgatggtgcgggcgatctgcgccacttccagcgtatgggtgaggcgcgtgcggaagtggtcgccctcggaagcgaggaacacctgggtcttgtgggaaagccgccgaaacgatttcgagtgcagaatcttgtcgcgatcgcgctggtagtcggtgcgcagcgcgtcaggttcgctggaggagcggcgcccctcggtgccgtcggcgaaggcggcctcctcggagagcacctcgtgctcccgctgctgctggtcttcccgatacacaacgcgcatacatcctcccttccacggatgttcccagtgtagcaaattccagaaagcgcgttcggcaacaggcaagcaacgttgagtcaaaagctgaacgatggaagccgatcgcggcgtcgcgcgggcgtttcagggagtacccttgagctatcgaccgtccaaaggggtcgaaggagccgaagagaagaagcagccatggcgtttctcaggatacataaactgaccgagaaagacgagataggctacttcgcgccgcgcacctgggatttctggcgcgccctcatcgtgtgcttctgcctgtgctgcattttggggcattggctcgagatgccctactgctggctcatggaccgcctcttcggcatcgtggccgacgactacgccgtgtggaccgacccgtggtatcacccctactgggtctacggatttggcgcggtgttcatgacgctgctcatcgagcctttgaaagagcggttgatcctgcaccgcaaaacactgtggggcgcgtttctggaatcactcgtcattgctattctcgcggccatggtgctggagctggtcatgggctggctcatcaaccagcccgaccccacgaccggcgagtaccccttctgggacaactcccaactgccgggtaacgtgttcggccaggcgtggctcgtgaacgacttcttcatcggactggcggccatgatatatgtatgggtcatcttcccactcgtctgcgagggcttctcgcggctctcccccaaagcggccaacgtcgccttcgccctcatcatcgtcggcttcgccgcctgcgtgaccgcctcgtacctggagctgaaactttgggagaagtactagggggcaatgcggctcgcccgccctctcgcattccgaagcgccaattttgcgcacccgcgctgcacaggcacgcccaagcagatacaatagggcgatgcaactgacacggggcacgggcgcaaggaggcgtttatggaagcaagcgggcaggcgtacacggaggcactttccgagctgtacccgacacgagccgacgtggcggcggaaatcgcggagctggaggggcgccttacgctgccgcgctcaaccgagctgttcgcctcggacatccatggcgagtacaacgccttctcccacgtgctgcgcggtggctcaggcgcggtgcgcgcgctcatcgaggacgttttcggcagcacgctgaacgacgacgagaaagccgcgttgctcgcactcgcctgctatcctgccgaacattgcgcctacgccttggagcacgtcgaagatgccgacgcatggcttgccgaagccgccgcgcgcctggccaaaatcgcccgtcgggccgccggcaaccgcaccatcgacgaggtgcgcgtgcttctgcctgacgacctcgccatcgccgaggaactcgtcgccgggcgcagcacaccggcccggcagccctatcgcgaggcgatcatcgaaagtctcgtcgcctccggcgagggcccggccctcctggagaccctgggcacgctcatccagcacctcgtcgtcgaccagctccacctcatcggcgacgtgtacgaccgcgggccggcgccccagctcatcatggacgagctcctttcctgccccaacgtcgatgtgcagtggggcaaccacgacatcctgtggatgggcgccgccgccggcagccccggcagcgtggccaacgtcgtgcgcatctgcgcccgctacggcaacctgtccattctggaggacgcctacggcatcaacctgcgtcccttggccaccttcgccgccgacgcttacgcgaacgacccctgcaccgccttcgccctgaagggcaaccccgggctttccgaggccgagacgcgcctcaccgagaagatccagaaggccatggccgtcatccagttcaaggtagaggcggcgctcatcgccgagaacccctcgttcggcctggacgaccgcaaccttctgcacctgatcgaccacgaacgcggaacggtcatggtggacggcgtcgaatacgagcttctggacacgaccttccccacggtcgagtgggacgacccctaccgcctcaccgaggacgaggccgctgtcatcgagcagctgtgcgccgcgttcaccggcagcgagcgcctgcagcgccacatgcgccttttcctggatcggggcagcctgtacaagatagagaacggcaacctcatgctgcacgcctgcgtgcccctggccgccgacgggtcgcttctggaagtgaccctgttcggcgagacctaccggggccgcgccctctacgacatggtggacgcctcggtgcgcggggcgttctcggccaccgacgcggccgagcgcaagcgcgggctcgacatgctgtggtacctgtggctcggccctggctctcccctgttcgccaagagcaagatggcaaccttcgagctgtacctcatcgccgacaaagcggcccgcaaagaggtgaagaacccgttctactcgctgctcgatgacgaagcagtcgtcgacggcatcttccgcgacttcggcatggacccagccacctcgcgcatcatctgcgggcacgtgccggtgaaggtgaaagacggcgaggatcccgtgaaggcgaacggacgggtgctgtgcatcgacgggggcttctcggcggcctatcagaagacgacaggtctggcgggcttcacgctcgtttcgaacgccgaggggctgttcctcgacgccaacgagccgctcgcttcccgtgccgcagccgtggagggcaccgccgacattcgcgcggagcgtcgggtgctcaccgtctacgacacgccgcgcaccgtggccgacaccgacgagggcgcgcgcattcgcgaacgcatcgcgcttttgcgcaccttgctctaattgcccgcgcgccggctccaattggcccactctcgggcaattggagccggcactgcggcgctgtcccagaaacgccaagacgccgatcgcttcgcgcaaatagccgccatcgccgcgaagcagccgtttgtgcgcatgcacgaaatgcccctcgctaatccacccccaatgggctacacttcgtccttgtcgcatttctcatacaacgattggggtggtttgagcttgtctgccaaagatgcgctccctccgggcagcgaagacttttttccgccgactcctcctgacgggacgatcggcaacctccgcaagagcaagatcagcgctcttggcattgcgttcatgctcttctgcctggtatcggccggtgccttcggcatcgaggagatcattccctccgcaggccccggcctcacccttatcattctcatcgtgctgcccttcgtttgggcgcgccccatcagccgccttgtggccgaagccaacgccatcctgccgcgcgagggcggcatctacgcctgggccaaagagaccttcggggaattctggggctttcaggccggctggtggacctctatggacacctacatctcatcgggcgcctacatcgccatggtcggcggctacacctcgcagctgctctcgttggacgatgcaggcaccttcggcgtgaagctgctcgtcgtggcgagtttcaccgttatcaacctggtgggactcgtggaagttgagcgcatcagctcgtttttctcggtgctcattatcctcgtgttcggcatggccgtcgtgttcggcctcgtcaactggcaaaccaaccccttcgaccccatcttcgccacgccggaagcgcccatgagctgcttggtggactcgctttccatcggcatctggatgtactgcggctacgagtgcatcgccgccatgtccggcgaatacgaggactcgtcccgcaatgtggcgaagggcttccgcatcgcgctgccgctcattgccttgtcttacgtgctgcccacccttgcctgccttgcggcttacccggccggctcttggacccaatggggcatcgacggcggcttttcgtccgacgtactgggctacggcacgatcttctcgacggtgctcgggcactccggcgtcgtgctgttcctcgttatcgccattatgagccagtgcacaatttacaacacgtatctggcaagcgggtcgcgcagcttctgggtgctctcggaggacaatctgttccctcgcttcatccgcaaagtcgatcgcgcgggtcgcagcccttatatcggcgtgctcaccattgccatctcatcgctcatcttctcgcagttcgatttcaccaccatcatcgagatgaatatcatcttcatcttggcgcgctacatgttcctcggcttcatcgtcctgaagctgcggagaatgtaccccgtacaggatcgtcctgccgacatgttcgttatcggtggcggcaaggtgggcgtgcgtctgtactcggcgctggctttcagcatcgccacgttcgctctgtgcctgaaccccgtcgggagcttcttcgccaccgtggcgttcctcgcctcgggcgtggtggcctacatcatcttcaagaagatctacggaggccttaccgtggagaacccggtggcctacccgcaggatccgcgcacgggtctcgctgtgggcgatacgcgccgcatcgggctgttcgccctcatcattgccggcctgtttgtgctgaacctgctgatcaacctgctgtttttagggtagagtccaagaagcgcgaccgtccgaggcggctactcgacggcgaccagcgagaacacctcggcgtcggtctcggcggcgatggcagcgcgggggttcagaaaggcgagctccatgacgaagccgaggcccgccagacgcgcgccgcttgcgcgaacgagtcgcaccatggccgtcgtggtgccgcccgtggccaccagatcgtccacgatgagcaccacatcatcggaggtgagcgcgtcggcgtgaatttccagcacgtcggtgccgtattccagcgcataggactcgcgcagcaccgtgcgcggcagcttgcccggcttgcgacagggaacgaacccggctcccagccgcagcgccacggccgcgcccacgatgaacccgcgggcctcggcgcccaccaccttggtaatgccgcgatcggcgaaatgggccgccagatcgtctaccatggcggcgaaggcgtcggcgtcggcgaaggccggcgtgaggtctttgaacacgaccccgggcttcggatagttcggagtatcgacgataagttcctcgtaggggcgcatggggcatcctttctcgctgggcccattttcgctgagacgcacccgcctggcgaggtttcggccaacttcgaagcttcactgtaaccgtcgcggtcctctcctgtgggggccgtgagacgaccgacgccccctagcgctccacgccgtgacgcgcgctgttttcgcgctgcggcatctcataccgcagcagcggctgttctcgcccagcgctccacgtccccgcgccagctgccgatgccgccgatgttgcgcgcatcggtgtagcccatctgcttgaggccgccgaccgcctgctggctgcgcgccccgctcatgcagtacacgaacagcggcgtgctcttgtcgggcacctcgctcgcgatggcgccgatctgctgcagcggcacgttcaccgcgccgggaatgtggccgcccgcgtattcccccggcgtgcgcacgtcgaccagccgcgcgccgggcgtcgcgcggaactcctccacaccggcgttgatatcggccggtttcagaaaatccatcagtcccatcgctgcatcctccttgtgaagctgctcttgcttgctgccacttgtgctactctgcattctcgcatattcgcacgccctttcggacaccagacttcaacagacaggaagcatctatggatagccagcgcaaacgcgaactgaaggaagcgtatcgcaccagtcggccgcctatgggcgtgctgtcgtttcgctgcgtgcccaccggggagagctttcttctggcatcgcgcaacatccccggcgacaccaacggcgtgacgttcaagttgaactcggactaccaccccaaccggcatctgctggagctctggcgacgctacggtgaggagaacttccaggtggaagtgctggaagagctcgactaccgcgacgagtcggacgatcccgccgactacaaggaggagctggagcagctgcgcgatttgtgcctcgagcgcgacgagagcgcctcgcttctgtggaagtaaccgactgcacgcggctgaacgagcggcttcgcgcaaggtaaacagctgcaccaaaacgaaccttcgaggttctcactttccttacaggtgacggcacgtgaggggcatcagcgctcgcgcgcggcacaatggggccaacgcgagaaaggacgccccatgagcacttccaccccttcgacttcccacggtgccggcaccggaagcaccgcttttcctgccagcggctcggccagcccggttgccaccgctaatgccgccgacgccgccaccgactcccccgccgccatcgaggccggcatcaaggccaacgacgatcgcgccttcgaggaatcactcggggccatgtcgcccttcgaggtgaagaacctcctggtgaagatggcgaagaagggagacgagggcaccacgcgcaccctcctgaacgccggacgcggcaacccgaactggataaccaccctgccccgcgaggccttcttcctgctaggcaccttcgccatggaagaagcgcgccgcaccatggacgagccggactacgacctggccggcatgcccgccgccgacggagccgccgcgcgcttcctcgccttcctcgacgagcacggccgcgagaagcccgcgcagttcctcaagcgcgcctgggactacctggacgccgagggcctggccggcgatgagctcgtccacgagtggatcggcggcatcgccggggacgagtaccccatgcccgaccgcatcctgcactacacccaagagatcgtcaaccgctacctggtgaaggctctggacgacggccacgcgcccgcgaccccttacgacctgttcgccaccgagggcggcacggcggccatgtgctacctgttctacagcctgaagtgcaacttcctcgtgaatcccggcgaccgcatcgcgctcatgacccctatcttcacgccgtatttgaacatacccacgctgaacgactacgacctggacgtcacctacatccaggcgaacaccatcgatgcggatgggctccacacctggcagtaccccgacagcgagctggagaagctgcacgacccgtccattaagctcttgtgcctcgtgaacccatcgaacccgccgtcggtggccttggacgacacctcgcgggccaagctcgtcagcctcgtgaagaacgaacggcccgacctcatcatcatcagcgatgacgtctacggcaccttcgttcctcactaccggtcgcttctggacgatctgccctacaacaccgcctgcgtgtactcgttctcgaagtacttcggagccaccggctggcgtctcgccgtcatcgccacggcgcagaagaacgtgttcgacgacctcatcgcgaagctgcccaacgacaagaagcgggcgctcgcgaaccgttatgcgtgcctcaccgaccatatcgagaaggtgaagttcaccgaccgcatggtggccgactcgcgactggtggccttaaacggcacggcggggctcggcacaccccagcaggtgatgatgtcgctgttcgcgctgtactgcctgctggacgatcacgacgtataccgcacgaagatgcagcagctcgtgcagcaccgtctgggccttctgtggaagagcctaggctggacgctcacgcccgaccccgagcgcgccggctactactcggtgatcgacctgggaatctgagccacgcgcctgtacggtgccgacttcttcacgtggctgaagaagaactacgactcgctggacatcgtagtgcgactcgcccaggacaccggcgtcgtgctcatggacggccacggcttcgacgccccggaatggtcggtgcgcgtgtcgctggcgaacctgaacgccgacgactacatcgccatcggccagcgcctctcggcgatgctcgacgagtacgccgaggtatggaagacggaggggcacccggacaagtgacagcagtcgatcagcccccacccttgcacttcggatggcaatcaacctgagcgtttggggattcggattttggttgccataaattcggattttggtagaattctattcggattttggtaaaactcctgataggaatcaccatgggtcaaagctccgttaaaccagaaggatacctgccgcgtattgtcgacgagcaagttgaacgctacttgcgaatctttggcgctgtcgaaatcgagggcacgaaatggtgcggcaagacgtggacggcgcggcagcacggcgcctccatcagctacgttgacgagcagctggcactcgcccaagacgatccctcgctcatgcttttgggagagaagccgcatatcatcgacgaatggcaacgtgtccccgccatctggaacctcgtgcgtcacggcatcgacgagactcggggcctgcgcggcggctggattctcaccggatcgtcgacgccgccggatcggcagggcgacgccgaggcggccaaacggcacagcggcgcggggcgaatcggacgcatcaagatgtcccccatgacgctttccgaatcaggcgattccgaaaacatcgtctctctcgctcggcttttcgaggaacctcccgccgccgccatcgtagaggacgacacgcaacggctcgtcgaactagcatgcaggggcggctggcccgaagcgctcgacctgggcgccctggatgcgcagacgatagctcgcgagtatctgaccgccgtatgccatgaaagcgcgccggaccacaacctcgatccttttgtaaccgagcgcgtcatcgcttcgctggcgcgcaacctcgggcaggccgccacgtacggcaccatcagagaagatgccctgggatcgacgggcttcgacctaacggataggcagatcggcgaatacttgagcttcctgcgccgcatttacctgctcgccgaggtacccggctgggaacccccctcccgctcgaagaagcggctccaaaccaagccgaaacgctatctggccgatccctcgctggccgtcgccgcgctcggcttgtccccccaaggcctcatggaagattggcagaccttcgggctgattttcgagaacctctgcctccgcgatcttaccgtgtacgcccgggcccacgagctcgctcggccgattcccgtacgctattaccgcgacgattccggacttgaagtggacgccatcgtggaattggccgacggacgttgggccgctttcgagatcaaaaccagcgaaagcaaagtcgctcccgcagtcgccaatctcaaacggcttcgcaagaaactctgcgagagccctcgcgtccagatgaagccccccgccttcatggccgttatcacggggatcggcaagtacgttcgcgtcgtcgaggagggaatctacgtcatccccatccgcgcactgacggcctaagcggcaagcggcgcacatcaacctatcaatcaataagggtcgaaaatgatgcagagcaacatcgtcaaaaacgatgcaaaaatacgctgcactatcgtcaaaaatgatgcatcatcccaggtaaatagaatattgatctgcgagctcatcgatgacaacattggagaagatggttgtaaggtgacattgccgcagttcatggccatgttcgtataagatcccattttcgcatctacggcatggcgctcttgaacgcgcggcggtcttctaggcgagcagcgttggcgcggcgtcggcgatcctgggggaagcgtcgtcgcccagcgtcgctcgggcgtcctccagaagggtcagcagctcctgatgggagtgaatgtcgagtttgcgatagatactgcggcgatgggtcttcaccgtatccaccgaaatatgcaggtattcggcaatgaaggcctggtcgcgcccgcgcgcgagcagcgagacgatctccgtctcccggggcgtcaacccgtactcgtggacaacggcggcgacggccgccgccgaagcgttccccggcgtattctcaccatcgattgcagcgtggctcattccccagccgtccccgaccccggcgcccccgaacagcagcagcgcactgaaaagcacagcgaacacggcgatcatctgcacggcggccgccccatcggcgcccccgatagaaccgagaagcgttccgcacgccatgcccgccacgcgaccgcccacgaaggcgcacatgatacagggccatacccagttcgctgagagatccttgtgcttgatcacccaaaccgcaagcatccatgagaggaacatgatgaagcgatagccgacctcgtgcacgataaccgcgcccaaggtctcccccacaagggccatggccaagtggcccaatgccagcaaaggaaaggcgataacgtagaggaggtggttgaaatcgcgattgaggcgccagaggaacacgagcgcgaggaggccggcgagcacaaacgcgatcccctcggcgaggaaaaacccctcctgggaggcgaggactaccgatttctggacgaaacccgtcgacagcccttgcaccgccagcgtcgccacaagcttccacgggatcgcaagaggtgtcttctctccgtagcgtgccgccgcgccccggccaccttccacgcgaagggcggcaaaggagacgtcgacgagcagtaggcaggcgaacagggagagcagcgggtcaagcatggcggccagggcgatcgcgagagcggcgccgaacatccccaccagcagattggctgccgcttgtcgcgacggagcgccggcaaacaggcgcacctgccctaccgccagacaagcgagccccaccccggaaaggacgttggccgccaccatggggacgatcattccctcgccggctccgctcaacgcgaattcgccgatgatgcccgtcaccagaaggacgaccacaatcgcctgatagcgcagcccgtgaaaaacgatgcggcgccacgcatacagaagcgcgaggccgagaaacgcaagggcgttggccagacccgccacggagagcccaagaaacacatcgccggtcagcacgatggcgtggttggaaagaacgggatgctggagcaccatcaccgtaagcacgatgtaggcagccggtccaaccgtgaggcgaaggctgagaaggccgcgccaatcccgaagcgcgccattgccgttgcccgcgctcgttccgagaagcaccttcgccatcgcgactctccccttccccatcgtccgcctatgccgcagccgacattgtaccgaaagagaggctccggataccatgtcagctgctaaatgggggggcgttttgcgggacgttaggctttggcgtattccgccgccgccttgcccatggtgcggcccgagtacacgcagtaacccagcagcgagcccggcacctcgatgttgtagctttccatcgtgagcttgctggcgtccgagccgccggcccacaggccggggatgacggcgccctcggcgtccacgacgtggttgaagggatcgatgtcaataccgcccagggaggtctggcactccagcgtctcgcggaacccatagaagggcggcgtcttcacggggatgagatactcggcagcttttccgaagtcctcgtcgacgcccttttcgcacagctcattgtagcgctccaccgacttcacagcctcctcggcgtcgatgcccatctgctcggcaagctcctcgatggtgtcggcgcgataggccagcttggcaccttcgatctccggcgcctcaagagcctgctcgatctcatcggccaagttcgtcagcggcgtatgggccagggtacggtaccgcttcagaggggcgccctcgttgcagagtcgctcgaactcctcgccgtcgaaaatgctgaaggctttcttttgggccatgttggcgcgcacaacgagcgtcatgctctgggttccaagatcctcccaaacgtagcgatgaccaagctcgttgagccacaagaacggctggccagcggaaatgacgaagagatcggtgccgcgcacatcgccgacggatcggctggccgtgaggcaggccgccggcgctgaggcagcccccatttcaaaggccatgcgcatgccgtcgccaacgttggcggggttcgggggcgtctgcatgtaggtggtgtcgtagcccaccaactcgcgcaccttctccgtatcgcccgagaaaccgcccgaggtcagaatgaccgccttggcattggccaagatgatgccttcgggactctccgcgtaagcgcccaccaccgcgccgtcctcctgcttcagacgaatggccggcgtgttcaggtgcacgtcgatgcccagcgtatccgtcgccgcaataagcgtctctatcatctgctcacaatggccgccctcgccatagtggaacacctcgggagaaccgaacatgctctccacgcgttcgatgaccacgcccagatcgagcagccacgcaacgctctcgccagagccgtcgatgtagttcgaccagtagtcataggtgatgcggaaattgttgaattggaattcgttggcgatgatgtcgatcttgcggggactctcgatgccgagctcggcctgcttgggcgagttcacggcgaacaagccctcgggcatcatgccgttgccgcccagctgcgcctgcttctcgaagaggatcaccttggcgccgttctgggccgccgaaatggcggcgcacaagcccgaggcgccgccgccgatcaccacgacgtcgacatcgatggtgatatcgggcgtgggctcgggggttacctccccgccctcggtcgccgtcgcggaagcctcccttcccgtctcggccagcgcctcgcccgcatcggcctgcgcgcccttcggggcgcaccctgccagcccgaaagcggcaagaccgcccatggccgccgcccctgtaagaaagttcctgcgcgtgatttccatgattcctcctttggactcctgccctcgttgatgcaacggtcccaggatgtcagcccctgcgaccgcgtcgttgcaggacccatgaaaccagcttgcgtctttgggagaaatcgcttccgaggtggtaaatcgccttccgcgccttatctaccccccccaagggtgatccttcacctgggaatacgtcagaatcggctggaccgaaaaggcttatcgccttcccgcggccaacacacatgggttacaatgccttcaatctcttcagataggagcggtccatgtttgtttccgatggttacgtatgcgccagccagcccactgcaaccttgagggtcacggacgcgcgcgacgttggtaacctctgcatgctcgtcaccttcaatacgggagaaacacgccttctcgacgccactgagctcactgggttcgaggctttcgcacctctgggaaaccagaagaccttctcatcgttctccatcgatcatggggtactgcaatggctcgatggggagatcgatatcgcccccgaggggctctacctccgctcattcgagtatcctgccgagatgatcgcataagcacggcgcagagccgcttcgcgccgcccaacctcattcagtttcgactacgcattgcacgatgcgctagggtatgatgttgtgcaggtagccgtagccttcggcttctagtttgtcggcggggataaagcggagggcgctgccgttgatgcagtagcgctggccgcccctctcagccggtccgtcggggaagacgtggcctaaatggctgtcgccagcggcgctgcgcacttccacgcggggcataccggggatggactcgtcgagcgactcctcgatgacgctttccgccaacggtcgcgcaaacgacggccagccgcagccggcgtcgaacttgtcccgcgagctgaacagcggttcaccggtgaccacgtcaacgtagataccgtcttcgaactgctggtcgtagggatgcgtatggggccggtcggtggccgcccgctgggtgacgtcgaaggcctcgggcgtgagtgcgtcgcgtatctcctcgtcggagggccgcacgtacccctgctcggcgatggcgaaatcggccgcatgttcttttacgaaggcgcgggcgtcggcgaggttcacgtggcagtagccgaaggggttgcggcccagatagtcctggtggtaggcctcggcgggagcgaagttccgcaggggccccgcctcgatgcgcgggttgcggccactggcgcacgcaagattcacgagcaccgaggtcacggcggcccggtcggcgtcgtccgtccagtagatgcccgtgcgatactgggtgccgcggtcgttgccctgacgattcaacgagaagggatccaccgtgcgcaggtaggccgccaacagcagaggcagcggcagcacgtcggcgtcgtaggccacgcgcacggtctcgaccgctcccgtttcgcccgagcacacctcctcgtaagtggggtcggccaccgtgctattcgcatagccgacttcggtttcaagaacgccgggaatgcgcttcaaatacgcctcggtgccccaaaagcagcctccggctagataaatctcgcgctggttcatagggtcctcccttcgagcgcgtcttcgtgtgacgccttttgtatctaaaggtctcgttttccggcaccgcacctctgaggctcctggctgggattttgcaacgtcttcccagttcggtcatagtgccgcaaaagcgagttttacacgcatggcgacgcgtcagccgctacttctcgtcggccacgatgagggtgccggtctcgccgcgcaggccggcggcggcgtggtcgagcgaggtgatgacggcgcggccgcccgggtgcgcctcgacgaacttcacgcaggcctgcaccttcggcagcatggagccgggcgcgaactgtccctgctccatgtaggcgcgggcctcggagacggtcatggcgtcgagggccttctgcgtcggcttcccaaaatcaaggtagaccttctccaccgccgtcaggatgacgaggatgtcggcccgcacgcgccaggcgaggatcgcgctcgtgaggtccttgtccacaatggcgtccacggcggtatgcaccccgtcgcgcaccgtaaccgggatgccgccgcccccggccgcgatcaccacgcagccgtcttccataaggtcgcggacggtttccagctccacgatgtcctggggcacggggctcggcaccacgcgccgccagccgcggccggagtcctcgcgcacctggtatcccgtggccttcgcgaaggcgcgggcctcggcctcggtcatgaaggcgccgatgggcttctcgtaatccttgaaggcggggtcatcggcgtcgaccaccacatgggtcggcacattggccacctcgcgcatgatatcctgccggtgaaactcgttgcgcagcgcgcaggagagttgagcgccgatgtatccctggctcatggcgttgcaatcggaaagcggcataggcggcacctgggcgtccttgtccttcgacgccacttcgaacgcctcgtcgatgatgccgacctgcgggccgttgccgtgagtcaccacaacgttgatgccctctttcaccatgcgggcgaggttcttcgatgcgccctccaacagcttcagctgctcgcccggcgcatcccccagggcattgccgccgagggccaccaccacgcgcttgccgtccagttcgctctgcagcatgttcgcaactccttcctcaggtttcgctccaccgtagcaaaggcgaggcagaagacgctttgcgaacggcaagctggcacggggccgttgccgattgcgccgatgggagggacgccgccacgcgatcgcctaggccgccgcctcgatcgtcggaggaggtcgacgcgaacgacacgcgaagatgcgaggcgcgccgaagccgcacgcccttggcgagtatccgacccgcagcctgtggtagcatagcgctatccgccaatgcacccttacatcggaaggagcttccgtggcgttcgatttcaagaaggaatacaaggagctctacctgccgaagcgcacgccggaactggtgagcgtgccgccgatgacctttgtggccgtgcgcggcgagggcgatcccaacgtggagggcggcgcctacaaggaggctgtcggcgtgctgtacgccatcgcctacactatcaagatgtcgaagatgggcgatcaccgcatcgacggctactatgatttcgtggtgcccccgttggagggcttctggtggcagccgggcatggaaggcatcgacttcgcgcataaggcgacgtttcactggattgccggcatccgcctgcccgacttcgtgacgcccgaggagttctcgtgggcgaaggaggaggcggcccgcaaaaaggggctggacacagccaccgccgagctgctgaccatcgaagaaggcctgtgcgcccagatcatgcacctgggcccctacgacgacgagcctgccacggtggcgctgctggacgcgttcatcgccgagcaggggctcgagaacgatatgtcggacacggaggcggggcgccaccaccacgagatctacctgtcggatccgcgccgcaccgcgcccgagaagctgaagacggttctgcgccatccggtgcgaccgcgaggctagcgcgtaagcttcatctccacgtgcatgatgccgccgtcgtcaaactcgtcggaggtgcgcacgaaaccgagcttctcgtaaaagccctgggcgtaagcctgggcctcgatagtgatgacgtcggcgtccaattcctgctgggccacgcggatggcctcttccatgatgcgccgccccgcgccgcacccgcgctccacggcgatgacgcgcccgatggaggccgtggggtgcgtgaccccggccggcagcacccgggcataggcgccaagcacgccctcgtcggtgcggaagtacaggtggatggcctccttgtcggcgtcgtccacctcctggtacgggctctgctgctccacgaggaacaccgcgcaacgcagcttcaaaagctcgtggtactcgtccaggctcaattcgttgaaacgtttcgccaccaattccacgccagcctctttcttgatcggacaaccgcagaacccgctggaacgagcgcagattccacggttgccacgtacttgctcatggggctattgtatcgtgcctattcgcgagaagccgcgacactccatcgatcgctcccgacaatcatccgaggttgtctgggcaagaatttcgacttgttagacttccgcccaaacgattgcaagactttgcctgatcgccccttcccggaatatagcgcgatcaggcatttcttcagtcgtcttttacgcagctccctccgaggccgacgcgcggccgcaggaaatgtctaacaactcggaattttgtcctgcgcaaaacgcttctcttgtctccaagggtcacctcacctcttgacaactcaggaatgcaatatataatttgcaaatggaagatatatcttgcattacccgagaagcgcgagagggatccaagagagcacccattcaagcgcaacatggtagccagcgatccagacgggatgatcaaggcgctcgaatccggagacgcgccgttcaatcgcaacatagcagcgagcgcgcagaaaggagcagaacatttcgtgaacgaagagaaaaacctgcggatgagggacgcacgcacacggctcggcctttcccaaactgacctggctgagcacgtgggcgccacgcggcagacgatcggacttatcgaggcggggcgctacaacccaagcctcaagctttgcacagccatctgcaaaaccctgggcgtcaccctgaacgacctgttttgggacgaggatgccgcctcgtaggcagcgcttgcgcccggaacaaaaccacatcgcattggcaagaccggcgagcgcaaagtcacttcgccgcacaatcaactgtcattcgacgtggagttatccccctgcaacggcacaactttggaacgaggaggttccgtcatgaaaatcatcgaccgctggaacgagttcatgggcccgaaagacgagcgcctggctgcggaatcaaaccgctgcgccgccgtgggctacaccattctcatcatcggctcggccctgtgcctgtactacggcatcatgttgaaccaggtggccgagacgaccggccatcccctgctcacacctttgggacagtccgtcttccccgtggacacggccctacttatcatcattctcgcctcggggctcatctccacgtacttgcaggtgcgcagcggcaccttcgacacccatacgcgcatcgcccaagcggatcgcattccctgggactacgtggccctggtatcgcttctgtgcggcctcgggctgggcgtcacgacgacggccatgcgcattctcgcggaagtgcagatcgtcggcgtcgagaacgtgacctggggcggcgacatcgccatcggcgtcgtctacttcactttggcgttctttttggccttcggcctgtttgccgccacgttccacagcgccatcgaccgccgtcgccagctggagcgagagctggaagagtagccggaggcgcacacccgacagcgccctcaccacgcgccaggcgctgaggcacggcgctcactgcgccagagcgaactcgcggatggtgcggtcgacgggctccatgagggccacggccaccgcctcgtcgcggcagattcgcatggcgccgccgcggtagtcgagcaccacctcgccggtcacctcgtcccacaaaagcagcttcgagaagaagtgcccgttctcgtcggcccacccgcgcgcggccccttccaaatagtcggcggcgaactggaaggcgcggcgggactgcagaaacgacagcttgccgcggatgtcctctaagaagggagcgccatcggagtccacgacgtcgccggcgtggttgcgcaagccggcgatggccaccaccgggcgatcgccatcaatgatggaaatctcagccttcaccttccgcaaccggcgcggcgccggcgcatcggcaagccaggtgtcggggcgttggggctccatgccggccgcatactcctcggccagcgagtgcatggccgtgcgcaccgacgggtagaacttgaagtcctgcatgagtcggcgcagctcgtagcgggtatagtggtcgctcgtctccttgatgggccgcacgagcttcacgtgcacgccgcgcgccatgagggaatccagcgtctcgtccagcttgtcggcggcggtcgtgtcgatggtgtcgagcttcgacagcttcaggatgagggcctcgttgccggcggcggccgcctctatctcctcctgggccttcgcgatgttcatgaaggacaagtcgcccgagagcttcaccgtgccgagcgcgtagcccacctcgatgtccttcttcgccggcaggtcgtcgggcttgtagggcaccgcgcccagaagctcggggccggaggtgtcgatcttctcgcggccggcgcgcagggcgagcgccaaaatgaagccgcccaggatacccgccacggcgccgagcaaaacgacgagggccgccgaggcggcaaagaccatgaactcgcggcgcgttttgaaggcgtaagtggtgatcttcccgaagtcgacgatgtcgagcagggccaccacgacgatagccgacagggcgcagcggggcagaaagcccatgaacgagccggcggcaaaggcgaccacagccacgatgagggccgagaacacgctcgccatctgggagagggagcccgaggcgatgccggcggccgtgcgcgacatggaggccgagcacggcgggcagccgatgagacccacgaacgcgttggccaggccgaaggtgcgcatctcgccgtcgggggacggcgcgggggcgtcgcccgccgagaacgcctcgacgcacagcagggattccagcgatactaccaccgcgatggcgaaggcggccaggagcagcgccacaatgtcgagaccctcgggcagcaccgtcgcgatatgggggagcgtgcccgacacctgcgggagaaagacgatgggaagccccgccgccgcaagcccgttgcacagcagagcggccgcgacgagcaccacgatggccgagggcactttcgggaagaagcgcttcaggaggtacatgccggcgatgcacagggccgacaccaccgcgcaggcccacgaggcgcccggcaggcacgagacaatggcggcgaccttcgacacaatggtaccggaggtgtcggccgtcgtgcccagaagcagcgggatctggccgatgaccaccgtgatcgcgatgccgaatatgaacccgtgcatgaccggcagcggcatgcggcggatgagtcgccccgcccccgcccagccaagcagcagaaggaacagcgccgtgagaagcgtgagcaggggcatggcggcgacgatggcgtcctggccgacgatgccggcagcggcgagcatcgaggcggtcatggcggcggcggccgaatccatgccgaagaccacgcggcgcgtaccggtgagcagcccgaaggcgagcggcgccacgatggaggcccacaggccgtagatggccggcagccccaccacttccgcgtagcccatggcgatgggaacggaaagcgcggcgatgaccaggcccgcgacggcgtccttcggcagatcggccgcccgataccccttcatggcctcaacgatcatcgtccctcctcactttttatcttctcgtctcccgtttcccgctcagctcgcgtgcctcgtccggccgccgtccgtggccttttaccccacacagccgtccaacacccgacgccacctctccgccgactttcggcaatcctcgcatcatgaggcgcccgtcttccagaaaggcgagattgtaccagataaatgccgagatcgcagcgcttattccaacgacatccacgcccaggacgaaaccacgaccacacgaccacagcaaaaccgacacggtagcccgctcgctccgtatttgagagaatcgcccatcgctggcgcagcacctcgcaacctgaatcgtcaatgcaacggcctacaaccatgcagtaactgcagcgcagggggtcatacggaacgattcaatcgttctaacccgcttagccggaccgatcgcggcaccactctcgcactagtccgcaagagcaatcgtggcgcggcagaaggccgcgccacgggggggggagggaagccgaaaagcgaaactaagcagctagaagatcctgaacagctagataggcgaaggtgatggcagcagcccaatcaccgccatagacatgatgggtgtacataccgccagcccacagaccaccggcgcattcgccaatcgcgtagagaccgggaatgacatctccctcgggcgtgacaactcgggcgacctcgtcggtatgcaggccgctacacgtgctgagcagcgtcgagccctcgtggatagcgtagaacggcggcgtatcgagcggatagaggaactccttctcgaacagcgtgtcgacgccgctcgctgcatcgcgcgtggtgcgctcgaacgtttccttcagagtcgcagcgtcgacgcccatcttctccgcgagctcctccaccgtgtcggcctggatcaaagcgccctcctcgatcatctgcccgatcaccgccaccgacccatcggcgatagttggatcgttggacagataggccgttttgagctgtgcggccgcttggggataattggcatcgagaaccgtccagcaacgtccgtgggtctggttgataatggcgccgccgagcatgctgacgggcacctcctcgttcacgaaacggcgaccttgttcgttcacgcgaatccagggaatgaagagggccgggatgcccatcatatgcgcatcgactataccgtagctgttgagtagggccgaatggggcgcgtcgtcttccgcggctcctaccgcaaggcccatctcgtgcccgtcgccggtcacaccgacgttggcgaattgcacggcggcaatcgtggcgtaatcgcgcgggcgcatgtacttcttcatgcgctccatgttcgccgcatagccgcccgtcgccaacaggactcccttcgacgcgttaagctgcgtatacgcgccgtcgctccccttcacgacaacaccggtcactgcgccgttcccgtcttgcacaagctgcacggcaggcgtgtcgaagcgaatctctgcaccttgggccaaagcgaggtcggcaatggatttgtggacgtcagcctgccgctggttgcgtcccccaacccacgtgatgttggcgttgacgcagcgcgtccaaccctccatcatgatcccggggaaggcggggaacgtcggctcggcctcgatgcccgccggcaccagggcgttgtcgtagagccagtcgaacgcctctccgctgtgatgatagagcgccgcgagctttggcccgttggcccgataggcactcgaggtcatgagggcctccatgaagtccttgaaggtcggacagggaaactggtgctgctcctgaaccttcgagttgataacgaaaatatccccgggattggcagcagggacgctcatcttctccaccaccagcgtcttaagcccgtttgcagacgcataggctgcggcggccgaaccagccgcccccatgccgacgataaccacatcccagtcttccgtctgggcgatgtcagtcacgggctcggactcgaacgccacctcaccttggggtggcaaccagcactcgtactcggccgtcggatccacggcgcccgtatcgggcatgtccgcagtctcggcctcttcctgcttcatcccttcctgcttagcagcattcggcgcacagccgaacatacccgcggcacccaaaagggccgctgccgtcatagatcctttcaggaacgtccgccgctccatattcgcctcatcgatgccatgcacgtgcgtctcactcatgtcgattcctcctctccttctcgccctccgtaacgggcgatccgatcattcccgattcaccgggctgacggaagcatacgaggaggaatctgacgcgtcatcgcttgcgctaggggaaatcgacgtatcacccagatttggggagaaggctctcatcaggcattttaatgatttcgaccaaatcatcgcgggaatggatgccgatcttggcatagatgtgctttacatgggtgcgcacggtatcctgcgagaccatcaggcgctgagccgccgcgggaatgctccacccttcgctcaagcaagtaagaacctcggtctcccgatcggtcagctggtagacatccgctatggcctgacagcgtccatggagctcattctcgagggagttagccaaaagcggcgtcacggcaatacgcttcacagcgagtgcctggggcttctggaacgaccacgattcacgaaagcagacgataaagaacaggtacgagcagagcgagagaaccacgaaccgatcgatgtccctgtcacccgacgcatgtatcgccatcgacgcgagggcaattccgagaaaaaacgcgaggaacacgagaagcgccgcaccccagaatcgcagagaccgcgcacggggatcgccaaggcactggctgagcacataaaacatcatgctcacgttgaccgtaaacgcgccaagcagtacagcggcagtcgcccccaccaaggcatcgccggcacataccagaaagcagtaagccaatgccgacaggacaacgcagaccttcgcgtaagaatagatgctccgtaggcatccaagagctggggtaatcgtcaagatgatggtcagcgagagcagcgaaagaatatagagcatcgtatagctcgcactcgccaaactcgtgggattcatcacaatggggcagatcattccaccggcgaacaaaagcgcggtcgtcgatcccagcaccatgggaagccgacgtcgatcctcggctccctctggcaataccgtctcgtattccgtcaaagaggaagagagacgtcgatgcgcgatgtaccacacgagggaaaccaggcagcagagagcggaaccaacgagagggaacctctcaatgggaaagaacaccacaaaggcggagataagagatccggggacggcatgcttccagaaatcggtctcagaagtggcccgacagtaatcgacaatgtacaggaatcccatagccgatgcgacagataggagcgcggcggagggaatggtctcaatgagccagaatccacccaaggctggcacaatggcatgggcagcgaaataccacgcgataccggcaagaaacaggacgcacatgcgcaatggcgaagcccagttctccatagaaagcggccgcatgaccgcaaattgcgaggccatgcccagaacaacgagcactgcaacttggacagccgcccaaacgatgaagacctgcccatctggttgtgcgttgatccgagcagggatgaacgtgaaacccgtaaggataatggtcagattggcgcaccagtggagaataacccagccattccccagcttataggaagccgaaggctcctcacgaccatcagtcatggcataccttcctcactgcaacgttgtcgaaatgccgcactgaatcgcaaaagtccagacagcgaaaacctcttctcccatgcaagacgagatgcccgacgagcggacggcaagcagcgtctacggcgaagaacgcctcccatcatacacgatgtggaccagcttcgcgctcggggcgcgacctcccgcttattccagcggcttgtccgtgcctgggacgtcctggatggtgcgcaggccgtttgacggcggctcgccgagggggaaccagtacttccacgcctcgaaggggtgggcgtcctccacccggtccacgtccctaaaggcgtccttggggacgatggtgtgcagctcgcggccgctttccgtgagcaggtggatgccgccggccgccagcgcctcgtcgcagaaggtgaggcagttgtaggtgatgaggttgtaggtgccggtatgcgcgcggcggtcctcggcgcaggcctgcacggcgcggaaggtcacctcgtcgcaccacagggcgatggcgcagctcacgtgctcgttccaccagttccccggctggccgtgcacgatccagcccgagcgctcctgcagctcggcgaaggtcatgggctccttgaggtcggccatgatgcccggcgcctccagctggctgctgtggcggtagtaggagtaggtctgcaaggggccgcccaccgggcccagcgccaggatgcagtggccctcgtcccacgccgcctccaggttgaacagcaggaacacgttgtacgagttcgccggcggcttcgtccatgccgcgggaagcagcgcctcgcgctgctggttagcgtggcagcggcgaagggtctccctcgtctccgcctccttgagggaatgcaccatggctctcgctcctcctctttcggcggcccccgccctccgtatcggcggggtggccggtcgacgcccattatagggagcgcccctcgggccggcgcgggccgacggccatccgttaccgtttcataggctctaccgcgacctcgccattcgggcgccctcccagtcctcggccccgtcactgcttggtgacagttcgtccttctcgccttcctccgccgttgcaatcattagcattttcctgtgaaaagacctgcgcgaaggaggaacaagcagtggcgaagagggcccgcattatcgtggtcggatgcagcctgttcgggtgcgccgtggcccaggcgctctcggcggccggccacgacgtcatcgtggtggacatgcaggaggacgccctggacgggctggggcccgatttcgacggcgagacgctcaccggcgacggcaagagcgccctggtactggaggagtgcggcgtgcgccgggccacccacctggtggccgccacagacgacgacgcctccaacctgctcatcgccgagctggccagcgagatcttcggcgtgccccacgtgctgcccctcgtggacgacgacgctttggcggacatcctcgacgacatgggcatcgcccccatctgcccccatcgcatctgcgaggacgagttcttccgcctcaccgggctgacgcggaaggaggccgacctatgagggtggtgatcgtgggcggccgctcccgggccgattatctgatgggcgccttagctgaaaccgtcgacaccgtcgtggccatcaacgacgaccgccgcttctgcgagtacctctccagccgccatgacggcacggtgatctggggcaacggcatgaagctggccgtgctcgaggaggccggcatcgccgggttcgacgccatcgtggccctcaccggcctcgacgccgacaatttggccatctgccaggtggccaagaagttcctcggcatccgcatccagctgtgcatcgtgtccaaccccgagaacacggccatcttccgccagctgggtgtcacggccgccatcagcgccacggccaccttggcccaggccattcgcggggccctggagcttcccgaccccgtcggcgcgaaggcccgggccgccacggcggcggccgtcgctgcggccgaggccggcaacggcgaaggggacggcgccgatggcaccgccgacgacgaggaagaccccggtgccccctcgcccttccgctcgattctgggctcgtggcaccacttggggaaagagcgccggtgaccgtcatgggaaagacgcgcggcgacaaccttgcgccggccatcgccctgggcgagccgggcggcgagcgctccggccccgggcccctgctcgcgcgctatgtgggcgtggccgtcatgttcgtcggcctggcgggcttggcacccctggcggtgctgccggcctgccccgacgaggtggccctcgcgccgtgcttcatcttccccgggatcggcgcggccatggcgggctacctcgtgtacttcgcctcgcccgaccccgccccgggcgcccgccttacccgcgggcaggccgccgcgtgcacggtgctggtctgggttctcgccatcgccgtctacgcgctgccctacgtggccgcggggctgctctcccccgtccaggccgtcttcgagtccaccagcgggctgaccaccacgggcttaagcgtggtggacgtggacgcctgcccggccatcttcctgttccaccgcagcctcacctgctacctcggcggtgtggggctcgtgctcatcctcacctgcgtggtgacccagaccggcggcctgggcgtgtacaacgccgagggccacaccgaccacttgctgccgagcgccgccaagaccgcccgcatgatcctgctcatctacaacgggctcatcatcgccggcgccgtggcctactgggcggccggcatgacccccttcgacgccatcaacatctccatgtgcgccgtgcccaccggcgggttcgccacccacggcgagagcatcgcctattggaacagcccggtcatcgaggccatcaccatcgtgctcatggtggccggcggcacgaacttccttctgctgttcctgctgctgcgcggcaagctcaaggcgttcctcacccatatcgagacgccgctgtacttcggcaccatcgccgtcatggccctggtggtggccggtttcttcctaggccagggcgtcagcggcgacggggccgaggcgctgcggcagggcacgttccaggtcgtgtcgatcctgacctccacggggtttcagaccatcccctccttcgccgatctggggccggcgctcctgttcctgttcggcctgctcatgctcgtcggggccgaggcgcgctccacctccggcggtatcaagctctaccgcgtcgccgtcgcctcgctggggctcggccacgatttgcacgagcgctacggtaacaagcgccatgtgacgagcatcaagatcaaccgtttcgggaagcggtcggtgctcaccgaggtggacgtggccgaggcccagacctacgtggtgctgtacctgctgctgtgcgcggccggtgcgttcgcgctcatactctgcggagccaccctgcaggaggcggtgttcgacttcatctcgtgcctcggcagcaccggcgtgggcacgggcttcctcggcgcggaaagcggccccgcgccgctgctgattgggagcgccgggatgcttctgggccgtctcgagatcatccccctgttcatgggggtgggcaccttggcgtcgctgattcggaaaggagttcaccatggccgctagcagttgcagattcccgctgagaagctccctctcggcacggcgcgtcctgcgcaacttggtcgccttcgccctgctctacggggccggcttggccgccgtgtggggcttctcgctcttgggggtgagcacgcttgtggccttccccgtcttcgtgctgggcgtgctcatcgccagcctggagaccgactcggggctgtggggcgccgcgctgggagtggcctacctgctctcctacgacttcctgttcaccgcgcccctcttcacgctgaaggtgctcagccgcaccgacgtggcggcgctcgtcatcttcctcgtcgtgtcgctcatcatgggcgtgataacccaccgcatgagccgccaggtgcaggcggccgagcgcacggcctgcgcgctggggcggctgaaccggctgagcgtcgggctgctggagagctccaccccgcaggcggcctgcagcttcgcccaggagttcctgacccgggtgctgaggcggccggtgaccatcaccttgggggagccgccggtcgcgggcagcgcggcggcccgcgactgctacgagcgtcgctcgcccaccggctacggcgagccgggctggcgggatgcgacggagaagtacctgccgctcggcatgaaggggcgcctgtacggggtggtggccatcgactgctcctcgggggatgtggatagcggcagcctctccctcgtcaacgccgtggtggcccagaccctcgtggccgtggagcgcaacgagctggcggaaagcgagcccgacggtgccggcgtcccagcggccatatcggccccgtccaacgacaagagcgctgccgaaccgatacgtccggcagcgctctcatagactgatcgcgatatcccaaggccaatcgcggcgggccgttctcggctccaggcgcgctacttgtccagcatctcgcgcacttcgccgcggccctcgtcgtgcagggccttctcgtcgggcgccaggcgctccaaaagctccagcagctcgcccatatgctcgcgctcctcgtcgcggatgtcggagagcaccttcttcgcatcctcgttatccgtcgcctggacgtgggcgtcgtactcgtggatagcctcaagctccccgatgatgtcctggcgaatggcgttgacgagctcctcgtcagtcagcttgcgcggcacttccatcacgaacggattcgaaattgtggccatgacggttcctttctcgcagcttctaaaaggcccgcgcctgcaacgcctgcggtagcacggcggcaagcgcgagggtctgtgggccatcctaggcgattgggttggagccgcagcccaggccgccttgttgccaccgacctgtagacactgcgacaagaagcgttggattagacggcaacggctcgcccagtccagggcgtagcgcgccgccgtcaccgacgtgccgttggaatgcacgctcagatcgtccatcacaaacgcgatcctcatgaggcccttactcctcggccgccagggcgagaccctcggcggcgggagcggccgggacagtctggtcgcgcttcgcctcggcgacgcgggccttgccgcgggcgcgggcctcttccaccgaaaccgtttcgatgcgggcgatgaagtaccagatctcgaacacggtcagtccgatgaggatggccttcagccaccactgcggcaccaccagcgcgagcatcggcatggcggtcacgccgggggcagcgcacaggatcttggcccgcaacgtgagcgagcgcgtctccatgaagttggcgatgaagcgcttgtacatgcgggttccctcgaaccacgtgttcagacgctcggagctgcgcaggaagaaaaacgaggtcagcagcagaaacggcgttgtggggataatgggaatgatgacacctatgccccctagccccaagaacagcagccccaaccccgcatacagatagcgcttgatcgtcattgtatctcccgtttcatccaccgacccgatgggccgtcatttcgatagctcgccgtcccaaaggcgcagcgtgcgccagcgtagggatatcttagcggcccgcgcccggccgccgcatcacccgaatgagctatataggggagcgcgacaaggcccccgccagccgcgaccatccaatctgctgcggtcgccttgcctcgcaggggccgacgcgcgctacgcgatggccaacgcaaaacgccccgcatcttgcagcgcgacagagcggcaacgtgcaagagcggggcgatcctattagccgagagctgggatccggcactactggcagagggcgccggcctccttatccaccacaacggtgacgttcggatggaactgcaggatggaggcgggcacctcgggagtgaccggcccgaagaaggcgcggcgaacgatatcggccttgtcggagccgttggcgaccacgaggatctccttggccgccatgatggtgccgatgcccatggtgtaggcctcgcggggcacgtcgtcaatggaatcgaacaggcgggagttggcgttgatggtgctctccgtcagctcgacgcagtgcgtttccttggggaactcaggcgcgggctcgttgaagccgatgtggccgttgtggcccaggcccagaagctgcaggcccaaaccgccggcctcggcgatgctctgctcgtaagcagcacacgcggcagcggcgtcggggcaggcgccgtccggcacatgggtgcgagccggatcgatatcgacatgggagaacaggttgtgctccatgaagtaacggtagctctggtcgtgctgcggatcaaggcctcggtactcgtccaagttgaagctggtcacgtccttgaaggacagcgcgccggcctcgtagtcctcaaccaggcagcggtacaggccgataggggtcgagccggtggccagacccagcacgcaatcggggtgcgaggaaacatagccgcttatcacgcgcgcggcagtgcgcgacatggcctcgtaatcttcggtgacgatgaacttcatgggaagcctctctcttggagccgctagaaaaaatatgtgcgctcatgctaaaccatgtcctccctgcagcggaggtcagccgcgagttttcatcaggttttcagtgtcttcctccgccaccagcagctcgcgggcatgagcgatggcgtcgtcaatgcagctgcggaagtgctcctcccccaccaaatcgacgaatccggcgcggcgcatggtcttcatcggctgctcgttcacgtgggagaagatgaggctcaccccgttcgcgctgcagtagtcgtagaggttctccagcgcgttcatgcccgtcgcgtccagcgagggcacgccgcgcatgcggatgatgaggtagcgcgtgaagtccttcaccgagatgtcggcgatgcgctcggtcatgccgaagaacatcggcccgttgatctcgtacacgcgcacgctcttcggcagctcgcgcaaatgcgtgacctcggagttctcgtcgcagtagtacttccagcccttgacctcagtctcctcgctcaccatcttcatgaacagcaccacggtgatgagcatgcccacgccgatggccaccaccagatcgaacacgatggtcagcgcgaaggtgagcacgagcgtggccacagcccccttcgacgccgtgcggcacaggtgcgcgaagttgcgccagcccgacatgccgtaggcgacgtacagcagaatggcggcgatggtgggcatgggaatgagcgccgcatagggcatgaggaacgcgagcacggcgatgagcacgagcgcgtgcaccatgccggcgatgggcgtgcggccgccggccttcacgttggcggcggtgcgcgcgatggcgccggtggcgggaatgccgccaaagagcaccgaggcgatgttgccgacgccctgggccaccagctccatgttggcgcgatggtgaccgctgatcatggagtcggccaccacgcaggacagcagcgactcgatggcggccagaatggcgatggtgacgccgttggcgaactggtcgcggaacagctccaagctgaagtggggcatatggaaggtgggcagggcgctgtcgatgacgtagaggtcgccgatggtgctgacgtcaaggccgagaccgctcaccagcgcgatgcccgcgagcagggccataagcgagctgggcacgcgctcggtcacgcgcggccagaggaacagcaccgccaggcaaacgacgcccaccaggcacgcctgcccgttcaccgtggagaagttgcccgcaagggcggccagcttctccgtcgtctccaccgtggcggtgccgggcggatacgtgaggccgaagaaatccttcagctggccgatggtcagcgtaacggcgatgcccgccgtgaatccggtcgtaatagtgaagggcacgaagcggatgagggcgcccaacttgaacaggcccatgaaaatgagcatgatgcccgcgataatggtggcggcgatgagcccttccatgccatcggtggccacgatgccggccacgatggtggcgaaggccgccgtggggccggaaatctgcacgcgactgccgccgaggaacgcgatgaggaacccggcgacgatggcggtgtagaggccttgctccggcgacacccccgaggcgatgcccagcgcgatggacagcggcagcgccaccacggccaccacgatgcccgccacaatgtccttgggaatctgctccttcagctcttctttgctggaatgtttgatgatgctgaaaaggatcggctttaacttatcgcgctgctgcatggcgggaaaactcggctccttcgatcgtcgcgggcgaaaagacacgaggccgcattttatcgctgactaaaacacccatcaatgcggaacccgcgttcggcagaaagtcgcccttcggcgcatgaaaacggccccgcctatggtgcggggccgtcgggcgccggatgcgctcagttgctctgctaccgctcgctttgctaccaggtgcgggaggccatggcgcggaactgggccacggtggagacgtgggagttcaggccgccgtccactgttaccacctggccggtgaagtacgagctctcgtcggaggccagatagacgcacatggcggcgatgtcctcgggcgtgccgtagcgggccacctcgatgttgtccaggaagatgtccttcagcgcctggggcaccttcgcctcattctgcggcgtgacgatgaggccgggacgcacgcagttgcagcggatgttttgcttgccgtactgcagcgccgtgtactgggtcagcatgtcgacgccggccttggcgcaggcgtaggccgtcgagcccaagtcgccgccgcaagaggccatggagccgatgttgatgatggaacccgcgccctgctcctgcatgaagggcagcacggtcttggtgcagtagaacgtggagcgcacgtcgctcgcgaacacggcgtcccagtcctccagggagatctcgtccacgcggccgtccttcagcgccatgccagcggcgttgttcaccagcacgtcgatggagccccagtgctccttagtgtcggcgaacagggcgtccaccgtttcaggctgggtaatgtccagcttgtggaaccaggcggtgccgcccgcctcggcgatggcgtccacaacggccgcgccgcgctcctcattgcggccgcagaccaccacgcgcgcgccctcggccccgaacatcttcgcgatgcccgtgccaatgccgctggtggaaccggtgacgatggcgactttgtccttcaaacgatccatggtttccctctttctacgcaatatggccagccagcatcaatgattctagcagtaacggaatgcggcggtgcgccccgtccggcccgcgcgcccgatctcccttggcaatggcgcgcaaccgggccggcttagctccgggcaaacttctgcgcccccgcaccgcgggaaatcgggggcgtcggtatcggattggcggcgcatgcgagccgccaaagccagcggaccgcccttgcgctactatggcagcgagacggccgaagcagacgagaaaagaggcgccgtggaagataccgaaggcagagtcgcagcgcaggatttttcaagggaagagtcccgcggccttagcgcagaccgcgctgtgtgcccgatctgcccgcacgcctgcgcgctggccgaggggcagacggggctctgccgcgcgcgcgtcgccgagggcggccaggtggtggacgccaactacggacgcatcacgtcgctggcgctcgatcccatcgagaagaagccgctggcccgctttcgccctggaagcaaggttctctcggtaggttcctacggctgcaacctgcgctgcccgttctgccagaacgcctccatcgcctgcgccggcgagcgcgacgtgccctggcgcgaaatcgcaccggccgagttggtggaattggccgcatcgcttgcgcccgagggcaacatcgggctcgccttcacctacaacgagccgctcgtgggccttgagttcgttcgtgacaccggtcgcctcgcccacgagcgcggcctggcgaacgtgctggtatctaacggcttcgtgaacgacggcccgctacgcgaggtggcctcactcatcgacgccgcgaacatcgacctgaagagcttcacccagagcttctacgacctcgtcggcggagacctggtcacggtgaagcacaccatagaagtgctggccgccacacccacttgccacctggaagtgacgacgctcgtcatccccggcctgaacgacagcgatcaggaaatcgccgaggccgcccaatggctcgcctccctggatccgtcgatcccctaccacctgacccgcttcttcccctgccaccgcttgacggatcgccccgccaccgcacccgagaccgtacatcgcctagccgacatagcgaggcgctacctaaagtatgtttacgcagggaattgctaacgaccaaccttccctcttgcgcggttggcccttctgctgctagactgcatttccgtcagcgagagcgctggcgcattttatccagagtcggggtagagagttggctcgacgatcccggcaccaaccggccgcgcggcacggtggtcccgccaacatcgatgaaaggagtcctgccatggacaacgtctctgtgcgcgatgcgcgcgaatttctcaacctgagcgtcgagcggccgaggatgcacctcctcgacgagcccacgggctacatttcggccatgggaaagtctaatctgggccaccagatgcactacagcgtggaacgtctggaagccgaactggccgatggcggcgagccgcacgtgctccagctgctttgcgaaggcgacgagcgcgacccccagtcgtggacactctacgccgacggcctcaagtgcgcccacggcaccggcgagttcgcccgtgcgtgcttctgcgaggcggccgacgcgttcatgggcgtatgccgagaagccgtgcgcgccgccgccctcccctcccgcagcaagcacgactacgacctactgcgcaccgcccgcagaatagcggcggtggaggcggacgcctctcgtccagcaaatcgataacgaccgataacgaccgataacgaccgataacgaccgataacgaccgataacgaccgataacgaccgataatgctatcggaactctaactatgagatggggcaacatgagagacaccgccgtgaaaacattgcgcgagaatagccaactggaagcaaaacgcgccaaaggcggtgtgcccgagagcgtctgggaaacctactccgctttcgcgaacaccaacggcgggctcatcatcctcggcgcggaagaaagtcccgagggggagatcgaatacgtcggagttccaaaccccgaacaactcgttaagaaattttgggacggggtgcataatccctcgaaagtcagcgccaacattctcacggatgattcgatcaccattgagacgattaacgactgcgacattatccgcattcaagttcctcgcgctaatcgtcatttgaaacccatctacatcggcagcaatcgagaaaaggggacttatcgccgggatggcgagggagattatcgctgctcgtccgaagaaatcgttgccatgattcgcgatgcgagcaacgaaccgctcgatgacgccgtgcttgaagagctttcattagatgccctttcgtgggacacggtaagccgatatcgagccgtggtatcagccgtccgaccgaatcatccgtggctcaagcttgatgatgaggaactcctcgtgaagttgaatgccattggacgaacaaacggcgagggagaatttcatccaacacgtgccggccttcttatgttcggtttcgagcacgaaatcgtaaaggaatatgcaaactacttcctagactatcgcgaagcagaccacgaacgccgatgggcagaccgcatcgtatcgcaagacggaacgtggacgggaaaccttttcgatttttggacagaagcactgccgcgactgacgggcggcctcaagaagccttttgccctcgacagcaatctccagcgcatcgaagacaccgagatgcacgccgcaataagggaggcactcgcgaacgcactcgttcattcggactactatggaagaagaggcatcgtcgctctgagatattctgaccgaatcgaaatagccaatcccggcaattcacgcgtggcgctcgacgtggtgagagcgggcggaatctcagatgcgcgcaatccgaccctgatgcgaatgttcgggcttatcagcgcttgtgagcgaatgggaagcggattcgacgtaatgagcaacgccgcgaaagcggcaagcgctcccccacccgaaatcgaggagcttttcaacccagaccgcgtaatggtaaaagtctacacaggaaagctgtctgcgttctatcttgacaccgacgcacccagcaatagctctccctccgagacaaaccacacgccggcttcttccagctctgcccagccatccgtgcccgctccacaacttgccctctcccacgatctcgcaaaaatcgtagaagtcgcccaagaaaagggaggtttcacacgtagagatgttgaatccgcattgaactgcggggcgaccaaggccaaggggctcatcgccgaattgctgggcatgggcattattgcgtccgaaggctcagcgcgcgggacaaggtaccgcttacgctaaaacagggggcggctcgccgcccctacaactcgatgcggccgaactcagccaagatctcgctagccgccacgagccgttacggaaagtgatgcctatgaccgtgcttcggcatcgcgggcggcctcgcgggaaggcgcccgaagctttcgatctgcagcggaatgggtggaagccgggactcccggcaagacgccagcgctcaaaccgcatggcactgccgacaacgaactacccgacaactccaacgcgaaaccgcaacgttccaaagtatcctttgcgggaaaagccgcagatccagaaagcaggcgagcccttacagctcgaccgagaagacctccgtctggttgaccaggtccagctcaagctgcagcgcggcgatctcgtccgcgacggcgcggtagtccgcctccgcctgggcgacgtcgtagttcgcataccggtactcgatgggcccgttgccgctaccgaagtaccggtctcccagccgctctttgggctgccgcgaggcgagcccgttcaggcgctccttacgccccgacagctgcgcgagcaggatgagggcctcatcgatggtgatgccccgctcgggcagaaccgtctgcatgttgaatcggtgcagggcgtggcgaatggcccgcgtctgcccgtcgatctgcgcaaccttctcgcgcacggccccgtagtcgtaagcaggaggctcggccgcctccccctccgcgagcacataggtgctcacctcctgttcggttcgcagaagccgatccttctcgtcttgcaatctccgcaggtacttgttggcactagccgatgtgaattccacgcgaccacctcttccgcgcgccgagcattcgatggcatacaccatagcaggcgccagcagtcgcattcaacagtctcactagtccgattcgggattgatacttttggggtttgcggaaacgcgtcaagaatcagtaacgacacacgtttgcgaaagaggaagc

SEQ ID NO: 10518 - DNA, 27111 bp, Unknown
  gut microbiota DNA sequence
cttggtgtccaatttatcttaccctctccaccttccgcccttaacttggtgtccagattatcttacccactccagagtccgcggtgccaagttacacgaaggagcagagggaacgtgcgctggaggttctcgaggaatgcgagggacgcgtcactctggcgataacgaagctgggctacccgtcccggcagacgatgtaccagtggataaacggagccggcgcggcgaggacgcggactgccggcaggccgttcagccactacgacccgcaattgaaggaagacgccgtccgtatggtgcgagggggcctggaccccggggacgtggctcgccatctgggcgtctcgagcgctgccgtggtctataattgggcgcgatcccgcgagaaggaggccgcgcccatgagagacgaacccgccaaggcgtcgggggacgagccggcttggtcgggcttcgacggaagcccggaggacaggatcaggcaactggagctggagaacgacatcttgaggggcgtggtggaggttttaaaagccgcgcgccccagggctctgaccaacggggagaagacgctggtcatcgagcacctgaggcggaccaccgaccacagcttgagagagctcacggattccttgaggatatccaagagctcctatgagtaccagcgcgcctcgattgcgcgcggggacaagtacgcccgcgtgaggaggagaatcgtcgagatattcgaggccgccaaccgtacgcggggctaccgctacgtcacccgcaggctccgcgacggggaggatcccgtcgtcgtgtccgagaaggtcgtaaggcgcctcatgcgcgaggagggctgccgcgtcgtctacctgaagagggccaaggggtacagctcgtacgcaggcgagatctccgatgcgccggacaacctggtcgagcgccgcttccatgccgacgccccgaacaggctctggctgtccgacatcgccgagttcgggctcccgtgcggcaaatgctatctgtcgccggtcctcgactgcttcgacggggccctggtatcgtggtcgatctccgccagcccggacgcggccctggcgaactcgagcctggagggcgcctgcgccgcgcttctccccggcgagcacccggtctgccacaccgatcgcggctgccactaccgctggccgggctggatcgcgctatgcgagagaaacggcctggtgaggtcgatgtcgaagaaaggatgcagcccggacaacgccgccatggagggcttcttcggtcggcttaagaacgagttcttcttccatcgcgactggcgcggcgttaccatggaggagttcgcggcgatgctcgatgcctacctgcgcttctacaacgagggccgcatcaaggagtcgctgggctggaagagcccgatgcagtacagaaggagtctcgggctagctgcctagaggcacggaaaaacgtccgcatccccttccgtcggatttcttgtacaggaagggagcctcgaacgtgagaacgacggcgtcgttgtcctcggcgccgcccaggtatccgccgtcgaaggagacgttcgtgttgccgagagagggggcgacggcgaggttcgtgccgcctacgtggtaggcgtcgtccgaggcgcgcagggcgttcgcaaccgcgagagagaacgagaagcggttggcgaaggcggccttgaggtcgtcctcggaggtggtggccggcgtcaggatgccgtccttttcctgcttcagggtagcgtcggcgagcgccggcatgaccttctcggcatcgaggagatccttgggcagatatgcctgcatatctgcctcgctgacggtatcgtcagcggccgtgtcgtcggcgtcctttccaccagaggcatcgtcgccctcggcggcatcgccctcgccctcgacgtcgttggacgcctggtcgatgttctcgtcgtccacctcgtcgagcagctcgtcgccggagcccgtcgacgccatgggtacggcgtcgtcgccgatgatcatgcggcgggcctcctcgatggagtagctgttccagcaggtcagcaccagcagcaccgacagcaccacggcgatggccttgcccatggggttcagctggcgcggggcgttgtggctgatgacgccggcagaggcgccctcgtcgttggctgcaggcgcaattcccgggggaacctgcggagcgtcgaaggcgctggttgtgggcgcctcggcgttctggttgcgatattcgctgcgttcgttcatgttgctcacgttctctctcgcctcgcttcgcggccctgattccgcgctgctcggcctcgctcgagcctcccgagacgtccctgattccgtcccgctcgacttcactcaccgccgttttgcctgatcaaaaggcggttttccttccttttccttttgacgtttccgctctttgggcgcagtggtgccaaagagtgttttcgttcatggattattatctacaaattggcaacattgtaaaggcatgtcaataacaaaaatgaccgttgtactggtattactcttttgactgtttgtcatttatcgctaaatttcacggcgtcgattacacaatcgccgttacttgagcgtcatcttcatcgtttgtttttcgtgaaaaattcacagcaaataacacatataatgtttttgtctctatattcttttatctcatactcatgatgccgtataacaaattcctctgttttccctggtcagagcgattatcgttgttatgacttcataagcctatagtgactatatttctatatgattattgtttcagccatatacatagtcctactgcctatatatgacaacaacattatatgttgaaatgaaatagcaacccatctgttaagcaacagaggaaattttttaaaaaattttttgcaacaagattcccggcacaaaaaccccgaccaacgggctcagggtttaacaccctacttcatgagtttcttgatgagctcctcgtaggcggccacagcggcctgcagctctgatttgtggctctcccaatactcgtccagtgcctggcgcatcacctcggcgcgggtgaccttcatcaccgaggccagaagatcggcgtgctcgcgctgctcggcagtcatgggcacgagcacctgggcggtcatgcgcgcaccggagccttcgacggcctcttccaccggtgcagcctccacgtttttcttgcgaggcttgcgcgtccgggaggccttaggttttgaaggctcgccggcagcagacggtgccgtagcagcagacggtgccgtgacggcggacgatgcagtcgtcgcagacggtgcgccaaaagcctcgacggtcgatttcgccgcgcgattccggctcgccgcctcggagcgttcgccatcatccgccccagccgcttcgtccgccccctcccctctcatctcgcgcgaagattccagctcgtcatgggccgcatcgatgaaggccgcggcagcgcgggcggcgtccatctgggcgcgcaagtccttcttagccattgatgccctccatcagctcctcgatgaagaagcggtagtcgtaggccaccttcgaggaaggggcgtaggcgaagatgggctgcttcaccgcctgggcctccttgatgaccgtagcctcgcgaatccaggcacggaagaccttggtgtcaagctcggcggccatggcctccgcatcctcgtggatgatcttcgagatggaggtgcgcgggttgtagcgcgtgagcagaatgccggcgatcttcaggtcggggttggtgtactcgcggatcgcctgaatggtggcggccaaatcggtgacgccgtcgagcgagtaggcgtcggcctgggccggaatgacgacccatgaggccgccgtgagcgcgttcaccgttagggtgcccagcgccggcggagtgtcgagaatcgcgtagtcgtagttctcggccaccgcctccaaggccttgcgcagccggtagtccttccccaccgagggcatgaggtcgtctgccttgccgttcaggcggctggcgggcaccacgtcgtacccgtcgatggactgggcggcatcggcgaccgtggcatcgccggtgagcacgtcgagcgacgagagaacccccgccgtctgcgccttcagcgtcgtggagaggttcatctgaggatcgagatcgacgtacagaacgcgcgcgccgtcttcgaccagcttcgcgccgatggccagattggtcgtcgtcttcgcaacgccgcccttctgggaggccgccgccaatgtgatcataatcgtccctttccgccgcacgagggcatagctgacccagtccgcttcttagcaaaacgcactataacatataatgttatgttgtctatagggttctaggattctaagtggttccaaacaccgtcttcagtgacgatggcggtgatgagttcatagggcgtcacgtcgaaggcggggttgcgcacggcaacgccgaggatgggctcagcgagcacctcggcgtgatcgcgctcctcgatgggaatatcggctcccgacttcgttgtgcaatcgatagtacttttcggcgcggccacataaaacggaattcgaaaatagcgcgccatgatagcgagtcccagcgtgcccactttgttagctgcatccccgctcgcggcaatgcgatcggcgccgacaataacggcatctacctggccttcagccataagtgaagcagccatgtcgtcgcactgcagcgtcacaggcacccccgcgcgggccaattcccacaccgtgaggcgcgcgccctggttcacgggccgcgtctcgtcggcgaacacacggttgatgatcccttcttgtgcagccgcataaacgacgccgagagccgtgccataaaacgccgtcgccaaactgccggcattgcagtgcgtgaggatgttgagaccctgctgccgcgcggaagcaccagagcgcaaaggagcatcgccgccacggtcatgggaggcccccggagcgccacgttccatatccagcttgtcggcaagctcgcgcagcaacgcggccccatgggccccgatgcggcggttcaccgcctcgtcttcggcaataagggcctcggcaagctcgtagagcgcctcggccgtctccgccgccgtcttgccggcagcgcgggccgcacgcgccgcctcctgggccctgcgcactccccaggacaggttgaccgccgtcggccgcgcctcggcgatcacgcgcgcagcctcttccaaacgatcatcaaacgtagcccgatcgctttctccggcagaaacgatgctctcttcgcagtcgcgttgcgcagcaagacgcgcatccccctcggccaccgcatactcataggccgccagcatcaccgccgccgctcccgccacaccgatagccggtgcaccgcgcacggccaacgtcttcacggcatccaccacctcgcgccaatccgacgtgcgcaccaggatcagctcgcctggcaggagccgctgatccacgaaccccaccgcgggcactcccccgctcttctcaacccaaatcgttcgcggcaggttttccaaattcagcagcattgaatactcttttcccagctcaaactacaagtcacaaaagtcaaggcttacaatgttttctgtaatacgctattttgtacccgtcaacggtgtaagtcccgtgtgctggcagtgccttctgcatctattggttcgtccaacaaggcaggaggtgatggcctatggagctagctctcgtcatcttgcagttgctgactgctcttgcaggtctggcaaccgcggcggtgaaactctatacccagagcaccgagcagaaacgcacgcttggtgataaagaaggctcggacgtagcggcgtccgagcctcacaccaaaaacggcactgcccgctaaaggccgggcctccgttggcaactattgtaacagctgcaccgccctcttgcaagaagggccgctccgtcgtgcggaacggcccttagggctaggttctttcagcgggcgcttagcgctgcttgatggcggcctgagcggcggccagacgggccaccggcacgcgatagggcgagcagctcacgtagtccagaccgatgcggttgaacgtgtggatgctctccgggtcgccgccgtgctcgccgcacacgccgcagacgaggtcggggttgccctcgtgacccagcgccacacccatttccacaagcttcgccacaccggggtcaatcgtagcgaacgggttgtagggcagcaggtgctcggccaagtactgcgggacgaactcgccctccacgtcgtcgcggctgaagccgaaggtggtctgggtgaggtcgttggtgccgaaggagaagaagtcggcctcggtggcgatctcgttggcggtgacggccgcgcgcggcagctcgatcatggtgccgacggggatgtccagctcgacgccctcgtcagcggacacgtcggcgatgacggcctcggccacgccgcgcagcttcgcgagctcgggcagcacggacacgagcgggatcatgatctcgggcttcggcgagaagccttccttctgcagcttcgcgcaggccgtggcaatggcgcgcacctgcatctcgggaaggatcgggtacacgatgcccagacggcagccgcgcatgccgagcatcgggttctgctccgcgaagccgtcgatcttctccagcaagtcgcgcttctcggcgatggcgtcggcagcggcgccggtcgcttccatcttcgcgatttccacggccagctcgcgcgggctctccaggaactcgtgcagcggcgggtcgagcaggcgaacgatcaccggcaggccgtccatggccttgaacatgccgtagaagtcgcccacctgggcctcgaacaagtcggcaacggccttctcgcggatgagctcgtcgtcgttcaggatgaacgtctggatgatctgcttgcgatcgcccaggaacatgtgctcggtgcggcacaggccgatgccctcggcgccgaagtcgcgggagagctgggcgtcctcggggttgtcggcgttggcgcgcacacccagggtgcggacctcgtcggcccactcgaggatggtgtccaagtcgccggtgagctcgggcatgaccagctccaccgcgccgagaaccacaatgcccgtggtgccgtcgatggagatcatgtcgccctcgcggatgaccaggtcggtgccggcgatggcggcctccttcttggcggcgtcgatcttcagcgcctccacaccgcacacgcacggcgcgcccatgccgcgggcgataacggccgcgtggctcgtcttgccgccatgggaggtgaggatgccctcggcggcgatcatgccggccaggtcatcggggttggtctcccagcgcacgagcacgcacttgcggccggcctcggcggcggccacggcatcggcggcggagaagacggcctcgcccaccgcggcgcccgggctcgcgttcaggccgcgggccaccacgtcgtaggtggcgttcttgtcgaactgcgggtgcagcagctggtcgagctggtcgggggccacgcgcatgatggcctcttccttggtgatgaggccttccttctccatctcgatggcgatgcgcagggcggccgctgcggtgcgcttgccggcgcgggtctgcagcatccacagcttgccctgctcgatggtgaactcgatgtcgcacatatcgcggaagtggttctccagcacgtcgaagatctcctcgagctgggcgccggcctcttccaagccctcgacggtcttcagatcggcgatggggctcgtgttgcggatgccggccacgacgtcctcgccctgggcgttcaccaggtagtcgccgtagaactcgcgctcgccgttggcggggttgcgggtaaaggccacgcccgtggcggatgtgtcgcccttgttgccgaacaccatggactgcacgttgacggcggtgcccagatcgtcggcgatcttctccttctggcggtagaggaccgcgcgcgggttgttccaagaaccgaagacggcctcgatggccagctgcagctgcaccatgggatcctgggggaaggcaacggcgccatcgacgacgagcgacgggtaggcctcgccgtcgacgttctcggcgaagatggccttgaactcgtcgacgagctcctgcagatcctcggcggtcagatcggtgtcggaggcgacgccgcggtcgttcttcatggcgacgatggcgttctcgaacagatcgccgtcgaggcccatcacgacgttggagaacatctggatgaagcggcgataggagtcccaagcgaaacgcgggttgtcggtctgcttgatgaggccgttgatggactcgtcgttaaggccgaggttcagcacggtgtccatcatgccgggcatggagaagggggcgccggagcgaacggacacgagcagcggatcctcggcgtcaccgaggcgcttgcccatgcgctcctccaggtcggcgcggtactcggcgatggtgtcgagcgcgccttccggccaaacgttgccggcgttggcgtactccatgcaggtttggcacgtgatggtgaatccgggaggcaccggcagcccgatgttggccatctcggcgaggttcgcgcccttgccgccgagcacccatttcatctcggtgttgccctcggtcacattgttcccgttggcgtccttgccgaaggcgtagacgcgcttcactgcttctgtcaccttacttctccttaaagcttaagcgacgccccttatgcgcgccgcgattgcctttcccgcgcttttgcgcgcgccccgccggccccctcgccgccgcccctttcgggtgcgatgagcgcgaggagcgacgtgcgcgcgaatggacgcggttgcctttcccgccatgccagccgagccggacaaggcgccccgctccgtttcgagcttggccgcaggcacatcgcgggcatcccgagcatcgtggatatcccgaacgtcgcgggcatccccgaatcgcgggcatccccgttgcctgagcaccgaaacgaaacaagttggcttcaattataagggataatctcgcctatttcgcgattcccctcccccatcaggccgcagtaccccaaaatctcacaagcggtcgtctgcaaccccaactctccccgctcatctgccgatggtgcatcattcgcccgagacgatagcgctcaagaaacgcagcaggaaaaacactctggagaacgagcacagcggcacacgacagtctggactgtctaggaaataggcacagtggcatacagccgcatttcgatgcaagccctccacggccagaaaatcggcgttaactgcatcacgggccaaaaaagtggcactgactgcattttggcaagccatcttcgtgggttttggccaaaaagcattcctcagctgcaaaagcgacgcgcaaatcgcatctccgtcctctaccacaagcccgtgacctggccttttgataacccttcttttcccagctgaagacagtggtcaattttcccgtcttaactgccagttcgcaatgcttttttgtccagaaagtgcccgagcaacgctagcgatcagaacccgtggctgggcacccccgctaaaacacctctgcgtgcagcgcgcttgaccgacagcaagaccgctgcgccgcaacccacccctcgtcgagataatcgtccatggaccatctcagctgatagagtcgtttttgccttaatgcaaagttcttgcagcgcaagcgtaatcgcgtgcctcgtcttgcgtgcgcctcctgggcgacgtggcgcatagccgaagcgctggccaactgcgaagttgtaacggtgattaccttcaggccgtcactttccagcgccatgcgctttgtcgcgtcaagcgtcgcctggcgcgccgtaagatgctcggcattcgaatcgaattcaatgtcgagcttgcagtccggcaaatacaggtctggaaccaagctctcccgtccagcaagcgcttttgcccgctttgaaggcttaatgcgcttgttcatcaccgacccgctcaatccgaaaccgcccaaccgcgctgggagtccgagcacaagccgcatgaacacttcaggcggcgatgctgcctcagcgcagacaaaccgcagagcctcccgcacgcgtgtaaggccatcgtgacctgggcaacgctcgagataggcgccgatgcgtcgagggcttgtcaacggggtccgccccataagccccgacggcaccgaggggtcgaggccgaaagtcgcgcacagaaagcatcccgcttgaatcaacgggagaagatcgaggctctgggccagctgaagaaagcataattcgggacacggaacaataacgccatgatcgatgcgcaaaaaggatcccgatcgatagggatacgacgaaccatgcagatgcacatcatcgagggagcagcgctcccacttaggaaccaagcaatgcacggggcgcgtaaggtaaggcattcgctcacgcacatagtccagggtagcctgcgtagggtagcaggatttatcaaggacgctggggggcgccaccgcagaaggcgcatcgcccgcaacgagatagtaggcgaatgccgactcgccgtagagagcaacgcgcatgaacctccccttcccatcgtttgaacaaccgcctctcgcttcgtttcgcctccgcagcgcgcagcttgagcgatccgacgcaacgggcgagaggaaagtgttccgcgtactctatgccagaagcaggcaattgactaggggtgcattttgccgtcatccccggcgccagtcgggactccatcgggaatgaaacgagacattgcgttgaagttttcaaagcacgaggtcgcatgaggggagttatcaacaaccacgcaagccgatcgtcgtgccgttcccaaaacgcaaaatacttcaggaacaaatttctcgttgctcttcttcggcgagcacccactgcacaagatccgcacattcacggcattccacgcaattgctctgaaagatatctggatccgcagcggggtgcgctcgacgaagcttgcggcgcggcgcgagcagcaaggcgcgcagggctcgacgagacacaagaggagcgcgcccggcaatatatgcagcagagcgcgaccgacaaatcaggatcctctggtgcgcctcatgaattcttttggccaaaaatgccacgctagctggcagctatcgcccttattttgcccactaccttgttttttcgaaaagagctctatagcagattggagttttccctgttcaggagcgcgcagttagtactccgattgagcccagcgtgaagctgatgcagccagcggctcctttttggccagaacctgcccccaagcctccgcaaaagcagtttccgccacttttttgaccagcattgggaacaaagtcgagcagccggccgggggcggaaccgctgcagctagtcgatgatgtcggtgttggaggggtggctgcgctcgtagtagcggaggatctcctgggcggtttcctccacggcgcggccctcggtgtgcacgacgatgcagccgagtcggcgcatgagggcgcggctggcttccaggtcgcggtagatgtactcgggatcggcgtagttcttcgccagcatggcgaactgcccgcctccggccttccccgccgccttcttgatgcgcttgcgccggatgtccagcagcacctcaggcgtgatcatgagcccgaacaagcgcgtgcgatcgacatcgaagatctgagagggcggctcggtggtggggtccagcggcacattggcgacgcgcagcccctgctgagccaggtagatggaaagcggcgtcttggaggagcgcgagacccccaaaagcacgatgtcggccttcgtgaggtcctcgggattctggccgtcgtcgtgggcgatggtgaactccaaggcgccgatgcgcttgaagtagttgtggtcgaccacgcgcagcataccgggcttgcccaccggctccatgccgctcatctcggagacggcggcgacagcggccgtgagcacgtccacggccacgatatggggatgctcggccaaaaagccctgcaacggctcgcgaatgtcggcgttgaccagcgtgtacatgacgagcatgcggtcgtcgccgagcacctcctcgtggtgccgcgcatgttccagcaggtatccgcgcacctcttcgaagctcttcaccttcgagaagatctcgaggtgcgggctcgtgacgccgaactgggccgcggcggcgcgcgccaccacctgggccgtctcgccgatggaatcggagatgatgtggatggtgggcacgcgtgccgcgcgctcagccggcgttttattgtgcattattttttcgccatctgggagaagtcggccacgtgggcgaagacgttggcgaagcggttcaagagcttcaggcggttcgcgcgaacctccggatcctcgtccatgaccatggtggtgtcgaagaactcgtccaccggcgcgcgcagggccgccagggcaacgagggcgtcggcgtagcggtcgtcggcgagagcggcggccacgttgccctcggcggtggccacggcctcggcgagtgccgtttccacatccgtgagctcggccttcttgtagccggtgcccaggccgatctcacgcaggttgttcgcgcgggcaaaggcggtggccaagtcgtcgaagacctgcgggttctcggtgcgggcggcctccagagcccgggcgcggcgagcgagcacgatcggctcctcgatgccgcaagcgagcacggcgtcgatggtgtcggccttcacgccggcatcgcgcagggccaccttctcgcgggtgatgaagaagtcgatgatctcgcggcgcacctcggcgttgtcgaactgaagcccggcctcgcggtagatgatgagcgagccgtcgatggtctccaccaggctgatcggcaggcccgtctcctccaggatggccagcacgcccagggcggcgcggcgcagggcgaagggatcggaggagccggtgggcgcctggcccacggcgaacaggccgcagatggtgtcgatcttgtcggagagcgccaccacctggccgatgatgtcggtggggatggcgtcgccggagaagcgcgggcggtagtgctcggcgatggcgcgggccacgcgaggcgcctcgccggcggcggtggcgtagtagctgcccatgatgccctggacgctcgtgaactcgatgacggcgctcgtcaccaggtcggccttggccaggtaggccgatcgcgcgatgtcgcgcatctcggcggcctcgatgccggcggccgacgtgatgcgggccgacagcttcaccacgcgggcggtcttgtcgcgcatggtgcccagcgcctcctggaagaccacttcatcgaggcgatcgacgtaggcatccagcggcagcttcaagtcctcgtcgtagaagaacttcgcgtcgtagaggcgggcggccaccacgcgctcgttgccgtcgacgatggtgtcctcgtgggccgggtcgccgttggagacgatgatgaacttgttggtgagcttgccatcggcgtcgtacagcgggaagtagcgctggtgcatgagcatggcgtcgacgatgatctcctcgggaaccttcaggaactcctcgtcgaaggtgcccaccatgggggtggggtactcggagaggttgatgacctcggtgagcgtcttggccggcagatcggcggtgaagccggtggccgcctcgatggccgccacgcccttgcggatgaccgcctcgcgggcctcttgggtgggcacgacgaaggcgccctccaccacggacacgaggtcgtcggccgaggccacggtgtgcgggccgggggccaggaagcgatggccgcgcgtctcgcgatcggccacgagccccgcgtactccacgggaatcaccgtgttacccagaagcgccaccagccagcgcaccgggcgcgagaacatctcggtcgtggtgccccagcggcaggacttcggccaggagatgccgtcgatgacgccgcgcagcacctcgggcagcagggccgccacatcctgggagggaacctggcgcacggcgtagacgtactcggtgccgttctcgtcgcgacgctcgagcgcgtccacgtcgagccccttgccgcgggcgaagccgatggcggccttggtggggttgcccgcctcgtcgaaagcgatcttggcggcgggcccgcggaagacctcttccaaagcctcggttcgggcggccacgtcggccacgatggcgatgaggcggcgcgggctcgtgtagatggccacctccccgtgggggatgcgcacggcatccagggccgcgggcacgagctcggccagctgctcggtagcgcgcttcaaatcgaaggcgggaatctcctcggtgccgatctcgaaggcgagggttgcggtatcggacatcttctaggcctccttctcggacggatcggacgtctcggacggggcggagacggcgtcctcggcgatggtcacgaactcgaaggcgcgctcggagcgatcgcccgcagcggccgcggcgccaggacacccgccgccagaggcgggctcggggcacgccggcacgacgtcggcggcttcctcgacaaccggcttcgccagcgggtcgggcacgtcggcgagcagggcgtccaaatcggaggtgtccacgtccattcccacgacgttcttcatgtaggacgcgcagcaagccttggcgagcgtgcgcacgcgcaggatgtaggccatgcgctcggtggcggagatgacgccgcgggcgtcgagcaggttgaaggcgtggcagcacttcagcaccgagtcgtaggccggcagcgggagcgacgccttcagggtgcgcaggcactccacctcgcgatcggcgaactcctggaagaggaactcggtgtcggccacctcgaagttgaacgcggagtactcgcgctcgttctccaggtacacgtcgccgtaggtgaacaccacgccgtcgtcgccgcgggcccacacgatgtcgtacatgttgtcgacgccctggacgaacatggtgaggcgctccaggccgtaggcgatctccacgggcaccgggtcgcactcgaagccgcccacctgctggaagtaggtgaactgggtcacttccatgccgtcgatccagatctcccagcccaggccccaggcgcccagcgtcgggctctcccagtcgtcttccacgaagcgcacgtcgtgggccgagatatcgatgccgatggcctcaagagagcccagatacagatcctggatgttgtccggcgagggcttgatgagcacctggaactggtagtagaactgcccgcggttggggttctcgccgtagcggccgtcggtgggacggcggcagccctgcacgtagcaggtgcgccaggtgtcgggccccagcgagcgcagcgtggtggccggggcgttcgtgccggcgcccacctcgttgtcgtagggctgcagcaccacgcaaccggtgctcgcccagtagcgctgcaggttcatgatgacgtcttggaaggtggggggcgtcgccttcccgaccttctcggcagtgtctggtgccatgggtctcctttgctcgaattacagcgggccgacgtcggtcagcggccagtagatgaatatcgccttgcccgtgacgctcgactccttgatggcgccgaagtaacgggaatcctgggaattggtgcggttgtcccccatgacccacaggccgccttcgggcaccgtgtaggggtagtcgatggtaagcccgtagtagggcgtcagcgggtaggacggctcgccgcgggtgtagggctcgtcctgcagcacgccatctacatagacgcggccgtcgcgcagatcgacggtctggccgcccacagcgatgacgcgcttgatgaggatgcggccgccctgctccggatcggggtcttggaaggtgacgatgtcgccgggcgccgggtcgctgccgtagtaggtgatcttctcggagaagaccatgtcgccgggcatgatggtctcctccatggagccggaggggatttcgtaggcttggaagacgaaggtgcgcagcccccaggagagcagcaccacgagaaccacgagcacgagcacggagagcaccgtgcgcagaaagctcgaggcgcgcgaaggacggggctggggctgcggctggtaggcgtaaggatcggtcccatagccgttgtcgtacatcttcgggatgccccttccacgtctgcgctcacaattgtcggaaacgctatgataccccttcggccgcgcccgtcggcgctggttccaacaacttcaaaaatttctggtcagcgggggtaaggcggcccgcggcctcggcggcggcgatgaggtcggggcgggcggcggccgtgcgggcgagggactgctcgcggcgccagcgcgcgatggcggcgtggttgccgctcgtgagcacctcgggcaccgccatgccgcgaaagtcggcggggcgtgtgtactggggatattctagaaggccgctggtgaaggactcgtccacggggccttcggccgcccccagcacgccgggcagcttgcgcaccgcggcatcgatgaccaccatggaggccagctcgccggaggtgagcacgtagtcccccagcgagatgacgtggtcggccagggtgtagacgcgctcgtcgatgccctcgtagtggccgcagatgaacagcaggtggtcggcggcggcgagcttatcggcgtaggcgtcgtcgaaggggcggccctggggggctaggaagacgatttgggggcggtgttgttgcgactcttccacggctgaggcaagtttcgcttccacgaactcttttcccagaatggcttctaccgcctcgaagatggggtcgcacttcatgacgaggccggcgccgccgccgtaggggtcgtcgtcggtggtgcggtggcggtcgtgagtccagtcgcgcaggtcgtgggcgcgaaattccaagatgcccttctcctgggcgcgcttcatcatggactcgcccatgaccgagtcgtacatatgcgggaatgtggagagggtttcgatgagcataggatcccctgtcgatgggtggcgcggacgggcggaaaagacgacgcgcggggcgtcctacagatcgagcaggccggcgggcagggacacgtcgatgcggcggccgtcctcgtccacatcgacgatgaactcgtccaccagcgggatgagcgcctctcccccctcggcgcggcgcaccgtgagcaaaggctgggtcgcgcgctcggcgacttccacgacctcgcccacgtatcccgcgcgctcgtcgtgcaccgaccagccctcccaggcgggcagcgcctcggcctcttccaacaccgcggcatcgatgtcctcctcgcgagccagaagctcgcagccggcaagaagctcggcactgctcagatcggacacctcgtcgaagaaaacgagcgcctcgttctcggcccgttccgtcacctcactcacggtgagcgtgcggggcgcgtccagctgaggcggcacgacggccagcgtgagacccggatacagcgcaaagggaaggcccgacgcacctcgtgcgacgagccctccgttcaaattcttcggtttcgccagataggcgatggacatccagccgcgcatttagtcgatgagctccacatcgaccagcttgcccgacttcgacgcggcggcgcgggccaaggtgcggatggacttgatgacccggccctgacggccgatgaccttgccggcatcgtcggcggccacgcggatctccaccatgatgttgccgtcctcggtctcggcggccgtgatgtccagggcatcgggttcgtcgatgagcggacggacgatggcgtcggtaaggccggcgaggtcttccgtgagatcggccatagcgctaggcgttctcgcgggcgatcgtcagcagcttcgcgacgcgatcggtgggctgggcgccgtcggcgatccagcggtcgaccttctccatgtcgaactggatcaggtgcggatgggtgcaggggttgtagcggcccacttcctcgatgaagcggccgtcgcgcggagagcgggaatcggcgacgacgatgcggtagtacgggcgcttcttggcgccgtggcgagcgaggcgaatcttgactgccatgaaatggaactccttcttgtactttcattctctatacgcaagcactgctcgcacagtgcggcgaaaacagcaattgcttatattacggcttgagcgcaggaaaggcaagcgcccatccacgaactatccacggacggcgcccggaacggctggcaactccaccacgcgggtggcgaggcgggcggccagggccggggaatgggagacgaagatgaggcccatggcgcgcgcctcggcctcggcgacgagcgcctgccagatctgcgcctgggtcacggcgtccagcatagtggagacctcgtcggcgatgaggtagctcgggtgcgcgccgagggcccgggcgatgcagaagcgctgcatctcgccgccggacagctcatggggatagcgcgaaagccatgcgtcgcggatgcccaaaagctcccgcagacggcccagctcctcctcgcttgcgccgcattcggcgagactcgccgccatgcgcatgcgcggatccaacgtcagctccggatgctgcccgatgagctgcaccgggcacgggccacgcctcggcagcggggagccatcgacgagcacctcgcccgtccggggcgccagatagcccgccagcacgcggcagagcgtcgtcttaccggtgccggaaggcgcggccagctgcacgcgctcgccggaggcaacggcgagggagacatcatcgagaacgggacgaccgtcgaaggcgacggagaggtggcggccttctaacatagcggacctccttcggtgggcacgacaaatccgtgctcgggcagggcgtgccagagctgacgggtgaaggggtggcccagggtatcgggcgaggcgaaggcggcgaccgaggtctcctccaccaccgtgccgtcgcggaagacggcgacgcgatcggccacggtgagcgccagctcgatgtcgtgggtgatgagcatgacgccgccgccggcgtcggcaaaggcgcggaaatccgcgagcgccgcctgggccagcgacagatcgaggccgggcgtgggctcgtcggcgatgatgagcttcggcgcgtccatgagcgcgcaacacagaagcacgcgtcgggccatgccgccggagagctcgtgggggtacaggcgcgcgacctcctcggcaaggccgtagcgggcgaacaactcggcgcgccgggcgcggcggcgggcggcatcggcgcgacgggccgcaccgcgtccccgcggcatgccttccacttggcgccccacccgcatgagcggatcgaggcttgccaccgattggggcacaagggcaatgccgcgcccgcgctcggcggccagggccgccgcgtccatgggacggccgtcgaaccagatgcgcccgcgcacgagcgcgttgggctcgaacaggcccagcaccgcatcggccagaagcgtcttgcccgagcccgaggcgcccaccacggcgacgatctccccctcgtgcacggaaaggctcagggagtggatgacctccacctcccgctggggcgcatccaaatagcgccccagccgtccccgatccgcgcgcgaatccccttgcgccctcgtcgccgccgcttcctcatcgtacatgagaaacgacacggagaggtcctccaccgtcagcaggtgatggccgtgcccgtggcgcgacgtggccgcgtgggagtggtgatgatgcaccggctgagcgccgtgatcgacggcctcgtgggcgacggcaggcttctcttccatactcccctcctattcctgggcgtaggccggatcgacgagcttgcgcaggctcgttcccaccacatcgaacaacatgacgcagacgacaagcgccagccccgggaacaccgcgagccaccacagccccgccgacaggtagcccatggcctcggagaggatgatgccgatggccggcatctccggcggcagcccgaagccgaggaaggtgatggccgcctcgtgaaggatggcgtggggaaacagcagcacgagccccacgacgaactgcggcaggacatagggcaccatgtgccgtgcggcgatggcgagccggcccgcaccgagacgggcggcggccgcgacgaaatcggaggatgcgcactggagtatttccgcgcgcaggatgcgggcgaggctcggccagtgcgtgagggccacgccgatggtgacgccccagaaccccttgcccaaagcgtaggagatgaggatgagcagcacgatgtggggaatgcccatcatgaggtcgatgagccagctgaccgcatggtcggcccagcgggggcccagcgccgccgcggccgccaacgcgagcgcgatgagcgaggaggccacagccgccatgaggcccacgagcatgctggtggaaaggccggccaacgtgcgcaggagcatgtcgcggcccatccagtcggtgccgaacgggtgcgaaagcgaagggggcaggctcttggcggcgaaatcggtcgcctgggcggccggccccgccatgagaccggccaccacaacggcagccagcagcagcgccccgcccagggcgagcgcgaaggcacggcggcgattgggcagccgaaggcgccgcggcgccgagagcacggggggttggttggcaaaaaccgcatcagtcatcagcgacctccttctgccgacgcaccgggcgcatacgaggatccaccaggccgtagatgaggttcgcggccaagttccccgtgaacacgagcgccgccgacacaagggcgatgccggcgagcagggccacgtctcccccgaggccggccgtgacggcggcctggccgagaccgggatagctgaacacctcttccacgagcaccgagccgccgaagatctcggcgatctgggagaactggagcgtgatggccgggagcgccagattgcgcaggccgtggcggatgagcgcctcgcgccgcgtgaggccgcgggcccgggcgaagcggacgtagtcgctgttcagcacatcgatggccttggcccgggtgtgcagcgccacgttggccacccccaccaccgatagcgtgatggccggcagcgccatgtgatgcagcgcatcggcgaaggtgacatcggcggccgccactcccacgggcaccgagaagccgagggggaaccacccgagccacacggagaacaccatgaacaaaagcagccccacccaaaacgtcggcgaggcggccagaacgaagcagtagccgcacacgaagcgatcgagcagccgcccctcgcgcagggccgccgccacgcccaggacgaaaccgagcacgccggagacgacccaggcgacccccatgagggcaagcgagttggccgcccgcgaggcgatgacctcggccaccggcgcgttgtagcgcagcgacatccccaaatcgccgtgcagaaggtcgccggcccaagcgagaaaacgctcgagcatgggcgtgtcggcaccccagtaggccgccagcgccgcccgcttctcctcgctcatggacatgagcgccgcctgccccacgttggcctgcagaggatccaccggcgagagactgaccagcgcgaacgtcaccaccgccaccgccatcatcaacagcaggaaccgcccaagctgcgacacgacgtacctagccatggcacaaccccattactctcgcagcagcgagctttgggcggtgctcacaaagcgagttccgcagatggtatcgaaggcgcagcgagtacgggaaaaggcaatcatgtcgccttagataccagcgaggactgtctgagcgactgagcactgcccaaagctcgcgtccgacgatgttcaacatagttttagctccaagaccactggtcgatattgttcaccaaagaccacccgtgcccgtgggggtgcggcttctgctcggccacaataagcccctcgcgctcgaagtacaagtgatccacgttggcgagccacacccaggtggccgctccctccggcgccacgccagtctcagtggccgcatcccactgggcggcctggtagaagggataggactcctccaccgtgcgggccgcctgggccgcttccaagttcgcgtccaccgtgtcgctcatgtactgggcgtagttgccccaaccggtggagtaggtgagctcgaacagctccaccggcgagttggaaccccagccccacagcaccggatcggcgtactgccgcaggtagatgtcgtcccagctggcccccttcggcgtaatggtgatgccgagggccgccgcctggtcggcgaagtcgtaggccaaagcctggcgcgtggaatcgccggcggcgtagtacaggtcgaaagcgcagggcagcccgtcccgggcgcgcatcccgtcgtcgcctcgggcccagccggccgcatccagcaggcgctcggccgccgcgacgtcagtttccacacgcatggcctcgctcgaccagggcatgccgtcgcccaccgaataggccgcccggccgaagccggccagcacgtgctcgatcatctggctgcggtcgatgccgtagttgagcgcccgccgcacggcaaggtcgctcgtgacgtcgttgccgccggcgtagaccatgtcgccttccacggtgacatcggtgccggcgggattgcagggcagcgagatgccgcgggagtccaccgaagcgcagttgagcagcgtgtaacccgcgggaaccgccccggccagcgccgccgaggtgtaggccacgtccgccgtgcccgactgggcggcggccaacgacgcgtcctcttccatgaacagcaccacaacgcggtccatgagcggcgcatcgccgtaatagtcggggttggcgcgcaggatcacctgctggccgcgatcccattgctccagcatatagcggccgctgccgatgggatgctcaccgtaatcgggcccgtaggcatgggccggcacgatgcccaccacggcgagcgtgtacagcagcgcattgttcgggcgcttcatggcgatctcgcaggttgtggcgtcaacggcccgcgcctcgtccaccatggacagatccgcctcggccgcttcgccgttcacgatgccgttgatggtgaaggccacatcctcggccgtgagcggcacgccgtcggtgaacatcacgtcctcgcggatatggaacgtccaggtgaggccgtcctcggagcagccgtaatcggtggcgagatcgttcacgaaggcgaggttgttgtccgtggcgatgagcgtcgattggatgagcggctcgtgcacgtgctcgccggccccccaccccacgagcggatcgaagccggcggccggttccgaggagggcgtcatggtgattaccacctggcttacgccgtcgggaccgacgccggcacccgccgcgccggcagccgcaggttcgttcgcgcccgagtctgccgctccccgcgcgcaccccgccaaaagcgcgacgctccccgccgctccggcaagtcccgctgcacgcacgaagttccttctcgtcagggccatggcttctcctcctgttggtgttacgtctcttcaatgcgtaacaataccataggcgagccaccagtgttacggaatttcgattcgtaagacgaatggccgatgcgaaaggcaaatagccgccatcccgctaatgcaggacgctgtcgcggggcggggctccgcgcgcagttcaatggagtgcgcgcatcaccttccaaaccgcggcgatacggtgcactccattgctgtttgagcacggagccccgccccgcgacagcgtccggaggggcgtctcggtcgtcaacagcggagaaactactgtcccatcatatcttggatcttcttgaggtcgctcatggacatgccgcccatgcccggaatacccaggccgcggcggcgcttgcccttcttccccttcttgcccttgcgcgaggcctgctgctccatgccggcggtggcctgcttcaccattttcttcgtctcgttgaacttcttcatcatctggttcacgtcggtgacggtgacgccggcgcccttggcgatacgggcgcggcggctgccgttcagaagctccggcttggcccgctcggccttggtcatggagttgatgatgacctccatggcgtcgagtgccccttcatccacctgccccgagccgagcgctttgtcgccgccgggcagcgcgctgatgagcttggaaacgccgcccatcttgcgcacctgcttgttcatcatgaggaagtcgtccaaggtgagctggccgcgcatcatgcgctcggcctccagctcctcctcttcggcctgctgcacgcgcacggcgttctcgatgagcgagacgacgtcgcccatgccgaggatgcgcttggccatgcggtcggggtggaagacctccagggaatcgggcttctcgcccgaggagatgaacttgatgggtttgccggtaacctcgcggatggaaagggcgccgccgccgcgggcgtcgccgtccatcttcgacatgatgacgccgtcgaagtcgaccgactcggcgaaggcctccacgacgttcacaacgtcctggccggtcatggcatccaccaccatgaggatctgatcggggtgcgtggcgtccttgatggcctgggcctcctccatcatgtcggtgtccacgtgcagacggcccgccgtgtcgatgatgaccacgtcgcgcaggttgtcgatggcgtcctggatgccctcgcgcgcgatggccaccggatcgcgcccgtcgccgcggtagacccgcacgccgatctcgtcgcccaaggtctgcagctggtcggccgccgcgggacggtacacgtcgccggcgatgagcagcggcgagtgattctcctgcttcagccggtaggcgagcttggccgccgccgtggtcttgccggagccctgcaggcccacgagcatgatgacattggggatgcggcttgagagcacgagccgggaatcggtgcggccgagtagctcggtcagctcgtcgagcacgatcttcacgacgttctgggccggagtgagagagtccagcacgtcggcggacaggcagcgctccttggtgcgggcgacgaagttcttcaccactttgaagttgacgtcggcctccaagagcgccaggcggatctcgcgcatggcggcgttgatgtcgtcctcggtcaggcggcccttgctgcgcaggccggagaagatgccctgaaggcgttcggagaggttctcgagcatgggggttccttatctattcaaacaggcgcttccagaagcttttcttttcggactcgggggccggctcgggctcgggctcaggctcgccctcggcgttttcatcggcggcggccatggcgagctcggccagctcgtcgtcggtgaagggggcatcgtcgaagacgccttcctcggccgcctccgcaacggcatcggcgttgcggtcgagctccgtcagctcggcggcctcaagaccggcggaggtatcctcctcggtttccaggacgagggtgtcgtgggtgcggcggcccaaggcggcttccagcagatcggcattgtcgggctcggctgccgcctcctccgcggcatcggcgaaggcctcttccgcatcgccctgcgcgtccaccacgggcgcttcgccatcctcgacctccgcgagggcctccacggtcgcgccctcgaccgtctcctcggcagacccctcggccgcctcctcggcctcggccgcgcacgtcggcgcgccctccagcacgtcccggcggcgctcgccggccgtcacggccgcctccttggcgttctcgccgcgcaggccgtcctcatccgcatcgaagcgctcgtcgaaagtgccgacgagcgccgaggcgaactcgcgggcgtcgaagtcgcgcaagtcgtcgatgccctcgcccacgccgatcttcacgatgggcagccccagctcgtggctcacggccagcgcgatgccgcctttggccgtgccatcgagcttcgtgacgataagggcgtccaaatcgagcgcgcggttgaactcgcggacctgctgcaggccgttctggcccgtggtggcgtcgatgacgagcaccgtgtacaccggcagcttcgagcgcttgcgcaccacgttcactactttctccagctcgcgcatgaggtcggcggaggtgtgcaggcgcccggccgtgtcgatgagcacgagctcggcaccggtcgcttcggcgcgctccagcgtgtcgtagcacacgctcgccggatcggccccgcgctctcgggtgaccatctccaccccggcgcggcgcgcccacacctcaagctgctcgatggcggcggcgcggaaggtgtcggccgagcccaggatgaccgcgcgacccgcatcggtttccgccttggcgagcttgcccacggtggtggtcttgcccgtgccgttgatgcccacgaacagcaccactgcctcatcgccaccgaagatgtcggccccgggctcgatgaaggcaccggcgatctcgtcgttcaagaggtcgagcaccgcataggcgtcgggcagcgccttacgggtggcttggtcgcgcaggttctccacgatgtcgctggccgccgccccgcccacatccgacaggatgagcgtttcttccaagccctcccagaactcctcgtccaaatcgggtccacggtccaaaaggacgttcatcgactccttgaacttgtcgcgcgagcgggaaagcccctcgctgatgcgatcgaaaaagcccatcgggcactccttcaaaatcatgggcgacggcgcccgtcagcaacggccgtcgggccgtttcgttaaaatgttccttatagtttacgacatcgagtgccccacactgccgccctgacaatttctttcattattttggtcacaaaatcgacttctgggtttgaggttcaaggtcaaacggctggatcagcattttccaaggccttccagatgacgttttgcgtaaaaagctgcctccatgatcgcaaagagcgcct
